(19) United States
(12) Patent Application Publication
(10) Pub. No.: US 2022/0298098 A1
(43) Pub. Date: Sep. 22, 2022

(54) HALOGENATED COMPOUNDS, PROCESS AND USES THEREOF

(71) Applicants: Ciimar - Centro Interdisciplinar De Investigaçäo Marinha E Ambiental, Matosinhos (PT); Universidad de Oviedo, Oviedo, Asturias (ES); Universidad De Almería, Almeria (ES); Fundacíon Privada Instituto De Salud Global de Barcelona (Isglobal), Barcelona (ES); Fotosintetica & Microbiologica Srl (F&M), Firenze (IT); Universidade do Porto, Porto (PT)

(72) Inventors: Vitor Manuel DE OLIVEIRA E VASCONCELOS, Matosinhos (PT); Pedro Nuno COSTA LEÃO, Matosinhos (PT); Vítor Manuel CAPELA RAMOS, Matosinhos (PT); João Carlos PEREIRA MORAIS, Matosinhos (PT); Raquel CASTELO BRANCO, Matosinhos (PT); Flávio Luís DE OLIVEIRA, Matosinhos (PT); Mariana ALVES REIS, Matosinhos (PT); Sara María SOTO GONZÁLEZ, Barcelona (ES); Yuly LÓPEZ CUBILLOS, Barcelona (ES); Virginio CEPAS, Barcelona (ES); Felipe LOMBÓ BRUGOS, Oviedo (ES); Claudio J. VILLAR GRANJA, Oviedo (ES); Ignacio Gutiérrez DEL RÍO MENÉNDEZ, Oviedo (ES); Saúl REDONDO BLANCO, Oviedo (ES); Fernando LÓPEZ ORTIZ, Almería (ES); María José IGLESIAS VALDÉS-SOLÍS, Almería (ES); Raquel María GONZÁLEZ SOENGAS, Almería (ES); Liliana RODOLFI, Firenze (IT); Giacomo SAMPIETRO, Firenze (IT)

(21) Appl. No.: 17/638,398

(22) PCT Filed: Aug. 28, 2020
(86) PCT No.: PCT/IB2020/058040

§ 371 Date: Feb. 25, 2022

(30) Foreign Application Priority Data
Aug. 30, 2019 (PT) 115761

(51) Int. Cl. C07C 69/63; A61P 31/04; A61L 27/54; A61L 29/16

(52) U.S. Cl. CPC C07C 69/63; A61P 31/04; A61L 27/54; A61L 29/16; A61L 2300/22; A61L 2300/404

(57) ABSTRACT

The present disclosure relates to halogenated fatty acid lactylates, in particular to chlorinated fatty acid lactylates.

The halogenated fatty acid lactylates now disclosed have antimicrobial and/or antibiofilm activity towards healthcare associated microbial infections.

### TECHNICAL FIELD

[0001] The present disclosure relates to halogenated fatty acid lactylates, in particular to chlorinated fatty acid lactylates. Namely, the halogenated fatty acid lactylates may be isolated by the cyanobacterial strain Sphaerospermopsis sp. LEGE 00249—which was received, on Aug. 8, 2019, for patent deposit purposes at the Scottish Association for Marine Science Culture Collection of Algae and Protozoa (CCAP)—International Depositary Authority under the Budapest Treaty—under the CCAP number 1471/1.

[0002] The halogenated fatty acid lactylates now disclosed have antimicrobial and/or antibiofilm activity towards healthcare associated microbial infections.

### BACKGROUND

[0003] Biofilm-associated microbial infections include endocarditis, osteomyelitis, sinusitis, urinary tract infections, chronic prostatitis, periodontitis, chronic lung infection in cystic fibrosis patients, middle ear infections, and various health care associated infections (mainly the ones related with medical devices) [1].

[0004] Healthcare associated infections are the most frequent adverse cases in the healthcare settings worldwide. For hospitalized patients the prevalence of infection is 7% in developed countries and 10% in developing countries [2]. Specially, the surgical-site infections and the ones related to medical devices such as catheters and implants are the most frequent types. Staphylococcus aureus and coagulase-negative staphylococci are the most frequent pathogens found in those cases, among other gram-positive and gram-negative bacteria [3]. The growth of bacteria within a biofilm on the surfaces of catheters and implants, challenges its treatment, since biofilms confer tolerance and resistance to antimicrobial therapies [3-4].

[0005] The formation of the bacterial biofilm on medical devices starts with the adherence of bacteria to biomaterials through interactions between cell surface proteins or capsular polysaccharide/adhesins to the biomaterial surface. Consequently, the bacterial density increases, developing the biofilm with the production of an extracellular polymeric matrix (proteins, DNA and polysaccharides) and matures. When the environmental conditions are not adequate (low oxygen, nutrients, etc.), the biofilm starts to disperse, disseminating the infection within the host [4].

[0006] Biofilm infections are difficult to overcome solely by using antibiotics, mainly due to inherent antibiotic resistance. This can be attributed to poor drug diffusion through the exopolysaccharide matrix of the biofilm, to the biofilm environment (restricted diffusion gradient of oxygen, glucose and other nutrients), and the existence of persister cells that can affect the mechanism of action of the drugs [5]. Thus, a need exists to develop new and effective agents that can prevent and treat biofilm associated infections.

[0007] Lactylates are widely used as emulsifying agents in food and cosmetic industries, its use was approved by FDA and EU regulations due to their non-toxic effects to humans. These molecules also present biodegradable properties, making them very interesting for industrial applications [6]. Moreover, the antimicrobial effects of lactylates gave rise to several patent documents such as U.S. Pat. No. 6,878,757B2, U.S. Pat. No. 7,973,006B2 or WO2018222184A1.

[0008] These facts are presented in order to illustrate the technical problem addressed by the present disclosure.

### GENERAL DESCRIPTION

[0009] The present disclosure relates to novel halogenated fatty acid lactylates, in particular chlorinated fatty acid lactylates, with antimicrobial and antibiofilm activity towards healthcare associated microbial infections.

[0010] These compounds have the advantage that they are from a natural resource. Thus, the novel halogenated fatty acid lactylates, in particular chlorinated fatty acid lactylates, were isolated from the cyanobacterial strain Sphaerospermopsis sp. LEGE 00249, a commercially available strain that can be purchased at http://lege.ciimar.up.pt/ordering-services/.

[0011] Furthermore, Sphaerospermopsis sp. LEGE 00249 also received, on Aug. 8, 2019, for patent deposit purposes at the Scottish Association for Marine Science Culture Collection of Algae and Protozoa (CCAP)—International Depositary Authority under the Budapest Treaty—under the CCAP number 1471/1.

[0012] The full genome of Sphaerospermopsis sp. LEGE 00249 is also herein disclosed in the sequence listing section—SEQ ID NO 1-146.

[0013] The novel halogenated fatty acid lactylates, in particular chlorinated fatty acid lactylates, are structurally related with lauroyl lactylates, which are well known molecules commonly used as emulsifiers in food and cosmetic industries. The novel compounds are produced from the natural esterification of lactic acid at the C₂-hydroxy group with a halogenated fatty acid not described to date in the literature.

[0014] The halogenated fatty acid lactylates, in particular chlorinated fatty acid lactylates, of the presented disclosure were discovered through bio-assay guided and mass spectrometry (MS) guided approaches.

[0015] The novel halogenated fatty acid lactylates, in particular chlorinated fatty acid lactylates, present antibacterial activity against Staphylococcus aureus and antibiofilm activity against coagulase-negative staphylococci (CNS).

[0016] The present disclosure relates to a compound of formula I

[chemical structure]

[0017] wherein
[0018] R, R¹, R² are independently selected from each other;
[0019] R is a C₈-C₁₆ alkyl chain comprising at least one halogen selected from Cl, Br or I, in any position of said chain;
[0020] R¹ is selected from H, CH₃, CH₂CH₃ or CH(CH₃)COOH;
[0021] R² is selected from H, CH₃, Cl, Br or I;
[0022] or a pharmaceutically acceptable salt, ester or solvate thereof.

[0023] In an embodiment, the compound now disclose may comprise a R, wherein R is a C₁₀-C₁₄ alkyl chain comprising at least one halogen selected from Cl, Br or I, in any position of said chain, preferably comprising at least one Cl in any position of said chain, more preferably comprising at least two Cl in any position of said chain, even more preferably comprising three Cl in any position of said chain.

[0024] In an embodiment, the compound now disclose may comprise a R, wherein R is a C₁₁-C₁₃ alkyl chain comprising at least one halogen selected from Cl, Br or I, in any position of said chain, preferably comprising at least one Cl in any position of said chain, more preferably comprising at least two Cl in any position of said chain, even more preferably comprising three Cl in any position of said chain.

[0025] In an embodiment and to obtain even better results, the compound now disclosed may be

[chemical structure]

[0026] wherein R¹, R², R³, R⁴ and R⁵ are independently selected from each other;
[0027] R³, R⁴, R⁵ is selected from H, CH₃, Cl, Br, or I, and
[0028] at least R³, R⁴ or R⁵ is Cl, Br, or I.

[0029] In an embodiment and to obtain even better results, R³, R⁴, R⁵ may be selected from H, CH₃, or Cl.

[0030] In an embodiment and to obtain even better results, at least R³, R⁴ or R⁵ may be Cl.

[0031] In an embodiment and to obtain even better results, R¹ may be H.

[0032] In an embodiment and to obtain even better results, R² may be CH₃.

[0033] In an embodiment and to obtain even better results, R³ may be H or Cl.

[0034] In an embodiment and to obtain even better results, R⁴ may be H or Cl.

[0035] In an embodiment and to obtain even better results, R⁵ may be Cl or CH₃.

[0036] In an embodiment and to obtain even better results, the compound may be

[chemical structure]

preferably the compound is

[chemical structure]

more preferably the compound is

[chemical structure]

[0037] The present invention also relates to a compound for use in medicine or veterinary.

[0038] In an embodiment, the compound now disclosed may be for use in the treatment or prevention of a microbial infection, preferably a bacterial infection, selected from endocarditis, osteomyelitis, sinusitis, urinary tract infection, chronic prostatitis, periodontitis, chronic lung infection in cystic fibrosis patients, ear infection and/or health care associated infections related with implants and catheters.

[0039] In an embodiment, the compound now disclosed may be for use in the treatment or prevention of a bacterial infection, wherein said infection is a coagulase-negative staphylococci infection.

[0040] In an embodiment, the compound now disclosed may be for use in the treatment or prevention of a bacterial infection, wherein said infection is a coagulase-negative staphylococci infection, wherein the coagulase-negative staphylococci infection is a Staphylococcus aureus infection.

[0041] The present disclosure also relates to a composition for use comprising any of compounds herein disclosed, in a therapeutically effective amount and a pharmaceutically acceptable excipient.

[0042] Furthermore, this disclosure also concerns the use of a compound as a biofilm inhibitor, preferably as a biofilm inhibitor in an implant device and/or implant and/or catheter.

### BRIEF DESCRIPTION OF THE DRAWINGS

[0043] The following figures provide preferred embodiments for the present disclosure and should not be seen as limiting the scope of the disclosure.

[0044] FIG. 1. Results of the bioassay for antibiotic activity, where the bioactive fractions F32, F34-F28, F40-F41 and F43-48 showed complete inhibition of Staphylococcus aureus (S54F9 strain) growth. These chromatographic fractions were obtained by HPLC separation of the extract of Sphaerospermopsis sp. LEGE 00249.

[0045] FIG. 2. Mass spectrometry data of bioactive fractions F43-F45 that contain compounds 1 and 2. These chromatographic fractions were obtained by HPLC separation of the extract of Sphaerospermopsis sp. LEGE 00249.

[0046] FIG. 3. Mass spectra of bioactive fractions that contain compounds 9 and 16. These chromatographic fractions were obtained by HPLC separation of the extract of Sphaerospermopsis sp. LEGE 00249.

[0047] FIG. 4. Planar structures of the novel chlorinated fatty acid lactylates 1, 2, 9 and 16.

[0048] FIG. 5. (A) Spectrum view of fraction F44 at 4.6 min showing the m/z 305.1499 and m/z 377.1697, and the in-source-formed species at m/z 269.1733 and m/z 341.1938. Mass differences are shown. (B) Proposed mechanism for the generation of the in-source-formed species m/z 269.1733 and m/z 341.1938.

[0049] FIG. 6. (A) Spectrum view of fraction F35 at 3.6 min showing the m/z 339.1101 and m/z 411.1300, and the in-source-formed species at m/z 375.1540 and m/z 303.1337. (B) Spectrum view of fraction F40 at 4.1 min showing the m/z 373.0706 and m/z 445.0956, and the in-source-formed species at m/z 409.1142, m/z 337.0944 and m/z 301.1179.

### DETAILED DESCRIPTION

[0050] The present disclosure relates to halogenated fatty acid lactylates compounds, in particular chlorinated fatty acid lactylate compounds, isolated from the cyanobacterial strain Sphaerospermopsis sp. LEGE 00249. This organism was isolated from a Portuguese freshwater system and is maintained at the LEGEcc in CIIMAR, Matosinhos, Portugal (the strains are commercial and can be purchased at http://lege.ciimar.up.pt/ordering-services/).

[0051] The strain was cultured in Z8 medium at 25° C., with a photoperiod of 14 h/10 h light and dark respectively, and at light intensity of 10-30 μmols photons s⁻¹m⁻¹. Cultures were grown up to 50 L with constant aeration and at the exponential phase, cells were harvested through centrifugation, frozen and freeze-dried. The biomass of Sphaerospermopsis sp. LEGE 00249 (7.7 g) was sequentially extracted with hexane, ethyl acetate and methanol yielding crude extracts of 66.07 mg, 352.88 mg and 949.65 mg, respectively. The bioassay guided fractionation of the methanolic extract yielded the novel chlorinated fatty acid lactylates.

[0052] The methanolic extract was submitted to solid phase extraction (Waters Sep-Pak® Vac 35 cc 10 g C18 Cartridges) using mixtures of water/methanol (4:1 to 1:4; 4 to 8 column volumes each), yielding an enriched fraction free of chlorophylls and other pigments. The fraction was then chromatographed using semi-preparative HPLC conditions with a gradient of water/acetonitrile 19:1 to 0:1 (both with 0.1% of formic acid) as mobile phase. Fractions were collected every 30 s (total run time of 70 min) and 140 fractions were collected into 96-well deep well plates, and a 25% of a 67 mg 140-well fractionation was tested against Staphylococcus aureus S54F9. In order to carry out this broth microdilution antibiotic susceptibility test, 50 μL of each HPLC fraction resuspended in 14% MeOH in water were mixed with 50 μL of the S. aureus suspension at 10⁶ CFU/mL in 2×MHB in a microtiter plate (final desired inoculum=5·10⁵ CFU/mL, final concentration of MeOH in bioassay plate=7%, final volume per well=100 μL). The microtiter plate was replicated onto a selective/differential solid medium (Manitol Salt Agar) in order to distinguish between bacteriostatic and bactericidal activities. Growth controls (broth with bacterial inoculum, no bioactive molecule) as well as sterility (broth only) and solvent controls (broth with 7% MeOH in water) were included [7].

[0053] The bioactive fractions (FIG. 1) were analyzed by UPLC-MS using a gradient of water/acetonitrile 2:3 to 0:1 (both with 0.1% of formic acid). The mass spectra were acquired in negative ion mode on ESI-q-TOF Bruker Impact II mass spectrometer. The analysis of the mass data showed typical chlorine isotope patterns, indicating the active fractions to contain compounds bearing chlorine atoms. More specifically, fractions F43-F45 had compounds with one Cl atom, fractions F35-F38 contained compounds with two Cl atoms and fractions F39-F41 had three Cl atoms (FIGS. 2-3). Fractions F37, F40, F43 and F45 were submitted to NMR experiments along with HRMS that unambiguously established the structure of compounds 1, 2, 9 and 16, presented in FIG. 4. In this way, compound 1 was identified as (S)-2-[(12-chlorododecanoyl)oxy]propanoic acid on the basis of its spectrometric and spectroscopic data. The HRMS analysis showed a monoisotopic m/z 305.1504 [M-H]⁻ (calculated m/z=305.1525), consistent with the molecular formula C₁₅H₂₇ClO₄. NMR characterization: ¹H NMR (CD₃OD, 600.13 MHz): 1.32 (m, 6H, H6′+H7′+H8′), 1.33 (m, 2H, H5′), 1.34 (m, 2H, H9′), 1.35 (m, 2H, H4′), 1.44 (m, 2H, H10′), 1.44 (d, 3H, J=7.1 Hz, H3), 1.62 (m, 2H, H3′), 1.75 (m, 2H, H11′), 2.37 (m, 2H, H2′), 3.55 (t, 2H, J=6.6 Hz, H12′), 4.99 (q, 1H, J=7.1 Hz, H2) ppm. ¹³C NMR (CD₃OD, 150.9 MHz): 17.74 (C3), 25.89 (C3′), 27.94 (C10′), 29.99 (C9′), 30.15 (C4′), 30.39 (C5′), 30.54 (CH₂), 30.59 (2×CH₂), 33.84 (C11′), 34.92 (C2′), 45.74 (C12′), 71.18 (C2), 175.06 (C1′), 176.54 (C1) ppm.

[0054] Compound 2 showed a pseudomolecular ion at 305.1509 [M-H]⁻ (calculated m/z=305.1525), presenting the same molecular formula as 2 (C₁₅H₂₇ClO₄). Through 1D and 2D NMR experiments the chlorine atom was assigned to position 6 of the dodecanoic acid side chain, and therefore the compound was named as (S)-2-[(6-chlorododecanoyl)oxy]propanoic acid. NMR characterization: ¹H NMR (CD₃OD, 600.13 MHz): 0.91 (t, 1H, J=7.0 Hz, H12′), 1.30 (m, 2H, H10′), 1.32 (m, 2H, H8′), 1.33 (m, 2H, H11′), 1.42 (m, 1H, H9′), 1.45 (d, 3H, J=7.1 Hz, H3), 1.49 (m, 1H, H4′), 1.53 (m, 1H, H9″), 1.59 (m, 1H, H4″), 1.66 (m, 1H, H7′), 1.64 (m, 1H, H3′), 1.68 (m, 2H, H3″+H5′), 1.76 (m, 1H, H7″), 1.78 (m, 1H, H5″), 2.41 (t, 2H, J=7.1 Hz, H2′), 3.92 (m, 1H, H6′), 4.99 (q, 1H, J=7.1 Hz, H2) ppm. ¹³C NMR (CD₃OD, 150.9 MHz): 14.38 (C12′), 17.55 (C3), 23.64 (C11′), 25.40 (C3′), 27.02 (C4′), 27.54 (C9′), 29.95 (C8′), 32.91 (C10′), 34.67 (C2′), 39.31 (C5′), 39.67 (C7′), 64.87 (C6′), 70.63 (C2), 174.74 (C1′), 175.57 (C1) ppm.

[0055] The HRMS data of compound 9 (S)-2-[(6,12-dichlorododecanoyl)oxy]propanoic acid indicated the molecular formula of C₁₅H₂₆Cl₂O₄ (m/z=339.1117 [M-H]⁻, calculated m/z=339.1135). NMR characterization: ¹H NMR (CD₃OD, 600.13 MHz): 1.35 (m, 1H, H9′), 1.37 (m, 1H, H9″), 1.46 (d, 3H, J=7.2 Hz, H3), 1.46 (m, 2H, H10′), 1.48 (m, 2H, H4′+H8′), 1.56 (m, 1H, H8″), 1.59 (m, 1H, H4″), 1.65 (m, 2H, H3′), 1.69 (m, 2H, H5′+H7′), 1.77 (m, 4H, H5″+H7″+H11′), 2.40 (m, 2H, H2′), 3.56 (t, 2H, J=6.7 Hz, H12′), 3.93 (m, 1H, H6′), 4.99 (d, 1H, J=7.2 Hz, H2), ppm. ¹³C NMR (CD₃OD, 150.9 MHz): 17.44 (C3), 25.38 (C3′), 26.99 (C4′), 27.41 (C8′), 27.80 (C10′), 29.46 (C9′), 33.72 (C11′), 34.62 (C2′), 39.29 (C5′), 39.5 (C7′), 45.68 (C12′), 64.78 (C6′), 70.31 (C2), 174.68 (C1′), 175.09 (C1) ppm.

[0056] The structure of 16 (S)-2-[(6,12,12-trichlorododecanoyl)oxy]propanoic acid was assigned on the basis of HRMS (C₁₅H2₅Cl₃O₄; m/z=373.0707 [M-H]⁻, calculated m/z=373.0746) and NMR spectroscopic data: ¹H NMR (CD₃OD, 600.13 MHz): 1.38 (m, 2H, H9′), 1.42 (d, 3H, J=7.1 Hz, H3), 1.45 (m, 2H, H4′+H8′), 1.56 (m, 4H, H4″+H8″+H10′), 1.64 (m, 2H, H3′), 1.69 (in, 2H, H5′+H7′), 1.78 (in, 2H, H5″+H7″), 2.19 (in, 2H, H11′), 2.4 (in, 2H, H2′), 3.94 (in, 1H, H6′), 4.91 (q, 1H, J=7.1 Hz, 1H2), 5.99 (t, 1H, J=6.1 Hz, H12′) ppm. ¹³C NMR (CD₃OD, 150.9 MHz): 18.23 (C3), 25.4 (C3′), 27.32 (C8′), 27.1 (C4′), 26.93 (C10′), 29.12 (C9′), 34.9 (C2′), 39.32 (C5′/C7′), 39.45 (C5′/C7′), 44.74 (C11′), 64.76 (C6′), 72.71 (C2), 75.02 (C12′), 175.11 (C1′), 178.48 (C1) ppm.

[0057] Furthermore, the HRMS analysis of the minor components of fractions F29-F50 yielded other novel chlorinated compounds. The calculated molecular formulas were consistent with fatty-acid lactylate-like compounds differing in small number of atoms (table 1, FIGS. 5 and 6).

TABLE 1
Identification of novel halogenated fatty acid lactylate compounds, in particular
chlorinated fatty acid lactylate compounds, by LC-HRMS analysis.

| | | | | | | New Molecule | |
|---|---|---|---|---|---|---|---|
| | | Proposed | Predicted | | | (NM)/In-Source- | |
| | | Molecular | m/z | Detected | Analytical | Formed Species | |
| | Compound | Formula | [M − H]⁻ | m/z [M − H]⁻ | Error | (F) | Observations |
| Mono-Chlorinated | 1 | C₁₅H₂₇ClO₄ | 305.1524 | 305.1500 | 0.0024 | NM | Lauroyl-1- |
| | 2 | C₁₅H₂₇ClO₄ | 305.1524 | 305.1495 | 0.0029 | NM | lactylates; |
| | 3 | C₁₅H₂₇ClO₄ | 305.1524 | 305.1504 | 0.0020 | NM | Isomers |
| | 4 | C₁₆H₂₉ClO₄ | 319.1681 | 319.1658 | 0.0023 | NM | Methyl lactate |
| | 5 | C₁₇H₃₁ClO₄ | 333.1837 | 333.1809 | 0.0028 | NM | Ethyl lactate |
| | 6 | C₁₈H₃₁ClO₆ | 377.1736 | 377.1707 | 0.0029 | NM | Lauroyl-2- |
| | 7 | C₁₈H₃₁ClO₆ | 377.1736 | 377.1697 | 0.0039 | NM | lactylates; |
| | 8 | C₁₈H₃₁ClO₆ | 377.1736 | 377.1702 | 0.0034 | NM | Isomers |
| Di-Chlorinated | 9 | C₁₅H₂₆Cl₂O₄ | 339.1135 | 339.1109 | 0.0026 | NM | Lauroyl-1- |
| | 10 | C₁₅H₂₆Cl₂O₄ | 339.1135 | 339.1105 | 0.0030 | NM | lactylates; |
| | 11 | C₁₅H₂₆Cl₂O₄ | 339.1135 | 339.1107 | 0.0028 | NM | Isomers |
| | 12 | C₁₅H₂₆Cl₂O₄ | 339.1135 | 339.1105 | 0.0030 | NM | |
| | 13 | C₁₆H₂₈Cl₂O₄ | 353.1291 | 353.1256 | 0.0035 | NM | Methyl lactate |
| | 14 | C₁₇H₃₀Cl₂O₄ | 367.1448 | 367.1416 | 0.0032 | NM | Ethyl lactate |
| | 15 | C₁₈H₃₀Cl₂O₆ | 411.1346 | 411.1300 | 0.0046 | NM | Lauroyl-2- |
| | | | | | | | lactylate |
| Tri- | 16 | C₁₅H₂₅Cl₃O₄ | 373.0745 | 373.0700 | 0.0045 | NM | Lauroyl-1- |
| | 17 | C₁₅H₂₅Cl₃O₄ | 373.0745 | 373.0713 | 0.0032 | NM | lactylates; |
| | | | | | | | Isomers |
| | 18 | C₁₈H₂₉Cl₃O₆ | 445.0956 | 445.0906 | 0.0050 | NM | Lauroyl-2- |
| | | | | | | | lactylate |

[0058] The culture of Sphaerospermopsis sp. LEGE 00249 was scaled-up in order to increase the yield for the isolation of the novel halogenated fatty acid lactylates, in particular chlorinated fatty acid lactylates, from the biomass produced. The strain was cultivated in a modified BG11 medium, a common medium for freshwater strains. The strain was gradually adapted to outdoor conditions in particular with regards to light intensity and photoperiod using as culture vessel a 7-L bubbled tube placed outdoors. A volume containing 15 g of dry biomass was then transferred to a 40-L Green Wall Panel (GWP®-III) photobioreactor in order to start with an initial biomass concentration of 20 g m⁻² of reactor illuminated surface. For the first days the photobioreactor was tilted backward (North facing) to reduce the light intercepted and thus reduce light stress to the culture, then it was tilted (50°) facing South to increase light availability and thus maximize growth and productivity. The culture was kept at a maximum temperature of 28° C. by circulating cold water inside a stainless-steel serpentine placed within the culture chamber and it was bubbled with air at a flow rate of 0.3 L L⁻¹ min⁻¹. Pure CO₂ was injected when the pH value exceeded 7.8. The culture was firstly managed in batch and then in semi-continuous with a 30% daily dilution. Average productivity was 7.6 g m⁻¹ day⁻¹ with an average irradiance of 29.6 MJ m⁻¹ day⁻¹. At the steady-state the culture was harvested by centrifugation, frozen and lyophilized.

[0059] The lyophilized biomass (29.3 g) was sequentially extracted with hexane, ethyl acetate and methanol. The resultant crude extracts were joined yielding 4.4 g that were fractionated by normal-phase VLC (Si gel 60, 0.015-0.040 mm, Merck KGaA) using an increasing polarity grade, of mixtures of n-hexane/EtOAc (9:1 to 0:1), EtOAc/MeOH (7:3) and MeOH, giving a total of 9 fractions. The resulting fractions were then analyzed by LC-MS that revealed the presence of the chlorinated fatty acid lactylates on the last fraction. More specifically, the compounds 1, 2, 9 and 16 were isolated after several chromatographic steps using reverse-phase column chromatography and reverse-phase HPLC using gradients of water/acetonitrile or water/methanol.

[0060] The biofilm forming ability of coagulase-negative staphylococci, when exposed to compounds 1, 2, 9 and 16, was assessed by quantification of total biomass by violet crystal staining [8].

[0061] The novel chlorinated fatty acid lactylates were able to inhibit the biofilm formation of coagulase-negative staphylococci (Table 2). The calculated concentration that inhibits the biofilm formation by 50% was 55.14, 94.60, 20.10 and 43.40 mg/L for compounds 1, 2, 9 and 16, respectively. Compound 9 showed highest antibiofilm activity.

TABLE 2
Coagulase-negative staphylococci antibiofilm forming
inhibition of compounds 9, 16, 1 and 2

| Compound 9 | | Compound 16 | | Compound 1 | | Compound 2 | |
|---|---|---|---|---|---|---|---|
| mg/L | % inhibition | mg/L | % inhibition | mg/L | % inhibition | mg/L | % inhibition |
| 721 | 88 | 150 | 71 | 140 | 74 | 257 | 90 |
| 360 | 87 | 75 | 68 | 70 | 0 | 128.5 | 89 |
| 180 | 76 | 37.5 | 0 | — | — | 64.25 | 74 |
| 90 | 66 | — | — | — | — | 32.12 | 31 |
| 35 | 62 | — | — | — | — | 16 | 0 |
| 22.5 | 56 | — | — | — | — | — | — |
| 11.25 | 22 | — | — | — | — | — | — |
| 5.65 | 0 | | | | | | |

[0062] The minimal inhibitory concentrations (MICs) against S. aureus were calculated for compounds 1, 2, 9 and 16 based on the antibiotic activities presented on FIG. 1. Thus, the predicted MICS range from 1790 mg/L to 5790 mg/L.

[0063] In addition, it is to be understood that any particular embodiment of the present invention may be explicitly excluded from any one or more of the claims. Where ranges are given, any value within the range may explicitly be excluded from any one or more of the claims. Any embodiment, element, feature, application, or aspect of the compositions and/or methods of the invention, can be excluded from any one or more claims.

[0064] The present disclosure should not be seen in anyway restricted to the embodiments described and a person with ordinary skill in the art will foresee many possibilities to modifications thereof.

[0065] The above described embodiments are combinable. The following claims further set out particular embodiments of the disclosure.

### REFERENCES

[0066] [1] J. L. Del Pozo, Biofilm-related disease, Expert Review of Antiinfective Therapy, 2017. DOI: 10.1080/14787210.2018.1417036
[0067] [2] WHO, 2011. Report on the burden of endemic health care-associated infection worldwide, Fact sheet on HCAI endemic burden worldwide <https://www.who.int/gpsc/country_work/burden_hcai/en/>
[0068] [3] B. Allegranzi, S. B. Nejad, C. Combescure, W. Graafmans, H. Attar, L. Donaldson, D. Pittet, Burden of endemic health-care-associated infection in developing countries: Systematic review and meta-analysis, Lancet. 377 (2011) 228-241. doi:10.1016/S0140-6736(10)61458-4.
[0069] [4] S. L. Percival, L. Suleman, C. Vuotto, G. Donelli, Healthcare-associated infections, medical devices and biofilms: risk, tolerance and control, J. Med. Microbiol. 64 (2015) 323-34. doi:10.1099/jmm.0.000032.
[0070] [5] H.-C. Flemming, J. Wingender, U. Szewzyk, P. Steinberg, S. A. Rice, S. Kjelleberg, Biofilms: an emergent form of bacterial life, Nat. Rev. Microbiol. 14 (2016) 563-575. doi:10.1038/nrmicro.2016.94.
[0071] [6] (a) Boutte, T.; Skogerson, L. “Stearoyl-2-lactylates and oleoyl lactylates” in Emulsifiers in Food Technology (2nd Edition), Norn, V. (Ed), Wiley: New York, 2015, Chapter 11, pp 251-270. (b) Wang, F. C.; Marangoni, A. G. J. Colloid Interface Sci. 2016, 483, 394-403. (c) Shah, R.; Kolanos, R.; Di Novi, M. J.; Mattia, A.; Kaneko, K. J. Food Addit. Contam., Part A 2017, 34, 905-917. (d) Draelos, Z. D.; Donald, A. J. Drugs Dermat. 2018, 17, 671-676.
[0072] [7] Wiegand, I., Hilpert, K., & Hancock, R. E. W. (2008). Agar and broth dilution methods to determine the minimal inhibitory concentration (MIC) of antimicrobial substances. Nature Protocols, 3(2), 163-175.
[0073] [8] Danese P N, Pratt L A, Kolte R, Exopolysaccharide production is required for development of Escherichia coli K-12 architecture, J. Bacteriol. 182(2000): 3593-3596.

1. A compound of formula I [chemical structure]
or a pharmaceutically acceptable salt, ester or solvate thereof,
wherein,
R, R¹, R² are independently selected from each other;
R is a C₈-C₁₆ alkyl chain comprising at least one halogen selected from the group consisting of Cl, Br and I, wherein the at least one halogen is in-located at any position of said chain;
R¹ is H, CH₃, CH₂CH₃ or CH(CH₃)COOH;
R² is H, CH₃, Cl, Br or I.

2. The compound of claim 1, wherein R is a C₁₀-C₁₄ alkyl chain comprising at least one halogen selected from the group consisting of Cl, Br and I, wherein the at least one halogen is located at any position of said chain.

3. The compound of claim 1, wherein R is a C₁₀-C₁₄ alkyl chain comprising at least one Cl located at any position of said chain.

4. The compound of claim 1, wherein R is a C₁₁-C₁₃ alkyl chain comprising at least one halogen selected from the group consisting of Cl, Br and I, located at any position of said chain.

5. The compound of claim 1, wherein the compound is [chemical structure]
and
wherein R¹, R², R³, R⁴ and R⁵ are independently selected from each other;
R³, R⁴, R⁵ are each independently H, CH₃, Cl, Br, or I, and
at least one of R³, R⁴ or R⁵ is Cl, Br, or I.

6. The compound of claim 5, wherein R³, R⁴, R⁵ are each independently H, CH₃, or Cl.

7. The compound of claim 5, wherein at least one of R³, R⁴ or R⁵ is Cl.

8. The compound of claim 1, wherein R¹ is H.

9. The compound of claim 1, wherein R² is CH₃.

10. The compound of claim 5, wherein R³ is H or Cl, R⁴ is H or Cl, and R⁵ is Cl or CH₃.

11. The compound of claim 1, wherein the compound is

[chemical structure]

12. (canceled)

13. A method for treating or preventing a microbial infection in a subject, the method comprising administering the compound of claim 1 to the subject.

14. The method of claim 19, wherein the bacterial infection is a coagulase-negative staphylococci infection.

15. The method of claim 14, wherein the coagulase-negative staphylococci infection is a Staphylococcus aureus infection.

16. A pharmaceutical composition comprising a therapeutically effective amount of the compound of claim 1 and a pharmaceutically acceptable excipient.

17. A medical device comprising the compound of claim 1 as a biofilm inhibitor.

18. A cyanobacterium strain with a deposit under the number 1471/1 of Aug. 8, 2019 at CCAP.

19. The method of claim 13, wherein the microbial infection is a bacterial infection.

20. The method of claim 19, wherein the bacterial infection is selected from the group consisting of endocarditis, osteomyelitis, sinusitis, urinary tract infection, chronic prostatitis, periodontitis, and chronic lung infection in cystic fibrosis patients.

21. The medical device of claim 17, wherein the medical device is an implant, a catheter, or a combination thereof.

The application's sequence listing, which the Patent Office published only in electronic form, follows.

SEQUENCE LISTING (146 sequences)

SEQ ID NO: 1 - DNA, 225832 bp, Sphaerospermopsis sp. LEGE 00249
  LEGE00249_4
ttcttgctttatgttgtcccttcccatcgtcgtcgggggatagctaaggcattaatgcagcatatagaaaactgggcaaaacaaaggggcgatcgccaaatcggactccaagtatttacctctaacacccccgccctcaacctttatcaaaatcttggttatcaaactcaatccctctggatgataaaattcattaggtgattggtgattggtgattggggactggggactggtgactggggactggggactggtgactggtgactggtgactggggactggggactgggaagaaatatttacctcctgcctcctgcctcctgccttctgcctcctgcctcctatataattacttttaaaaaaaatattatgtacgacgaagacgatataaacctacttgataacgaagctgatttagaaagccccctagacaaaatagaacctattacccctgaatcagaaatagttaaacctgatccagaggcaatgttagcactcttggaagatcctcaatcccagcaacgaatgttagccgcccgtgcattttgtgatattcaagatgaacgagctataccccatttaattcgcttattaaccgattcttgtcctttggtcagagtcagcgcctcctatgccttgggacgcaatcccagtcctgatgctgttgaacccttaattaatcaacttaaccgcgactttaacggttacgtgcgaaaaggtgtggtttgggctttaggtaactgccgcgatcgccgttccttaaaccccctcatagatgccctcaaaaccgacatttccgccgtccgtctctggtctgccagcgcccttgcccaaatggcaactctgggttatgaagtagttattggtgcaatacctcccttaattgaagcccttgttcaagaccccatacccgccatccgtagtaactgcgcttgggcaatcggtcaactgtgtaaagaattaccttctaatgtagtctatgctacagctatagacgcattaattcaagcctttgctgaagataaagatttgggtgtcagagaagatgccaaagcttcactgctgggagttggtgatccccgtggtttgcaattaatcgaaaccctagaacaagaaggatggttttaggtaattgataattgacaattgataattgacaattactagccaatcaccaatcacccaattcccaatcaatctcaggtttaccccaaccacttaaagctgaattaatagctgaaaaaggtttactaccaaaaaaaccattacgtgcagaaaggggtgaaggatgagcagatttaattactaaatgtcggctagtatcaattaatttcagcttcttttgtgcataaccaccccacaacacaaacaccaccggatcggatttttcattaaccttttgaatcactgcatcagtgaaaatttcccacccttgatttttatgggaatttggtgtgtgcgccctcacagttaacaccgcatttaacatcaatataccctgtttagcccaattcaccaaataaccatgattgggaatatcacaccccacatccgctttcaattctttataaatattcatcagtgatggtggtggtttaatccccggtttcacagaaaaacataaaccatgagcttggttttcatcatggtaaggatcttgtcccaataacaaaatatttacctcttcataagaagttaattcaaaagctgaaaaaacatcttcttctggtggataaatattataagattgtctttcctcacttaaaaactcttgcagtttattaaaataaggtttctctaattcctctgctaaaattgattgccaagaattaggcaatttaacatttttctctatcaattatcctcacctcataattcatacataatgataaaaactctttccagtcaacaatcaccaatcatttattcttcaggacgttctatatcatcttcccctaaatattcaccattttgaatttctagaattactaaaggaatagaaccaggattttctaccttatgcaaagttgcagcaggtacataagttgactggttactatttaacaatatttcctcaacaccacaagttactttggccacaccagaaactacaacccaatgttcatgacgatgataatggatttgtggtttaataccgtgtctaggtttaatttccacccgactaattcgataattttccccctcttctatgacttctacatgaccccagtaacgttcccctgaatgggaaaaacattttttaatattggacttcatctcattctcatgctgactcataactgatttactacctggtttaattgttatacctatacaatttagctgtgtaacagcttatgagaatgtagttcatttacctaaaaatcaccattaaatttatattaaatatcgatattttctagatagataaagttttattatagaacacaaattgtgcaaattatagtgctgacaagtaatggatttataatggcgatcgcacaatttacattttgcataatcatactttcagtaacttcaatctctagacaaactggctctaaattattaatttatatcaagttaataattgtagagcttaaatctgattgattaaattcaattactgataatatccgcaggattaacataaataacctaacgaactgttaaccctgagttggcattgattactttcctctcaccgtaccgcaataacctttctatagttaacaactgattttcccatactttaactcgatagggattttcctttgctgttgcacccatccaaattttaaattgagtttgaaaacgaacgagttctcctctagcactgattaaattactagcagaaggaaaagctgccagttgattgagagcattttgtaaacttttggaatgttgctgaaaattagccattgtcgtcactgaattagacaatttttcatctttttctcctacaaactgccattcttgttgtaaagcagcaaagcgaaaagccgcagtccgaaatggttgacgctgaggaataggttcagtatatgaaagtttcatcttaccttgagtattactaaataattcatctaactcattgttaaaattctccgctgcaaacaaagcataaccactaacaggtaaatccctcaagagttggatttgatcaaacgctcccaccgttggcaaagaaagcaaacgaatacctggaactaataaagtagaacctaatttctgagaactaatccaaggttgggctagtcgttgaaaacgaggagtatctaaagcataagtcatcggtacaattaaatctatatcgcctcttctcgcccaaacttcccaatgttgttgaattttttgaactcgttcatattctgccaaaggaaacacagcgactgacaaaattaaactagagcgtttttgtcgcaacatctgagaaacttcagccacaaaactattaacttgttcagtacggaatgctgtccatttttgccacagatcccgctgtcgaggactaatatttacaggatctacaccagtttgttgtttaaatttctccctggcggctttaccataaccataagttctcccagaaaaaggatcttgaaatggatagcgaatataatctaattgtatgccatctacttgatatttagtaacaatttctgcgtacaactttaataaatattctctcacttcaggattagctggatctaaaaaaggctttgtttgtccaacaggaatcatccgcccacgttgatcataatttgcccaatcaggattagttgctaaaacaggacctggataatcagaactaacaccaataatttgattatgacgactatttccagcggcaaaagtccacacccaagcgtgtaattccattcctctggcatgggctaattttacggctgatgccagggggtcccaatctttaattagcggattttgttgtggtgcaacttcactcggataaatagtataactagcgttgacggtttcaaaaaatacggtgttaattcctgcttttgccaagcgatcaaaaatcttttttagtccttcttcattccctgcattaacaatagttcctctatctaaccaaactgcgcgaacttctggttgagctaaatattgattaatcggaaactgctgccataaatttctcttagcatttaaccactgttgacgtgctaaggcatagtttttttgggaaattaacacgggaatatttttggcaacttcccttgcttgggctaaggtttcttctaaattagagtttgttgtttctctcgatgcttttgtattttctctcttcaaagctggggaattttttgtattaccactgcgagctaaaacagataaatgggcgctttctacacgaccaattaaattttctaactcttttcggagagcgatcgcatctttactaccaattggctgattagaattaggtattatatccaagcgcaccgcttcttgcagttgatcaatctcttcttgaaaattttggggtgtaactctgagaataggtttgctttggggtttattctgctgtactgttactgttcttggttgctttgtcggtttacttacattgggtttttgagtaggttttttcttagcatttaccgttcttggttgcttggttggtttcttttgagtaggtttttgagtaggtttttgaataggtcttttcttagcatttaccgttcttggttgcttggttggtttcttttgagtaggtttttgattgggtttttgattgggttttatgctaactctgctaacatttatctgtgttggtttattttcagtttggctgatatttgtgctactaatgtccggtttctttatggttgttgtattgactgaagattgcggacaatttgcagcatgatttaccccttgttgagtagataattttaaataactattgactaaagtttttaaccaagcagtatctaactgtgcgttagaatcttgatcttttccccatcgccaacctaaaaaagtcgaattttcagttgttaatactgctgctggctgattttgataattccaaaccgcagcaatttgagtttgcgaattttcaggaatcatcaccgcaccccatacttgactaaagagttctttttggtttttccattcctgaatattgtcttttgctggtcgcaattcttgagcatcattgaggttaaatccccaataaccacctagcatatttcttaatgcttggcgcactcctggagttgataaattacccacaggaccactagcaattaaacgccctccttggttcatccatttcttgaaaaccattgcttgtactggcgttaatttctctacatttggcaaaaacaaaacctgttgtttacctacatcttctagattgttaatattagctagaggaattacacaatattttacacctacagcctgtaagcgtttattaatccctgtccattcttcgctattttcctcgctttgaattatgttgaatacccctgtttgtgtagaagcatttacaggtagaatacctccaatgctaaacattaaaaaattcaactttaaacaaaataatcccatgatgggaaatgggaatttaagatttttgtggctcttattcattgctaataattggtgatgtactactgacaactgataactgataactgtctactgacaacaagtattgattaattcctcaactcccgcaactgggaatatgctgatattcaactgacgcgatacttcttctactgtcatatcatctaaaaatattaactcaccatgtttgagcatgacactaggtaataaaataccatctcctaaatcttgcccttttaaatgatacagtaaatcatgtccggttaataatccggtaacactgatattttgcccccaataatcactatataaagcacgcatttttacatccaaaccttctacattatttaactgtttaaccagtggtttaaatgccgtttctactgcattacctaccacccaagttaatttttttgcaggaaagatttttgctggtaataattcgttagctgcatgggcaaattgtttaataaataagcgaatagaacccacaccattatctagttgtggatattcttcatattccgcttcacttggtaattctgcaccagcaattaaaaaccattcatccgctaaccaagctacattagaaccatatttttgtttaaattcttggcacagtaatttcacttgagaaattacttctttggctttttctcttgttacaggtacgagttcatcttcttgaggacgaaatcgcgttaaaccaacaggaacaactgctactgatgctactgctggtatttctcctgtatgaaatgatgtcaaatctcttaatgttttttctagatgttcaccatcatttattcctggacaaactactacttgagcatgaatttgtaaccgtctttcttgaaaccatttgagttgttgtaaaatttgtcctgcacggggattttttaatagtctagttctcacttctggttctgtcgcatgaacagaaacatataagggagataatcgcatttgttcaattcgttgccattctttttctggtaaattcgttaaggttaaataagaaccatataaaaaactcaaccgataatcgtcatcttttaaatataagctggaacgtttaccaggtggttgttgatcaataaagcaaaatggacaacggttattacattgaattaaattatcaaataaagccgttgcaaattctaaacctaagtcttcatcataatctttttcaatttcaatttgatgagttttaccgtgagcatctaatacttcaagttctaaaaattcatctgcacacaaaaactgataatcaattaaatcacgtggttttgtaccattaatggcaactatcgcatcaccaacttcaaaaccaatttcagcggcgattgattcaggtagcaccttggtaatttttgcaggttgaatggtagacatatattaggtaattggtaattggtaattggtaattggtaattggtaattggtgattggtgattggtaattggtgattggtgattgggaaaatacaaataatttccccctgcttattttatccttgccaaccgttggcgatcgctaataaaatagcacaaccaaaagctaatctataccaaacaaacacaaatgtattttttgtttgtaagtacctaatcaaaaatgcaattgataaataagaaaaaataaaggtggaaacaatccctataactaataataaaactatattatctggtaattgcccttcctgaaacaactgaaaaattttcaaacttttatataaggtagctatcgtcaaagtaggaaaccctaataaaaatgaaaactttgctgctgtatcacgttctaatcctaaaaataaggctgtagttaaggttgcaccagaacgggaaaccccaggaattaaagctagagtttgtcctaatcctaccaaaataccatcccgaatttgtaaggaatcaaaaccacgcttgcgagttccaaccttttctgccaaacccaataaaatcgccatgatcactgacattatagcaatgactaatgcactttcaggtaaaacatcttttaacagaaaaccaaaaattaatgccggcattgttcctacagcaatacccaccaatattttccattcttctcgttgccaatcttgatcttgaaatgcgacaattgcacctgtaacaatactagaaatttgtgaccaaaaatataataatatcgctatcacactaccaaattgaatcgcatctacaaaatctttagcacctagttctttccaagcaaatactttggtgactattaacaaatgtgctgtactactaatcggtaaaaattctgtaataccttgcacaatacctaaaataaaagcttgcaaccattccggggtaacctgttttgtattttctgctacggccagcaaatgggatgatagttgggatgatagtaaatatatactacttgcttctaaaattgttgtcattaaccagactcccaaaatggatgcgtaattttaacaaattatccaacctgatccgctattgtcatcagtttttccgggcaagatttttttggtgactggttactggtgactggggactggtgactgggtaaaaactaaattcttactatatattcccaattccctatttcctgaaatttcctgtataataaaaatgcccctgggggggattttagagtgtgatattgtagaaaagtaaagtttagtaacaaatattaaaaactttgattaataatacgttgtcatcttacactactgcgacttcctcgattgagactgatttgtataccgctgacactaagcccagaggtatccaagaattagagtctaccctttccttgtcgccttctctaccaacggcgatcgcaattaaccaaatttggttagtatttgcagcggcggtgtttttggtatctgtaccagtatttatagaagctccgctagtgcgatcgctacctagtctgagtttagtcatcacaggattttggatttggctgagtttaaaattaatgtcccgacagcaaacctatctgtggggcgatttactcttaggatttagcctcagttggttaacaggagcgatttactggggttggttacgttgggaacccctgtggcacttacccatagaatcaatcggcctaccctttgcgatatggtgtttgcaaaaaaactggggtaaagtcggtaactggttctatctgggttctttattcggcacagttttaacagatatatatttttacctagtagatttaatgcctttttggcggcagattatgagaacagatgccacgggagcttcacaaatcttaaaaaatgctctggcacaagtacaaacaccttggggagaaggctgggcaattatgttagccttagcattgttaacagtggggctagtatctttgggtaacaagcaacggcattggtacgcctttggtggagcagttttgagtacaattttagtagacagtctgtttttactagctgcgattctgtcctgaaattcttaaccacctgagagcaaaaattagtaacaagttggtaataagtttgtaacaaatttttacaaagtcaaatcccagaaaaaacactaatgtggtaatagcgagtaatacccaaattttcaacttcaattacagctaagttgggtagttcactaagctgtatattagtttttgatgactgctgtgtgttaattcagctattagctattaaccagagcatgaagtcagaggcaatcggtaatcaatcagcctgaacttcagtagggtgaaataattacctcataactcgcacttatgcccctagttaacagcttgtagttgaaagcttttatttctgttggatggaaagaggtagaaaaatcgtgaaaggattagtacgtttattaacagtttttagtttgttgctaggctgctggggattactgggaacaacccagatagcccaagctgcgagttttagcaacctggctttgcctcaagtccaagttttggcaattgcacgccaaaacaaggcagatcagaagctggcaacagaatttggtaaaaaaattgatttgaataataccaatattgccgcttttcaaaaatatccagggctttatcccaccttggctaaaaaaatcatcaagaatgcgccttacaagagtgtagaggatgtattgaatctggaaggattgagcgatcgccaaaaaaataccctacaagctaacttaggcaactttaccgtcacaaaatacgagcctgagtttaacgaaggtgatgatcgtattaacaacggtatctacagataaccctgattggtgattggtgattggtgattggtgattggtaaaaagttcattacccattacccattacctgttacccattacccattacctgttacccattacccaccttccctaaccttgtctcgaatagatatacctaaccaatttgatgtattagtagtcggcgctggtgctgctggactatatacagcactgtgtctaccaaaatccttaaaagttggcttaattactaaagaaactgttaccttatccgccagtgattgggcgcaaggtggtattgctgctgccgtatccccagaagattcaccacaattgcatattgaagacaccttaaaagccggtgctggtttgtgtgatatcaaagcagtagaatttttagccgaaaaagctcctagttgtattcaatccttagttaacttgggtgtagcttttgaccgtcatggaaacaccctagctttaaccttagaagctgcccactcccgtcatcgggttctccacgccgccgacaccacaggtagggaagtaaccactaccctcacagaccaagtattgcgtcgtccaaatatccaagtgattcagcaagctttagctttatccttgtggatagaaccagaaacaggtcgctgtcagggaatcagcttattttatcaaggtcaggtgacatgggtaaaagctggtgctgtagttttagccactggtggaggcggtcaagtatttgcccaaactactaaccccgctgtgagtacaggtgatggtgtagctatagcatggcgggcgggcgctatcattcgtgatccagaatttgtccaatttcatcctacagctttaacaaaaccaggacgttttctcattagtgaagcggtacggggtgaaggagcgcacctagtggataacgaaggacgacgttttgcttgtgattatgatccagcaggtgaacttgctccgcgagatgtggtaagtagagctatttttagtcatctccaacgtaccgcagaggatcttgctactgcccatgtttggttagatatgcgccctatccctgctgagaaaattcggcaacggtttcctaatattattaaagtttgtcagcattgggggattgatgtttttcatcaaccgattcctgtagctcctgctgctcattactggatgggtggtattgtcgcagatttacaaaatcgcactaatattcctggtttatatgctgtgggagaaactgctagtacgggagttcatggtgctaatcgtttagctagtaattctctgttggaatgtattgtatttggagcgcagatggctgatttacagatggaagtaccgccagcagaggttaaagccaaggttaaagatttgcaccctagtcctttgttttgtaatttatctgtcagtgagtgggaaaatcaacaggcacagttagaaaatatcaggaagaaattaccgcgtttagtctggcaaagtgctggtatttgtcgagaacaatcaagtttagaaaatgcgatcactaccattgaatcttggcagcaggattttacgagtttgcctttaagtcaattcttgcaaagtttacagcctacagcaacagccagttttaacctagcaaatattgaccaacaattgcgactttgggcagaaactcgtaatttattagatgtagcttatttaattcttaaaagtgctgcttttagaactgaaagccggggcggacactaccgcttagattatccccaaccaaaccctgattggcaagtacacacgatgatccaaaatcatcactggtggaaatctcaatccatatcagcagcttatccacagtccaaaatctaaaatctaattaggggttgctgagaaagtctttccgtgagggcataggagtcaggagtcgtaggggcgaagcattcggaaaataacctgtgatcaaaattgataatttattgcccgaatgctaaggaaaaatcgctttcatcgaactcttgaaactgttccctgtctccacgacaagactttttcagcaaaccctaactaagcttaacgctagagttagggaaaaatttcagacgaattattgcgctagtttaccgaaaatacttaaagttttgcggtcctgtataaccagtaattttggcaagttcgtttaaattttgtacaccactatagatttgaccattaatcacccaagaagggaaaccttgaatttttgcagcttgacacaatgctggcttacctttaggactgtctgctgcacactccacagctatattatcgtcgataatcttataagcttctttaccaaagagcagcttttgttcgtggcaatgaggacaccaataagctacatattccttagcgcctactttgactaaatgttctgctaaagcaatttctgactctcccgaagttgtagtaatttcccaaccaaatgcagggttaggattttccttgggagcaaaggacgaaattcgctgaggaccatccgcatctcctacagtgccatcggcattaataccagaataaacacccaaggtggcaattagcgtcaccatcccgacaataatagcggtaaagaagatttgtccgatatcttcccaatcacgtcctaaaatcgtgagggtaagcatactcaaagcaaacaaagccgaagcgatgcagtaccaacataaagctttgagttcaaatgccaggacatacattaaatatgcactaaatacagtcatggcgatcgctcccaccaacagcaaccaccaagtcagcaattctatttgtttagcgtttttgatcttgtctttttcccctgattttaatgctaagggagctaaagccaatacgaacatacccacgtatgccagcaagccaaacaaagctaaaggttgaccaaaaacagtcccccaagggctagaaagtacatcagcacaaccttttacagcttcaggagtattacaaagaggactacctccggtgagcttttcaaaggtgagataacctgtattcagaataccaaatccggcgatcgccccaattaacggacgcgaccatttatgaatccaaggagtagaacgacgacgaatcataattggtgattggtaattggtaattggtaattggtgattggtgattggtgattggtgattgggaaaatacaaataatttccccctgctccatgctccctgctcacctgcttcttcccggtccccagtccccagtccccagtccccagtctctaagaatgtaacttgactgaggaacttgatttagtttcacctttagaattccaagtgcgatgagcagcttccacaaattgactgacgcgaattggatcaatgggttgggaaatttgcccgtgacgttttaaagaactggaaacaatcacaccatcagcagcttgcattagcgtacccacattttcccaatcagcaccgctaccgataaaaactggtgtaccagcagccgcaccactagctaattctagatcctctaaattgggagggctaccagttgcccaacctgataaaattaccccatctgctaaacctctttctattgtgtctttcacagccacagtcaggttaggagaacttaaaggacgggcgtgtttaaccagcacatcagccaaaattttgacatcagaacctaattctctacgatagcgtagtaattcatgtgcctccccttcaattaatccttggtcagtagccattacccctgtgaggacattaacccggataaattgggcttttacacaactggcgatcgccattgcacttttgccatcatttcttaaaacatttaaacccacaggtaaagttactaaattctgtatccgctgtactaccaccgtcatagcactgacaacagcgggatcaacttgatttttagtaaaaggagcatcaaaaaaattttctacaattaagccgtctacccctccactggcaagggctgtagcttcttgttcagcacggtcaattaccgctttcaggctacctccccaacgggctgaggtaggtaagggtagcagatgaactacgccaataatcggtttgcaagttttgaatagttgatataagtccacgtctttaatttgaagatggcattgttcagagttgaaaaattagtatttagctatcagtaatcagtaatcagctaaatgataccaataacaaagattcaaaattttgaattggctacaaattacgccaatacaaaaaagccaactattgctcaagtcctgtcattctctgtatttcatctccagactgaaagctaaaagctgatagctgaaggctgatagctgattgctatactgatatgctttggcgtgttattcaggatttaataaatctcctcatgctgaagatgtaaattgtcgttaaacctttcataagatatgttaagataaaatatggctacaagaggagtttgccactcacaagacgcaaggccgcttcccgttgtttaggttgatagctgtcagcacattacagcactagcctgaaggtagggcagcaatactgctttatgggcttagtcgcgttagcgatttcccggagggtagcgacttctcaccaacagccctttgggcggcttcccgatgggtaaattaacaacgcacacgctggggtaatgtcaaataccattaagcgaatcgttaaaaaatattaacagtgtctaaactacccaaagacacctaaatttaccctgggaaacaaaataacaaagacatcatagcataaccactatcatgaaccatgaatagggttatatttcaatgggcatttgctgacagtggcgaatagtcactgtaaaatcctagttatggtgcgggaaaaagcacctagtttaatgtttgtaatgtttgaagaaaagagaaaaaaattgaagattttttcaaaatatgggtgacaagccaacgattgcgatttcacacctgggctgcgagaaaaaccgaatagatacagaacatatgttagggctgttggtagaagcaggttatggtgtagattcaaatgaagagttagcagattatgtaatagtaaatacctgtagttttatcgaagctgccagggaagaatcggtaagaaccttagtagaactggcagaagccaataaaaaagtagtaattactggttgcatggcgcaacactttcaagaacaattattggaagagttgccagaagcagtagcggtagttggcacaggagattatcacaaaatagtcaatgtgattgagcgagtagaacagggagagcgagttaaacaaattagctccgaacccacctacatagctgatgaaaccacaccacgctacaggacaacaaccgaaggagtagcatacctgagagttgccgaaggatgtgattatcgttgtgcattttgtataattcctcatttgagaggaaaccagcgatcgcgtacaattgaatcaatagtagccgaagcagagcagctggcagcgcaaggggtacaagagataattctcatttcccaaatcaccactaactatggattagatatttacggtaaaccaaagttagcggaactcattcgtgccttggggaaagtagatataccctgggtgaggatgcactatgcttatcctacgggactaagcccagatgtaattgcggcaattcaagaaacatctaatttcctaccttatctagatttgccgttacagcattctcatccagagatacttcgcgccatgaatcgtccttggcagggtagagtcaatgacggaattattgagcgcatcaaaaccgccttaccatcagcagtgctgcgaacgacattgatagttggttttcctggagagacagaggaacattttcagcatttactagagtttacagaacgacatgaatttgatcatgttggtgtgttcaccttttctccagaagaaggaacaccagcttataacctacccaatcaattaccacaagaattgatggtagaacgacgcgatcaaatcatggcattacaacaacctatttctctccgtaaaaatcaggaggaagtcgggaaaatagttgatgtcctgattgagcaagaaaaccccggaagtggagagttaattggccgttccgccagattttccccagaagttgatggtcaagtctatgttacaggcgaagccagactaggaacaatcgtaccagtcaaaatcaccagtgctgatgcctacgacctctatggtgaggtggtgaatggtgatcggtgactaggaactggggactgggtaagaagcagaggaaaattatttgtatttttcccaatcaccaatcaccaatcaccaattacccattacccattacctaacttacaaaatataccaattctctaaaattcggcgactgattaaagtcctcaaacccagattcggtcggactgccataattataaattatgaattacgtatccctaaccggaccgaaggaaatattacgaattggtattaagtattcggcttacaagtccaaaattcacaataaagaaaatctaggagaattaatgaatcttacctttcaagaactaggcatttcccaagagcgtgttgaacaattagaaaaaatcggcttcaccgcacctaccaacattcaaatgcaagcgattccccaacttttggcgggtcgtgatgtagtgggtcaatcccaaacaggtacagggaaaacggctgctttttctttgcccatgttggaaaaattggatgtaagtaaaagagcagtacaagcgttagttttaacaccgactcgtgaattggcgatgcaggttcatgatgccatttcccagtttatgggtgatgatggtttgcgtgttttggctatctatggtggtcagtctattgaccgacaaatgatgcagctaaaacgtggtgttcatgtagttgtcggtacaccaggacgggtaatagacttgttggaacgtggtagtttaaagctcgaccaagtgaaatggtttgttttagatgaagccgatgaaatgttgagcatgggttttattgatgatgtgatcaaaattttgtcccaagctcccgaagatcggcaaacggctttattctcggcaactatgcccccatctattcgccagttggtgaataagtttttaaactctccggtgactgttacagttgagcaaccaaaagctgcacccaataaaatcaaccaagtagcttatctaattcctcgacactggacaaaggctaaagctttgcaacctattttggaaatggaagatccagacacagctttaatctttgtccgcaccagacgcacagccgcagaattgaccaatcaattgcaagctgctggtcacagtgtagatgaatatcatggtgatttatcccaacaagcacgggaaagattattaactcgtttccgtaatgcccaagtacgctgggtggtagctactgatattgcggcacggggtttagatgtggatctgctttcccacgtgattaactttgacttgcctgatagtgtagaaacctacctgcaccggatcggacgaactggtcgcgctggtaaagaaggtactgcgatttctttggtacaaccatttgaacgtcgtaagcaacaggcatttgaacgccataaccgtcaaagctggcaggtgttaacaattcctaccagagcgcaaattgaagctcgacacattcagaaattgaaagatcaggtttctgaagctttagcaggtgaacggttggcttcattcttgcccattattagcgaattgactgaaaaatatgatgctcaggcgatcgcagcagcagctttacaactggcttacgatcaaacccgtcccgcttggttgcaaaatggtgtagatgttcctgatgaagaacctactcccaaacccaaactcaacaaacgtcgtgatggcgatcgctcagaacgcaattttggcggtgactacaacgagcgttctggaggtaatcgtggacgttcctggtctaagtctgacagaaatggcgatgaaggaaggcctacacccaaacccaaactacggaaggaacgccaagaacgctatgaccgtcatgagtctcctgttttaccaggtaatcaaaaacagatatagggaatagggaatagggaatagagaatagggaatagggaatagggaatagggaatagaaggcaaaaggcaagaggcaagaggcaaaagataaatattcttcccctgcttcccctgcttcccctcccctgcctccctcacaagggtaggtttttaatattaactgtgaaggcaggactaggaagacaagggtggaaagtagacaaggaagattttctcagcacaatggtctttttgttaccaagagaagatgattttgtactgttttcctcccttgtccactgtccttccttgtcccccaagtcttgccctcacgacaatgtaaaaaacctacccttgtaagctcccctgcctcccaacttccgacttctcgtcaatttttccaaggttgggtaatttgatctatctcttgtaactcatccttggtcatgttccaacctaaagcgccaacattctgatttacctgttcggcgtttttgactccggcaatgggaattacgttcccctgggcaattaaccagttaagggctacttgggcaggggtacgatcatatttttcaccaattttccgcaataaagataagactgggacaattttatttaaaccatcttgactaaatcgcgggtctatggttctcgctcctgtgggtttataagcaggtgtatatttacctgttaataatccctgagctaaggggctataagctaatattgttacatctaaatcacgggctgtttgtaaaataccattggtttcaattttccgtgttagcagagaataacgagtttggtttactgctaaaggtattcctcttgcggctaatattttgtgcgcctttcgcatttgtgatgcagaataattactaacacctattgcaccaattctacccttatgcacttcgttggctaaggtattcaacaaagttttttgactgagaaaaaatgtaaacggccaatgaacttggtataattctattctttcaagttgcagacggttaagactgtttgttaaagcttccaatacggatttactattccaacgccagggagatggtccaaatttagtcgcaatttgtacgtgttgcgatgtttgcttcatgaactttcctaacaactcttcagaaagtccgaacccgtacacttccgcagtgtcgaaaaaagtgacaccagcgtttacagcggcgctaaaagctgcttctaactgttcttcaccgtaactatcgccataattccaaaagattttatcgccccaagcccatgttcccaaaaacatagggggaacggttacgccactttgacctaatgtgatggttttcattttgctaaaatggattttatttacatttctttaaatatttagtttatcgtcttttatcatcttgttcaggttagtcgaaagtggttgaacatttcggtttatcttggttaatggaagatgaaattctgtaaacaatacaaaacagtagttatggcaggtgatattttcgataccccaaaagactccctaaccgtacccaaggtcaacataccgactatgtttaggttaggattttttcagatggggttgagtatgatgtctattttgactctgggggtactcaaccgagtcatgattcaagaaatcgccattccggcgacaatagtagctatagtgttagctatacctgcttttgtctctccgacgcgaattttatttggacagatatctgatgctaaaccgttgttgggttatcatcgtacagcttatgtgtggatcggggcggcaatatttgcgatcgctgcttttttagcagtacaagtaatttggcagttaaacgctatcagtggtgatagttgggtatggacaactcaagcgatcgcttggacaggagttttaggtttagtttttgctatttatggtttagcaatttgtgttagtggtactgcatttgccgcattattagtagatatttccgaagaagataaccgttcccaagtcgttggtattgtctggtcaatgctaatggttggtattattgtaggagcaattgttagttctagtttattaaaacaattggatggaaatgcacctttagagactttacaatctgccattaatagattatttctaattgttcctagtgtagtatttcttttctctattatttctactgtaggtgtagaaaaaaaatattctcgcttttatcaacgttccacaccaggaaaccgagaagatagcattagtttaggtgcagcttggtcaatattaacagctagtccgcaaacaggtttgttttttacctttttattggtaatgacaattagtttattcatgcaagatccaattttagaaccttatgcgggtgaagtgtttaaaatgcctttggctgaaagtaccaaacttaatgttttttatggtacgggaattttaatagcttatggtgtaactggctttttcattgtgccacgtataggtaaacgcaaaacaattaaactaggctgtattttagtagctttttccgccttattattaggattttccggtttttctggtaatgccaactttttaaaatttggtttagtaatatttggtttatctaccggttttgtcaccactggcgcagtcagtttaatgttagatttaacagtagcagaagccgcaggtacttttatcggtgcatggggattagcacaatctatatctagaggaatagctgtagtcattggtggtactgttttagatattggtcgcaatttgtttaccaataatttagtattagcttatggtatggtttttgttttagaagctttgggaatgatcatttctctgtggtttttaaacagggtaaatgtgacagaatttcaaaccaatactaagcaagctttagcttcggttttagaaagtgatttagattaggtgactggtgactggggagcatcccaaatgtgtaaatttatttttatctagggaaataaaatgctccaagacttgatatgattgaaccgcaaaggacgcaaaggacacaaaggtaagagattgtgagagattttttagtgttgctgcgtttattttgtcaaaattgggatgctcccggtgactggtgactagtgactggtgatgaggtataattagccaatgactaatgaccaataaataattacgaattacgaattacgaattaaacatgaatgatttttggaatacgattttagatttttcccaaactattacaagcagagtgggaaaacaattaatgcaggattttggtaaagttcaagcatctcaaaaagctgatggaactttagttactcaagctgataaatgggcggatcaagaaattagagatgctatagcttctactttttcaggttatggaattttaagtgaagaaagtgataaaacttttcctgatacagaatggtgttgggtaattgatcctttggatgggacaacaaattttaccaggggtattcctatctgggcaatttctttaggtttactttatcaaggtacgcccattttcggttatgttcatgtaccaccattaaatcaaacctttcatggtttttgggctggttcatcaggcttgcaaacgccaacaggagcatttttaaataaccatcctatccacaccagtaaggatgatccgagtggaaatcatttttttaatctttgttctcgcagtacgggaattattcaaccgggttttccttgtaagttgcggatgttaggagttgcaagttataactttttaactgttgcgactggtgcggttttgggaggtgtggaagcgactccaaaagtttgggatattgcaggtgcttgggtaattttacaagctgctggtggttgttggatatctttaaaagatcaaccttttccattaatagcaggtgttgattatagtaatatttcttttccgacaatggttgtcagtgatccaagggtggaatctgtgtttacaccatttcttaaaggtgttaaattgtagtattagcaggacttacgcaacacaaaacgaaagtaggggtaattcatgaattacccctacataagaatcagatttttagttaaattttacctaagttctaatcagaaataacgaaccacagagacacagacaacacagagaaatgaagatttgaaataataaaataaaaaaggtaggtgctatggctaaaatgaaaattctgcaagaagatcaatcttatacttttcggtcttattttgagttaccttatgaagcagatgatattttagctgaatttaattactctctaattaaaacgcacctatctttaccacaaaccaagcaggaatttcaagaattaccagcactcaaacaaagaatagaggatattttaccttttgttagtttgagtaatgaaactgcaagaagggaaactttagtatctccaattttgttggaggtaattcgttattgtcattgtcaaatgcgaattgaataccctcttgctattaataatcaactcaagggtaatcttgattatcttttacggttaaataataatttcttggttatcgaagctaaaaatgatgatttgactagaggttttacacaattagctgtagaattaattgcattatctcaaattcaggaaaagagtattttgtatggtgctgttactattggtaatgtttggcaatttggtaagattgatagtagtcaacaacaaataacccaagatattaatttgtttaaagttcctggagatgtagatattttggttagttcaattatcggtattttacaagaaataaataactaatcaccatttaccaatcacccattaccaattacctattaccaaattatgaaagcactttggttagaaaataaagaattacaattaaaaacggatattcccattccccaacccccaaagggagaagctgtagtaaaggttttacgtgcaggtatttgtaatactgatttagaattactcaaaggttattatccctatacaggtattttaggtcatgaatttgtaggaattgtagaaaaaggttcagaacatttaataaataaaagagttgttggtgaaataaacgctgcttgtggttattgtcggttttgtctgcggggagaacctacccactgtgaaaatcgcacggttttaggtattgttaatcgtaatggtgcttttgctgaatatctgtgtttacctgaaaaaaacctgcatcttgtcccagaaaatgtttctacagatgcagcaacttttactgaacctattgcagcagctttagaaattcaagaacaggtaaaaatcattccagatgatagagttttagttgtaggagatggaaaattaggacaattaatagcgcaaactttagcgttaactggttgtgatgtattagtagtaggaagacacaaagataaattagcaaacttggaaaatagaggaataaaaacaggtttagttgatgatataaaagatagaagttttgatatttctgtagattgtacaggaaatcctgaaggttttgctactgcacgtcgcgctttacgtcctagaggtacgctagttttaaaaagtacctacgctggtgatttaagtgtggatatgtcttcattagtggtagatgaaatcaccctgatcggttctcgttgtggtcccttttctccagcattggaattattagcaaaaaatcagatagatgttacatatttgattcaagcaaattatccattgagtgaaggtttagctgcttttgcaaaagcacaaactaagggagttttaaaggtgttgttagagatgaattagttgataattgacaattgataattgataattgacaattgataattattttattctagttttaaatcgtcaattatccaatgttaattttcaattgttgaaggaaaatctcacattgattctgcacctttggtaactaaacgtttaaataaagctgctgaccaaccagtttctcttaatacagcagttgttgcaacatctatatatgattgttcaataaatgctaggtcaatcatgcaaattttacctaaagcatcttttaattcctcggatttttcttgtgctttgagtttttttcctacttcgttgactactgtggccattgcgggtactatatgttggggttgaatcccgactttgacatgaactagaccaattttccaccttctttcagcataatcatcaccccaatgatcaattcctgtgaacatttcatgaaaccatgtaacgaaggtttgttttaatctatgaactcttccttcagtttcgtttaaaactgcattcatttcttcatcacgacctaagtaagcatagaaatgatctgccatttctgcggcaatttctaatccccagtctgcgtttgcttttaaggttgattgatcattttcatggaaatcaaaccttttgactaaggttttcatgaaagcagaaggttctatactcatattcatcctttcaactttatcaagttatccaataaatacgcacaaatacgtactttacaaacagataggtttttaagtagcctttactgtctggttgtaatttatctggttgtaatttaactgacaaagttgaggaagttctgaaaatggcaaaaattgttacaaatatttgtagtgtatctggggaaaataacctgctgattgtctaatatttttcagaatcaaaattttaatgtgcttgataatccttacaatctattgcttcttctgtattcgcaatataaggatttactgtacatttaagacgataattattagtaaaaaattggcaattatgacagggaatttggtgcatttttttagcagttttcacggtgtcttttgtcgctgtccataaattgagaaacactataattatggttgtccaagcgacgacaaaacaaatgggaattaaaaatggctgtatcccatgaatgagaaaagatacaaaatttaacatggcaatagtcaatacaagtgaggagttaggaactaatataactcctaactcctcattgatcacttctttctgaagatatattaaagtgactggggactgggcataatattaactcttgcctttttttgccttctgttccctgctaaccgttaaattcccgcgtgtcctaatgctaaacctgttactagcattccgaatactaggaaaggttgggcgctggcttggtatttgacatcatttgctataggatcacgtaagaaatacatatcctggaaggtgatttggggaatgattaataataccaaaattgcggcgtacaagttctcatggatgctgacaagataacctgcaactaaaccttggaataagtcaatcatgattacacaaattaacgcggcagtttgtacaccaaacatgactggtaatgattttaaaccaagttggcgatcgccttctacactcttgaaatcattaacaacagcaattcccaaacctgccaaactataaaataaggtgagaactacaattttccaatttaactcaccaaataaagcatgacccgcccaccaaggtaatgcaatataacttgcacctaaagcataatttcctaaccaaccattttgttttaattttaatggtggtgctgaataaatgtaggcaataaaagaaccaaaaacagacagtcctaaaatattaggaaatgaatgaccagcccataaatctaaagtataggctacaccatatcctaataatagtaaaagcacaaattgggtaactacttgtttttcggaaattgcccccgatggaatagggcggtaaggttcattaatagcgtctatttcccgatcataataatcattaatggtttgggtataaccagttaataatggaccagaaagcaacatacaaagggctgcttttaagacattttccaaagtccaagtatagttaccggaagacgctgcaccacaaacaacaccccaaattaagggaatccaggtaataggtttcatcaactgtaaacgaattttccaaattgatgtttcacctggtgctgcacctttcattcccagaagttggcgagttttcgcactgcgatcttctgagtttgttacttcctgaatttttgtttctacaatctcagttggttgaggattttgatttatgggagttgattcagacataatatttatttcatctctctatgggaaactgggcattggtgattggtaattggtaattggtaattggtaattggaaaaacttttacccattacccattacccattacccattacccattacctaaaaagaaattatcaaataactattttgaaactttgccccggtaacaggtttaccactgagggcagggggtaagaagatattacggcgatgatctccggcttctattgtgacttctggacccgattgagtgagtttgacttgttttttgtcaaaacctggtaaaaatagccgtacttggcgattatgtacgtctatttcaattggtttgggtgcttttaatgcttgctcgacaaagttaggtaaagcatctatcaaaggttgccattcactgttggatacatcaggaactatgctgataggtaggggtgaaaattctgctgatagattggtgctttgatcagcagatactaaaattgcgccaccaatagttaaaccaacttgttgggcagtaccccaaagataacgggaaatgaccacatctatgggatctggggttgtgactaaaaatgctgcgacacgattaggatcagctaaagctgctttaccttgatcaagaaaattattaacttggttagtgggtagggagaagttatcagccgtccagttaacattaaataaactggtaatcaggggttgaatgaggggtgattcagaaattgctttatctagatcggagttggcaaacaattgtctaaatcttcgcacgtaccagctaagagattcgggcattcccaacatccgcaaggtggcagcgtctccagcaccatcatagataatcgcgtcatatttgccactggcatcatattcacgaatcgcattgagagcaagggcgttatccatgcctggtaacactaccagttcttgtccatagacctcttttaaaatcggtgtacggagatattgtgctcctaatttttttacttcttcccagttgcgttctagcagtacagtttcaagcatctgtactgcttgcaagttgggagcgatttcttgggggtcaggagagagagtagtttccagtaaaattggcaacgttggttctgctaatcctgctaaaagtacccgtttgccttggcttgccaatagcttggctgcggcgatcgcaattttactgcgagcgatgccgtttttgcctaaaaatgtcagtatcaaggccattacgtgatttccaattaccgcctatttgttcaactccaacttagcacttaaataaaacagctaatctacctatatggctttaatttcatcctcaaagaaccaagtggaggtattgtcatcaaatttgactacaacaccaataccagcaccatctgtaactttgtaaccttctatcacacctactttacctagtttttgagcgataggagcagatacgcgatcgcgcaaacgaactactttaaccttttgtccgatttccatgtctagttagaatccaataatccaaatctcagtgtaccggaatctgcgacttagttggcagttaagctttcagaaatgttactttgatagttatctgatttaacatttgtgtatgtttaaatatatttatttattttatacttcaaccatatatatataatcatgttataaattctagataaatcctaaaatgagtgacaataaaattacccaattaccgtgaaaacagataccattttctatagcttatttcaagaatttccgagcattttctttgaattaattaacaaatctcccacagaagcagttgcttatgaatttacatcccgtgaagtcaaacaactagcttttcgcttggatggattatttttaccaactaccaaagatgccaaaaaaccattttatgtagtggaagtacaatttcaaccagacgatgatttatattatcggctatttgcagaactttgcctctacttaaaacaatacaaaccgccccatccttggcaggttgtcattatctatcctagtcgtaccatagaaagagaacagcctgtacaatttggtgaaatcttgctattggagcgagtcaaacgcatttacttagatgagttaggagaaacttctttaggggtaggagttgttaaactagtaatagaaacagaacagacagcaccagaattagcaaaacagttaattgcccaagccaaccaacaaattaatgataccaccagtaaacgggatctgatcaaactaattgagacaattatcgtctataaattaccccaaaaaagccgcgaggagatagaagccatgttagggttaagtgatttaaaacaaaccagagtttatcaagaagcattagcagagggaagacaggaaggtaaacaagaagggataacggaagcaaccaaaaaattagctttaaagttattaagaattggtatgagtttagagcaaattgctgaagttacagaattatctttggcacaagttcaagatttacaacgagaactttaagagttttactgcttactaaataattaattttctgagggtgtattcaatgaatacgccctgatgaggtaataaaaaatgtatcaaaatcatccaccttcacccaaagaaaccatgcccacaatgtatgatttacctggtgaattaataggagaatcagggttgccggacgaatttcattgtatacaagcggatttactgacagaaacttgtcaaccgaccaattatcaaacctcagaaattttactagctagtgacttaaatctatattatgatccacgtcatcctagttggtataaacgccctgattggtatatggtactgggagttaccaatactaaccaacaggaagatttacgtttaagttatgtagtttggcaagaaggaattgatccgtttttggtagtagaattactctcaccaggaacagaacaagaagacttaggacaaactctcagagaagtgaataaaccgcccacaaaatgggaagtatatcagcaaattttgcgtatcccttactatgtgatttatgacaggtatgaaaataatttccgtagttttaaactcaatggtactcgatatgaacctgtcgatttatcagataaccgtttttggttagaagaaataaaaatgggtttaggtttatggcgaggaaattatcaaaacacagagggtttatggttacgttggtataacaataatggttggttgccaacattagcagaaaaagcagaaaacgaacgtcaacgggcagaaagtgaacgtttaagggcagataaactagcagcaaaattgcgtgatttaggaatagatcctgatagtttagtaaattaggaaaaaactatgactacaactgtaaaattaactgatttcaagattgaatatcctagtagtgatggtgaaccagtggcagaaacttatatacatctctatgcaattttaacaaccttagaagttctcaaacaataccttacaggtagacaagcaacggtactggcaaatcaatttttatattatgcccaaggttttcccaaattaagaatagcaccagatgtcatggttatttttgatgtgccttctggtggtagagataactataaaatttgggaagaaggacaagttcctcaagtagtttttgaaatgacaagtgcaggaactcaaaaacaagatcaagaatacaagaaattattgtatgaacaattaggaattttagaatattggttatttgatcccaaaggagaatggataaatcaaaaattacaaggttatcgtttacaggatgagatttatcaacccattacagataatttatgtcaacctttgggtttgcgtttagaagtagaagggaaacttttaagattttaccgtttagatacaggggataaattactgataccaacagaacttgctgaacaggcagaaaatgaacgtaaacgggcagaaagtgaacgccaacgggcagataaattagcagaaaaattgcgctctttgggaatagagcctgatacctttttcttgtaaaaaatactgaaaaacatcctcgtgcttcctgggtaatatgggaagaaaacggcaaatatcccaatttaatcattgaattactttctgaaatgggattttatggcaatatatcaaacaagcttttaaaggtgtgcgtgtggcttggagtgctggtcttgcttggcattacggaaataatgagaaaattcttaacaagaatcatattagtttatcatggatcaaagattgtaacttatccaagtaaaatctatggctttaaccgcacaagaaatagaagcattaatgccagattgcaccgaactacttagcgacgaaccagaaatggaaagctctttacattatacacaactattaatattagtaacttgtttggaatggttgtggagagatagagaagatttctttatcggcgcaaatcttagcatctactatagccggcaacagttaaaaaatcgagactttagaggacctgactttttcctagtcaaagacacagaaaaacgccctcgtgcttcttgggtagtatgggaagaagacggtagatatcccaatttaattattgaattactttccgattctactgctaaagtagatcggggattaaaaaaagagttgtaccaaaaccgatttagaactcctgaatatttttggttttcgcctaataccttagaattggtagggtggcgattaacagacagtgaatataaaagtattactccttcggaaaatggctggtattggagtcaggaattagggttgtatttaggagtgtttgaaagtagattaaggtatttcagtgttgaggggcgattaatacccacacctgaagaagcaaatttagaagaaatcagaaaagctgaaattgcttataaaaaagcagaagcagaaaagcaaagggctgaagacgcagaagctaaagcagctattttagctcagaggttaagagatttaggtattaatcttgatagtttgtaaataatttgtcattcaatagatcccgactttttcttttgagagaagttagggatctataggacttacgcaagatgtgactgaaaaccttattcttgcctaggggtaattcatgaattacccctactttcgttcccttttgcgtaagtcttgatctattttaacgttcaaaaccctatcttttatccagcagcgatcgtaccacctcaagtcaagccttttctgagtttcaatcccctatcgcctataattgagagtctgcggcagattacattatcaggttctgcaccagatttaggtttaatatgggggcgttactgagtggcataattattttgtccttaggatggacttgttttcatctgtggcgacatcagtttatggatttattgtaaatagacttgttttgttgatataactattatttgatacagcagtttccatgattatcaggcacaaatattaatgataaaacccttgtagcacaggcatacttcgacatagttcgactgcgctcactaaccgctcagtacaagtcttgcctgttcataatctacatcgtgtagatggaatatgctataattgcagaccattagatacggatagtttataattaacttaaacatagtaatttatcctaagaaaatctatggctttaaccgcacaagaaatagaagcattaatgccagattgcactcaactactaagcgacgagccagaaatggaaagctcattacattatacacaattattaatattagtaacttgtttagaatggttatggcgtgatagagaggattttttcattggtgcaaatcttagtatttactatagtcgtcaacaattaaaaaaccgagacttcagaggtccagacttttttctagtcaaagatacggaaaaacgtccgcgcctgtcttgggtaatatgggaagaggatggtaaatatcccaatgtgatcattgaattactttctgattctacagcgaaagtagataagggattgaaaaaacaattgtatcaaaatcaattccgcactcctgagtatttttggttttccccaaataccttagaattaataggatggcgactaacagacagtgaatataaagctattacaccatcagaaaaggactggtattggagtcaggagttaggtttatacttaggcgtttggaaagagaagttaagatattttacagttgaaggaaagttagtacctacaccagaagaagctattttagaagaaattagaaaagctgaaattgccctccaaagagtagaaattgaagaacgaaaagctgaagctgaacgccaaaaggctgagtctgaacggcaaaaggctgagtctgaacggcaaaaggctgaaactgaacggcaacgtgctgatgaagcagagaataaagccgctattttagctcaaaaattgcgagaattaggtattgaacctgatagtttaagttaaactaatgctaaaaatagggtataatctcggaattactcagcggattacgctttgacagtatcatgctgtgttgtcaaatcacaactaaacctgcttaaaaaagaaatcatagcaaaatgaataatgcccttgaaaacttgaataaactaaaacaaaaaacgcgttgcataaatgcgggatgaattggcgtttgaaaccgttgaaaattcgttctaaattgggcgaaatcatcccatgattcagcaacgccacaaaaaattattgaccatcaagccattgttggggtagtaggtctaggatatgtaggcttaccatttgctgtggaaaaagctaaagttggctatcaagttctgggtatagaacaaaacccagtgagggttgaacggatcaacatggcagataattacattacagatgttaaagatgaggatttaaaaaaagttgtcagtagcggtaaactactggcagtgacagattttgaaaaagttttagaaagtgatgttatcgttatctgtgttcccactcccctcactaaaaatttgactcccaatctcagttatgttgaaaatgttactcatgagatatctaaacgattgcgttctggacagttagtaacattagaatcaacaacttacccaggcacaacggatgaagtgatgcgccctgttttagaacaagttagtggtttaaagcaaggagaagatttctttttagcgcattccccagaaagagtagacccgggtaatcaacgttacactacaaaaaataccagtaaggtagtaggagcgtcagatcaaaattctctggaagtagctcaattgttttatgaacaaaccattgatcatgtagtgcctgtgagcagtgcaaaagctgcggaactggtgaaggtgtttgaaaatacttttcgagcagtaaatattgcattggtaaatgaattggctttgttgtgcgatcgccttaacctcaatgtttgggaagtgttagatgcagccaatactaaaccctttggaattatgcctttttatccgggtcctggggttggtggtcactgtattcccattgacccccattatttagaatggaaagccaaggaagttaattttaatacccattttatagctttggctggggaaattaaccgttctatgcccctatttgtcagagaaaaagcccggagggtgttaaatgatttaggcattgccccagctaaatcaaaagtgctaattattggtgtagcctataaaaaagatttaggtgactggcgggaatctccggctttgatggttattgattaccttttacaagataaaattacaatcagctaccatgatccttatgtatcacagattgaggtgcaagatagaatatactctcatgtagagttaacagaagaaacaattagtggggctgatttagtgattatcacaacggatcacagtcacatagattacaggaatttagtagccaaatccaaagcagtattagatacacggggtataactcgtcatcttgattgtctccatgataaagtaactctgttgtgaggatcgactaaagatgacaggtgtgaaggaaaaatcagtaattgtagttggtgctggaaactggggtaaaaacctaatacgtaattttcactgtttgggagctttgtatggtgtagcggaaactgaccctcaactgagagaagcagtggctaaaaattaccatgatattcaaatatatactgatttttcagatgctttaaaaacagatgtatcagcaattgttctagccactccagcacccacccattatcaactggctatgtcagctttaattgctggtaaagatgtgtttgtagaaaagccaatgactctacaaacgaatgaggcaagaaaattaagtgaatatgcagatcaacaaggtagagtgttgatggttggacatctgttattgtatcaacctgcgatcgcttggatgcgagattatttagccactggtaaagctggtcaagttaggcacgtagctacccaaaggttaaagttaggtaaagtacgtagagaagaaaatgtttggtggtcttttgcaccccatgatgtatccgtagttttagacttattgggtaaccctaaattaaaacaagttaaagcgcaaggtagggctattctacaaccaaagatagctgattttgtccaagttgatttgagttttcaaacagggcagtctgcccaaattacttgttcttggtattggcctttaattgagcgtagtacagtagtaattgctgaaaagcaaatgatcgtttatgaagaggtacaacaaactgttactattcacaacaaacatattgatcccaacttacaacattacgacgaaggaacggaaatagttgaagtagctgcttcagaaccattaaaactggaatgtcagcactttttagattgtctaaaaagtaggcaaaaacctcgttctgatggtgcaaatggggtagcagttatagagattttagaagaggctgaaaaacacttacatgagtaactactttgtacatgaatctagctatgttgatgaaggtgcagaaattggtcaaggcacaaaaatttggcacttttgtcatattttcggtaaagcgaaaataggagaaaactgtgtatttggacaaaatgttttagtggctaataacgttgttattggtaacaactgcaaaattcaaaacaacgtctctttatatgaaggagtgatattagaagactacgttttttgtggaccgagtatggtatttaccaatgtgaaaacaccccgttgcgagtttctccgtaatacaagtaatgattatcacagaacattagtcaaacgtggtgcaagcattggtgcaaatgctactattgtttgtggagtaaccttacatgaatgtgcttttgttgctgctggagcagtagtaacaaaagatgtcccaccttatgctatggtagcaggagtaccggcaaaaataattggttggatgagtgcttacggtgatgtgttagagtttgatactgatgggtatgccattgattccacaggtagtaaatatcaacaaatatcagatacagaagtaattagaatctcatgagccaaaataaaattcctgttcttgatttaaacccacaatatgaatctttgaaaacggagattcaagccgctattaatcgtgttctcgaatctggtcagtttattatgggatcagatgtaaaattatttgagcaggaagtatctgaatatttaggagttaaacacgcgatcgctgtcaattctggtacagatgctctagtaattgggttaagggctttgggtattagtgtaggtgatgaagtaattactacaccgttctctttttttgccaccgcagaatcaatcagtaatgttggtgctacccccgtatttgtagatattgaccccgaaacttttaatattgatccagaaaaaatacaagaaaaaattacacctcaaaccaaagccattatgccagttcatctttatggcaacccggcagcaatgctagaaattatggaaattgcccaaaaacataatttaaaagtcattgaagattgcgctcagtctttcggtgctaaatactacagccagaataatactaacggtaaacatactggtactattggtgatgtgggagcttattcatttttcccatctaaaaacttaggtgcttatggagatggtggtttaattgtaactgataatgaccaaattgctgatctgtcgagaatgctcagagtacacggatctaagaaaaaatatcacaacgaagttttaggttataattctcggttggatactttgcaagctgctattttacgagttaaattacctcacattgatcagtggaatgaaggtagacgtagggtagctaaaatttataatcagctattgggcgatgttcatggtatagtaactccggagatgactaacggtcatgtatttcatcaatataccatccgagttttagatggtaagcgtgatgcagtgcagaattacttaactcaacagggtattggttcaatgatttattatccagttcctcaagatcagttaccagtttatcagggtaaatatccagttaattctgttagtgatctattagctactcaggttttaagtttaccaatttggacggagttagaggaaaaggacatagagcatattgttcaatttttacaacaatttgcttaagaggatgttttaaaagtcgtatcccgtaatttccatcacatttttaccctcttagtcctcccttataaactatccattacccatatctttcttaacattcatgaaagcgatcgcttgcaacccttaacactcaaaggctacggtgtacacacaagtcttaaaattcaccctaaaccctctaaaatattttcgtatttttagaactcattaagtaatgaatattcgcaaaattcgccccaattttctcaaaaaactacttatatcttttaagttactttattgtggactgattgctcctccatttgaaacaatctggaaatatcgttctatgttgtatcaaactagtatacatgaagttaaaacccgtcatgcaggatcagtattaggactgttttggttagtaatttatcctttactatttttaggaagttatgccattgtttatatatttatttttaaaattcgttttcctgaactaagttcaaaagaatatgtaactttgatattttgtgggttgattccttttttgggattttcagaaggcttatccttaggagtatcttcaatcgtgagtagttctaatctgattaaaaatactctttttcctattgatctagtgcctgttaaagctgtattagtaggtcaagcaacccaatgtgtaggtatggctttactcctaattgtattagcttttttaggaaaaattactatctatactccattagttttcctggtgtggatattgcaacttttattttctataggtttaatatggatactatcaagtttaaatgtttatttaagagatatacaaaatatcattcctattttaacattaatcttaatgatgttaagtcccatagcttatacagaacaaatgattcctgaaaattttaaattatttttgtctattaatcctctttattatttgattatttcataccaatcactttttatgtttggtcatttgcctaatttaaaaattattatacctttagcaattttttctcctatgttgtttatgataggattttggtttttttcaaagatgaaaaaattatttacagataacttataattatcattaaaatctttaaatactaataaagtgatatgtaaacgcaaataattaattgaaaacttgcaaagttaataaaatatgaataatacatcttttaatgatatttctgctatagaaattaacaacgttggtaaaatgtatgagcttttctcaaatcccctacataaagtattaaatgtttttgggctagataaaatcttgttttttgaaaatagaaataaacaaatattttgggctttgagatccattaatttaaacatcacaaaagggtcgaaagtaggtattattggtagtaatggtgctggtaaaagtacattattaaaaataattataggtaatgtagagccaactgaaggaacagtaaatataaaaggaagaatacaagccctcatggagttaggaacaggttttcacccagagttcactggacgacagaatattcgcgcatctttagcttatcaaggaattaatcaagagaaaatttttgtattagaacaagatataattcaattttcggaattagaaaactttattgatcagccagttaaaacttattctgctggaatgtatgcacgattggcattttctacagcaacagcgattgatccagatatcttaattattgatgaaattttaggggttggtgatgcctattttatcaataggtgtaccgaacgaatgaaaaaacttactgaatctggaacaacacttctactggtatctcattcaatgggacaagttttgcaattttgtgatcgggctatttggattgatcgaggtagaattgttaaagatgattctagcatggaagtagtaaaagcttacgagagatataatagagtaatagaaaatagaagattggtggctaaaaatattaaagcctcaagctctcagtacaaaaaccacgaactagaatcttattctgattctttcctgatccgcttggtatgtaaagataatcaatatccatttaaagtaaaatctatacgtctttggcaaaatggtgaattatttgatgaaattttggtaggtgaaccccaagatgctaattatacaggtcactcatcttacataatgatggattctcaatcttggtctaatcctcaacaggaagagcaagttaattttcgatctcttgtagccaatgattcctacaaagaagtttatggggcagcaatttttcacctctacctttatgaacctgaaactaactatgaattagaattatgttatacctataaaggtttaagtacagctttattagaagtattcaatggtcaagaatatttccaaattgctgaaataattcccagcctacaagattggaatactttgtcagttaagattcctgttttacgtgaggcagcagaaatagagaaacttaaaaattcatggcctggtacgggtgaactacgcattagtaaagtttctttgttatctgatgataaagaattagcagtattttctgtgggacagtgcctaaatattaatatcactgtagaaagtcaatatgatgggcagtacccaattacgttttgtgtggtaatatttagaagtgatggtatacgtgtttcttgtcatcttagtgaagagaaaatatttccgatgttagctcatcaaaagatagatgcttgtttatcatttcctagtctgaaattaggagatggcacctattgtttatctttagcaatttataaaactcttgatcgtcaagcggtaggagtgagtgaatattatgatttgattgcttggagttatgaatttaaagtgattggtaatgatcctatagattcaagcattttccaccatcctgcaaattggataatttaattatgtctaacactatcagctttcgccaaaaaattgaattttattgcgtcaactgtgattgtagttcacctctggaggtagctagtacaaaattttctgactatacttatcagtgtagttgctgccaaaaagtctatcgggaagttgacggaataccttgttttttatctagtaaagacgaaacttcagagatttttcaaaaatactttgataattattctaaaattgcttctgatgatattgttgaggatattatgcctgtaacttataaaaatattcaggcagataaattgattaaatattgtggagcaaaaattcagcagaatattttagatattggttctggtaaaggtttctttttaaagcgcatatctcataaccaaaaactgggaatagatatatcattagagtatttaaaagttttgcgtaaccagggagttgaatgtgcattagttaatgcagaaagcctgccttttaaaaaatgttttgatgtgattgttctgaatgatattctagaacacgtatttaatccagaaaaagttttacaacaagtcttcaaagcgttgaaagatgaaggtatagcagttattcgagttccttataaagaagacataagtatctacttacctgaaaatggttgtaaatatgaatttgttcatttaagaactttcgataaaagtaatttaacacagttagtccaaaattcaggattaaaactcaacaagattcattatgatggctttgcttggagtagattacgtagaaatattaataatccattagtgagatgggcaatcaaaaagattgatgaatatgtcaacagagaaatttatatcaaaggtagaaatattattgatatagatgctggtttcaatcaacttcctaattatttaggttgtattttttttgaacctattgaatgtgtagcaatcgcccagaaaaccaagtagaattacaatagtggagaacaacaaaattttacataggacaagaaagataatggaaaaaaatattaatcagcaaaatgctaatttttggaatgagctttgtggaacaggtttagctaagtctcttagtataacagaaattacccctgatagtcttgctcgttttgatgaagcatatttgaatatttatccttatttaagcgaatatataaataacgaaaacatcaaaggtaaaaaagtcctagaaataggattaggatacggaacgctaggaaaattactagcatcttgtaattgtgattactttggcttagacatagctgaaaatcctgtggaaataatgcgttataggctatctttaatggataaaaatccagatcacgtaaaagttggttctgctcttaatattccttatgaaaatgaaacttttcactatgtctattctatcggttgtttacatcatacaggtgatttagctaaaagcatccaagaagttcatcgagttttgttacctggtggtaaagctattattatgctttataataaaaactcatttcgtcaaatgatatatattccacttgctcgtttaaaatctatgttatctctttcaaaagcagacaaaacttatcgtaatttttcagaatttgttcgttctttatatgatcttaactctcagggtcaagcagcacctcatactgattatgtctcaaaaaagcaagtttatcaaatatttaagaatttttctgagattggaatagatgttcagaattttgacacctacgttttaggtaaaggaaaaataattatttatcgagaaaaattattggacaatcttgctagaatcatgggattagacttatatattatagccagaaaatgattatcaaatatttacttcaatattgttgaaaatgacaatatgataattataagttatttacttaacagatcataacagatcgtaaaagcacaaagttgatatttcacattagttaaccaggttatattgtcgatgaattaccaagaaaagaacaaattaaatattctagttttatatgataaaaactctatttttactaacacggtcaaagagtatttagaaagtttttctttattctctttccatcacatatactatgctcatggtacacatactgctacacttaaatgggacttgaagttatttgatgtcattgttattcattattcagtacgtttatgttatgatattctatcaccagattatgtaagcacgattagtaagtttgatggattgaaaatactttttattcaagatgaatatgattatactgaaacagctagaatgtggattgagcatttaggtattaatgctgtttttagttgtgttcctcaagagtacttgaatttagtctatccatcatctcgatttattaatacagaattcaagacaataataacaggttatgttcctattcatctagaaaatagaatgcattttaaacctctgtcagatcgaaatattaccattggatatagaggtagggaattagcttactggtatggtaatctagctagagagaaattattgattgcacaaaaaatgcgtcaaatttgtgaagcaagaggtataaaacataatattgaatgggaagagaaaaaacgtatttatggagaacaatggtatgaatttatggaaaattgtcgagctacattaggaacagaaagtggatcaaatgtgtttgatgattatggaaatattcgtaaaaagattcagattgccctgaaaactaaggaatcaataacttatgaagaaattcatagaaaatatatagcagaacatgatggaaaaatcatcatgaatcaaatttcacctcgtgtttttgaagctattgctttaaaaacagctttgattctgtttgaaggaaattattctggagttattcaaccagacattcactatctatccctcaaaaaagactttagtaatatagatgatgttattagtaaattaaatgatgatatctacataacggaaataacaaatagagcatacaaagatattattaaatctggtaagtatagttatagaaaatttataaatgaatttgataaatttgtatcagaaaaagttaccaccacctcaggagtctcatcttttataattcatgaaattaaaaatattccagaagatgaaattcaatattcagtgagtgaaattatagaaatattaatcagaataagtaaagaaaagctcaaaataaagatcaaaacgcactttccaaaaatatggagtcgagtcaagaaaattaaggattggggattgtcaaaattatagttctgcattgtatttttgtgataatatagattgatgtttaaatagataacttatgtgtggtattggcggaattattagtctggctggtgaacagctacctaacttgaagtataatctggaagtaacttctaaactacagcatcatcgtggtcctgatggtcagggaatatggcaacatccgagacaaattgtcggctttgctcatcgccgcttaagtattattgaccttgaagccggtaaacaaccgatgactgacaatttgggtaattgggtaacatataatggtgaaatttataactatattgaattacgccaagaattaggggaacaaaatttcgtcacccattctgacacagaagttattttacaagcttatagaaaatggggaacagattgtgttaatcattttcgaggaatgttcgcttttgctctatgggatgaagctaatcaaagattattttgtgccagagatagatttggtattaaaccattttattatactattgttaataatattttttattttgctagtgaagtcaaagctattttaccctttatagatagcatagaaaccgatatagaaggtttccaagattatctgacttttcagttttgtttagctggaaaaactctgtttaaagatattaatgaattacaagctggacatgatttaactattcaaaatagttctctgaaaatcaaacgctattgggaagtttactataagttagattttaatcataccgaacaatattttcatgaaaaaattcaatatctaattagagaatcagctaatattcatttacgcagtgatgttcctgttggtgcttatgttagtgggggtttagattctagtattgttgcttctattgcttccgaaaaaaaacctgatgagttggttggttttatcggcaaattttcgataagttctgattacgatgaaagtccttatgcccgtgaagtagctaattggcgaggttttcaactatatgaagctgatattaatgttaatgattttattcataatattcaaaaagttatttatcatttagattatcccactgctggtccgggttcttttgctcagtatatggtgtcacaacttgctagtaaatatcgtaaagttgtactaggaggacaaggaggggatgaaatttttggcggttatactcgttatttaatcgcttattttgaacagtgtattaaaggagcaattgaggggacaatgcactcaggtaattttattgtcacctatgaatcaattattcctaatttagttgcacttaagaattacaaacctctcctcaaaaaattctggagtcaaggattatttgaagacctagataaaagatattttgagttaattaatcgtagagatggtttcaatgatgagattaattggggtgaattaaatgattactcgccttacgaaactttccgaagtatttttaagggaaaaaatgtccagaaagaatcttattttgatagtatgacgcattttgactttaaaaccttacttccagctttactacaagtagaagatcgagttagtatggcgcatggattagaatctcgtgttcctttccttgatcatcctttagttgaattagcagcaacaattccctctaatattaagtttaaagatggtacaatgaaacaggttttgaaaaatgctatgtcgtcagttttacctcctactatcctggaaagacaaaataaaatggggtttcctgtgcctttatcagaatggatcaaaggtgaagcaaaagagttcatttatgatatattatcttctagtaacgctttaaatcgccaactgattaataatcaaaaggttttaaggcaactagaaaatgaacctaaattcggtcgtaaaatttggggcttactatccctagaattatggcaacaaacttttcatgatcaacaaagtacctatcaaaagttaattcaagtgtgaggtttattcaaagtgaagatcttaattacaggtggtgcggggtttattggctctcatttagctgatcgtttattagcaaaaggcgatcaagttctagtcatagataactattctacaggaagaagagataacttaaaatctgatactaatctcacagtggttgaaggtacgatcgctgatcaggaattagttaataaagtatttgatgattttcaacccgaacaggttgttcatgcagcagcttcttacaaagatcctaataactggttagaagatagtttaactaatgtgttaggaacagccaacattacccaggcatcccaaaggttaaatgtccaaaagttaatttattttcaaacagccctttgttatgggttaaaacctttagaacaacctatcactttgaatcatccgattttatcaggtggtagtagttatgctattagtaaaactgctggagaacaatatattcaactcagcggtttagattacatttcttttcggttagctaatgcttatggtccacgtaatttaagcggaccattacctactttttatcatcggttaactaatgataaaccctgttttgtgatggatacaagacgagattttatctatattcaagatctggttgatgtggttatcaaagctttagatggtcaaggaaatgctggggcttatcatatttcttctgggtctgattattccattaaagaactttttgatgctacagttaaagcattagatattaacctaaaagaagaagtagaagttcgtcctcgtaatgtggatgatgcttatacaattttgttagatccatcgcaaacaaatcaagatttcaattggcaaattactactcctttagaaacaggagttaaggcagcaattgaatggtataaggaatatggaataactcaaacttatactcatttgaaacttggtgaagaaaagaaataagaatgtaaaattgagttaatttgtaggaacatatctatgttcctacaagactcttaagtaaatagacagtctgttattgttcacattttatctttaaagtcccatgcaagaatttacaaatcaaaaaatattagtcgttggtggtgctggttttgttggtagtaacttagttaaaaccttattactgtcagagcctcaagaaattattgttgttgataatttattatcagcagaaaaggaaaatttacccaaggattcaagagttatatttatagagggttcaattactgataataacattttagctcaactaaattctgatttagattatgtattccatttagctacttatcatggtaatcaaagttctattcatgatcccttagctgatcacgaaaataatacgttgacaaccttaaagttatatgaagcaataaaggatttgattaatatcaagaaagtcgtgtattcttctgctggttgtactgttgctgaaaaaacttttgaacaagcagaagcaactacagaagatgcgcctgtatcattatacttagatagtccatatcaaatctctaaaatcattggagaattttactccaattactatttcaaacgtcataatttacctgttgttaaggctcgttttcaaaacgtctatggaccaggagaagttttaggggctggacaatggcggggaacaccagctacagtatggcgcaatgtcatacctacatttatatatcgcgctcttagacaaatgcctttaactgtagaaaatggtggaattgctacacgagattttatatatgtggatgatattgtccagggattaatattatgtgcaacaaaaggaattgcaggagaaacttataacttagctagcggagtagaaacttctattttagaactcgcaaatttaattaatgaactaacatctaatcctacaccactagattttcgtcctaaacgagaatgggataattcaggaaaacgctttggtagtagtgaaaaatctcgaactcaattaggttttgaatctgaaattgatttacccaaaggattaataaatactatcaactggacaaaaaataatttcagctttattgaaaaatgtatccaaaagcatcataattatatgaattaatgaagcattgaagactatacaaactaaatgaatctgatgtcaagaaatccccaaagaatactaattttatattggtatcctggtcttagtaagatgcgtgcggctgttgaacaccatttaaaagcattaaaatattctggcttgagacatgatgtcatttattataatgccttgcttggtgttccttcttggttaatctatttagatattgatgtgctgattttgcataatacttttttgtgcttacgccattctcgtttatttgaggtttggaaatcccgaatgaaatggattaaaaatctaaattgtttgaaaatggctattcctcaagatgaatatgattatgcagaaatattagatgattggctgtatgagtggaatatttcagtaatttttactaattttgatcatgatcaacaaaaaattctctatccaaaaatgtctaataaggctgtattctatcagtgcttgacaggatatatagatgatacacttgctgaacagtatgcccataaattaataccagttaaagatagaaaatatgatattgtttaccgtgcaagtcatttaccttataaatttggtaaacatggtcaacttaaacatgaaatcgcaaaaattgtatatgatagtgcagagagattgggattaaattccaatatatcaactttagataaagatactatattaggggataaatggtttgattttttagcttctggaaaaacagttataggttgtgaaagtggttcaagtgcattagatagatgtggtgaaataaaaagaaaaattgacgctatcctccagcataataagactatttctttccaggaaattactgattttcttcctagcgattgggataattatcaattttttgcgatcagtccccggcattttgaggcaataatcactaaaacttgtcagattctagtagaggggaattataataatgttttagaacctaaccgacattatattcctataaaaaaagatttttcaaatcttgatgaagtcattagcaaaataaaagatgatgaatatttaactgaaatcactgaattagcttataatgaaatttacttgagtggacaatatagttataaaactttttctctattaattgacaatgctatttttagtcatcaagtaaaacagattaataaaagaaatgttcataatatgtacttattaaagatatatttgtttctaataagaatgaataatttattagaaagatttatttattttataacaatcgagttaataaaaaaaggttacaactacatcagaaattaagcaatatttaaaataaccaatgtgtggcattacaggcatttggaatcaaaatcttcaacccatcaatagggatatcctcaaatcctttactgatatcatctctcatcgcggaccagacgatagcggtttttactttgccgatgatgttggcttgggtttaggccatcgtcgtcttgccattttagacttatctgtagctggacatcaaccaatggctagtaaagatagaaaaatctggttagtatttaatggtgaaatttataattacctagaactagcagcagaattaacaaatcatggtttctcttttcaaagtcactgtgatacagaaatcattattgcagcttaccaaacttggggttttgattgtttaaatcggtttaatggaatgtttgcttttttgctgtgggatgacaggaaaaaattactttgggcagtacgcgatcgctttggtattaaacctttatatatatatcaaaaaccgaatcaattaattgcctttgcttccgaaattaaacaatttaccaccctaccccaatggcaagcagaaatcaacccccaaacagcatacgattttcttgcctatggaatatttgatcatacccaacaaacattatttcaatcagtttggcaactaaggggaggggaatatctcacactttgtttagataaaaatgatgattattttgggaaaatacaagtaaaatcttggtatcaattgccaaatcaatcattaggattaactcttgatcaagctacaaatacagtgcaaaacctattaaatgattctgtaaaactgcgattacaagcagacgttaccattggttcatgtctttccggtggactagactcttcctctatagtttgtttagctgatcaaattcgcagaaagcaaaatacatcctatcctttccaaactttttcctcttgttttgatattcctcaatgcgatgaacgtccctatattaattcagttgtagaaagtagaaatattcaaccccattacatatttcctgacccatttgaattattcaatttacttgataaaattacctggcatcaagatgaaccattttgttctactagtatatttgcccaatggtgtctttttcaggaggctaaaaaatcaggggttacagtcatgttagatggacaaggatcagatgaatattttgcaggttatcatggattttatggggctttatttaaatatctgttacagaaaaagcagttaataaatttatcaaaagaagtcctattttcttatcgttatcaaggttctactaagtttctcaaaagtgtagaatcgattttacctcaaaccatccgtcaagtaattagacaaattttaggctatccatcagcaaccaactttcccttttggattaattcagataaaatgcgatcgctagacattaacccccaagatccttttaaaatattagataaaacaaatacacccattcaaaatttatctgctttacaactcgcaaatactagcttaccaatgctattacattgggaagatcgcaactcaatggcgcattcaattgaagcaagagtaccttttttagactatcgtatagtagaatttgtctatggattagatgacagtctgaaaattaaaaatggtgaaaccaaaactgtattgagatccgccatgacaggcataattcctgattctgtcagaaacagaaaagacaaaatgggttttgttacccccgaatatcattggatgcgcgaaacattgtataataccttcgagtcagaacttcaagaagctattagcacccttgaactttggttacatccccaattaattaaccaaatatttgtagatataattgcaggtaaacggttatttaatcctattatttggcgggtaattaactttagccgttgggtaaaagtttttaaggttaaagttctctaaattcattcaaataccatatcataatttatgaaaattcttattatttccacactcaacttatctcattctaatggtggtacagtacattttacatctatttatcaagaatttcgccgtgctggacatattttagatgccattattcctagcaccaataaccaagcaattgatcagcaaataactgccaaatattttgataaagtcactttctctagtaataaattaagtaaattattacccatcagtaaaactagtattaatagcttattacaaatatttacagtattacagcaaaatcctaatgattatgattgggtatatttgcgaagtaatttattatcattctttgtattattagctttaaaattgagaggatttaaaaaaattgtcagcgaacataatggttggtttgttgatgaacttaccatgatgggagtttctaattggcaacaaattattattaagtatctacagattagagatgctaaattagcaacattagtaagaacagtagttcctaatattaaacaaaaactgatagaaaatggcatagatactcaaaaaatatttgtcgctggtaatggcacagatattaacttatttcagcctaaaaaccgacaagaaatacttaataaactcaacttaaatccagaatgtttttacttaggatttattggtgatcttgaaccttggcaaggtgtagaagttgccattaatgccatgtctaaaatttatgataaatatccagaaacttgtttattattaataggaggaggaagacaacttaactatttgaaagaaacatatggtcatttagaatatattaaattcatgggagcagttccctatcaagaatctaacgattatattaactgttttgatatagccttattgccaaaacaaggtttagatgagattggttattctccaattaaactttacgcttatgctgctgctggtagagcaatattagcttcagatattagaggaattaaagaattagaaccgagtaagtttttagtattacatcaacccggtaattctcaagatttagccgcaaaagcaatagaaatgatatccaaccgagaaaaattatctcagatgggtattatagcacgtgaatatgccgaaaaacatttttcatggcaattagtcacagacaaaattattcaagcaattgagaattatgatttgcagaagcaattaagcaatgaatcaaagtaatttacagatagttttttaggaattattagttacttttaaccacttatctgtatagtaagtagaggaatttctcactatacacagcaaaaatatagttagggggcgtatatgttaagaaatattacaccaggtactgcaagtagactgacaattgttgatcatcatgaaacctatgggagacatattttacaaagacatattcaaaaaatagatatattaaaatgcctagacttaggatgtggtgatggagaagatttgttaatcgttaaacagcatcatacaaacgcacaatgtattggtatagattatgggagttggaattttgaaaaattaatacaaatgggaattaatcctatctcagtgaatatagagaatcaatcacttccttttaatgatgaatccatagattttattatagctaaccaagttttagagcatactaaggaaatattttggatcaatcacgaaatttttagaactctacgaattggtggttatttatatttgggtgtgccaaatgtactatcatttcataatcgtcttctgggattatttggagttcatccgacctctgcaaaattaatttctgctcatgtaagagtattttctaaaaatgatacaattagtttttacaaaaatattgctggtaggtttacacatatagaaaaattctcaggttcccaattttatccttttcctaaaaaaatcgctcgttccttatcaaatgtattaccttcattggcattctcgattttcttcctcatcagaaaaactgaagattataaagcggagtttattgattggttaataaaaacacctcttgagactaactttttcacaggagaaaacaataattcatctttttagaaatcagaaatcacacaactaagctgttgtgtctttaacttgaataattagtacaagcaagatgcttgtgctactgcaacttgaaatttaaaggagtcatattgaatatgaaaattgctactattctcggtgcaagaccacaatttattaaagcatctgttgtcagtgacgctttcaaaaatgctggaattaatgaaataattattcatacaggacagcattttgatccaaaaatgtctgatgtcttttttcaagacttagaactacctacaccacaatatcatttgaatattcatagccttcaacatggggcaatgacaggaagaatgatggaaaaaatcgaagaactattaatttcagaaaaaccagattatgtatgtgtttatggtgatacaaattccaccatagcaggagcattagtagcagcaaaattacatattcccattgcccatatagaggcaggattaagaagttataaccgtcaaatgccagaagaaattaatcgtattgtgacagatcatctatctcaattattatttgcccccacacctttagcggttaattgcttacaacaagaaggtattaatcaaggtgtacacttggttggagatgtgatgatggattctgttttaaaatatcaggaaaaagcccaaaaaacctctgatattttaagtagatataacttgcaagaaggaaaattttacctagcaacaattcatcgtcccagcaatacggatgactttgtacggttgcatgctattctggagagttttatcaatttagattatccagtagtttttcctgtacatccgcgtacactcagttgtattgaaaaaatgagcttgaataattacttaaatcacccttctattcaagcaattcctcctgtgagttatttggatatgttagttttacaaactgcttctaaaggggtagttactgattcaggtggtattcaaaaagaagcatatattttacaacgtccttgttatactttgcgaaatgaaactgaatggaaagaaactgtagaatcaggatggaatcaactggtaacaccagaagaagtaacacaagcaatatctaattttattcaaccactagaatggaaatctctttatggtaatggtgatgctgctttagaaatagctaatacttttttgactattttttgattcaatctgttgactaaccatttatttacgaatcaattttcccaactttagaaattatagctccatgatctgaatagcaactcaagcaatttctgaattaaacaactttacatccagatacacgacttcttgaaaagatcgggtatttatccacatataattttatgttaaataccctaaactaaaaatcaaatatctcatgaatcttttacttctttaacatccattgattgattattctcagctatcctcgacttaattaactctatatctaaactcaactcagaagcgatcgcctccacacttaaacccaaacgtaacaacaaaggtatcatctctaacttaccttctaacttaccttctaacttaccttctaacttaccttctaacttaccttccgctttaccctcttccttcacatcttgaaaataccgtgtttgcttcaattcatctagtccaaacatagcttctaactcctgactacttaaatagggaaacttgtacaccagtatcttatctaccaattctaaaaccttttcctggatcattggttctgctaaagatacccgtacttgttctttcagttgaactactttatccctgatttgttcttgttgtgctaagctgttgtgcatttaatttatataaggttaacaggcaagatgcctgttccacaagacttaagaatattaagattatacagtttagctgcataacagcttactatcaattctagcattcctaaaccaacagaatcaccagttttttcccctaactcatctaagtatatccgtgacattcttcccggatgaaataactcttgatactgaatcggttctgctgtatcagtgctacgattgggaaatatcgccactgcacaccaattttgttgaggacgatacaacttcaaatacagaaatatctccccaaacaagtcccagtaaaaattatcacgttgctgaaattgcacctctacaaaataaatcagtttatcttcatcaacaggtgggagaaataaaccatcaaaacgaaatgataactccttaatctccactgaatcaaacttataaccactggcatttgctggagattctcctaataattcaaatagaacagtgggtaaagtttgaaatatttgataaaaaattgagtctgttttcattaatggcaaatagttttcgcctaaacatcaatatcattaaaatatcataaattctatagcgtttccgacaagggaaaaaagacgtaattatcaaaaattgacaaaaaaatccccaaaaaagccatgataacagggtagaaagattcataaccaaaaaggaaatagcaatagaagttaaagaagtatgaggcaatttagtcatgactctacccaggctaaatgcaccttgttccttttttcttaccctgaaactctttatttatcaggcttttggctttatttgggattaactcaattcacctaaatatccaataacccgtaacgcttttgcaaatctaataatttcatccttgcttctcctgcattatccgctaaatccgcaaattccacaaaccttcttaactcttttcttaacaaattgcgttccacctctatcgcttctcgatccaaatcgggtggtaaaacaatcatatcaaaaatcgtcgctctgtctttaccaggatggggacgtaaaaccctaccacgacgctgaataaattgacgaggattcccagaacttgataaaatcaccgcagtttgaatagcgggaatatccacaccttcatctaaacaacgaatagcaactaaaccttgtaattctccgctttcaaattgttctcttaaaatttcccgttcttgtaaagaagtatgtgcggtgtaggtgctgactttgtaacctaactctcctcctaaaattctcgctacttccttcaactgacgcaaagatgaacggtgtccgctttcctgtgaaccatcgctacaataaaataaagtatggctggtatccagacgatttaacattaattctttcaaagccgttaatttattttctgctgcacctactaacctagaacgttttattaataaggatttaatatcttcaatattttcaaaatcgtcgatacccccttcttctcgttctctatattgtagcgatcgccctattcttttagtcaacttcaaataattaatactttcaatttccgttaattccactagaagaggataatatagataatgaactaaagcaccttgatttatggcattctgtaaactaaactccggttgtaaaacagaaccaaaataatcaaataaagactccgtacctccatcatcaaaatatctttctggggtagcagacaaagcaagacgtaaaccgatattccgaggtaaactttcttctaacctgggtgcgcctaaattatgcgcttcatcaccaataattaaagttttaggtgtaaaatatttaagttgagattgcaacccctcactaattaaagtcgagttagtggtgatcactgtgacgaaattttgagaaccggaacgcagattatataattgcattgaaagttgactttgccaagtgcgtaaattctcgaaagccaaaatcggttgtaagttaaatttctcacattctctaccccattgactaaccaaatgacggtaaggacacaccaccaacaagacttgtaaacctatttgttggtataattcacaggcgatcgccaaagcagtaatcgttttcccactaccagtagccatttttaaagtccctctgccattattagcaaaccagctagtaatagcttgacgctgatatccccgcatttgcaaagatacaggcatttttggacatcctggtaaagatgactgaacatgataactaccctgattttccctaacaaaaggcaacttcagagagaaagcaggaggtttttgtttctttattggcgatcgcgtgaggtacataaggagttcagtagttcagtagttcagtagttcagtagtttgggagttcaggaagaagaattaatatttttcccagtcaccagtcaccagtcaccagtccctaattataatttctccacacaccaaccaaagaaccttgtacctgtacttgcatagcgggtacttcgataggttgatattttgggtttgcaggtttgagagtgacagtatctttttccagataaaaacgttttaaagttgtaccgtaaccttccaccctagcggcaacaatcgtaccattttttaactgattgggttcgagtacgggacgcaaaaacaccacatcaccatcagcaattaaatcttcaatcatgctatcacccgttacccgcaaagcatagctgcggggaggtagagataaattagccaagtctaaatattcatgttccaccgcatcggtaaaaggttcaattaaaccaccagcagctatagttcctaaaatgggtacaccttgcttagtcgtccgcaaaattctaattgttcgcgctttcccttcattccagtcaatgtatcccttattacgtaaatgttccaaacgactttgaataggtgcaggtgacttgagattcatcgcttgcatcatttggcgaatagatggcgaatactgattaatacggatatattctaccaaccattcatacaattcttgttggactgctgttagtttttccattgttttatcgggaagtaattacaaatgtccctagagcatttgtactacaaaaatcttcccttaacaagattgatttaaatatttctcaagaataaatcaatatctttcttcagcacttgcgactattaaccagtaattttagtgaaatagagttatatttatcaattttttccttaaattggtgattggtaattggtaattggtaattggtaattggtaattggtaaaaaactcttaactatcaactatcaactatcaactgtcacctgtcacctgtcacttgtcacctgtcaccaatcaccattctttcactttgcccctaaaatactagcaagtaaagctttttgggcgtgtaatctattttctgcctgatcccaaacttttgattgagaaccttcgataacttcatcggtaatttcttcaccacgatgggctggtagacagtgtaaaacaattgctgcgggatcggcaaaacttaataattgttgagaaatttgataaggttggaagataggaagacggttatcagcttccgattcttgtcccatacttgcccaaacatcagtataaagaacctgtgcgcctttagctgctgcggctgcatcatgggtgagaataacttcagttttatgatcagcgatcgccctagctttttctacaatttccgcatctggggcatatcctgaaggaaaagctactctcacattcattcccatcaaagcacaacccaacatgagagaattagccacattattaccatcccccacataggtcagagttaaacctgccagagagccaaaacattcttgaatagttaataaatcagctaaaatctgacaaggatgctctaaatctgtcagagcattaattaccggaattttggcataattagcaaaaatttccaactcctgctgggcaaaagttctaatagcgaggatatccaaataacgatccaataccctagcggtatcctgtacaggttcaccccgactcacttgggtaacattagggttcaggtcaataacctgtccacccagttgatacattgccacagtaaaactaaccctggtgcgggtggaagccttcgagaataacaaacccaaaaccttgttacaatgtaacgttagcttttgtgacttgagtaaagctgccatttctaaaagttcttgcagttctggggaactcagatccgccaaacctaataaatctcgtccaatcaatgctgccatgctgatgatttgtatattatggtgatgttttctgtgtcttcactcagccgcgtcaacaggaatacagtcttaaaactctaccaaattattgttacctgaatctactggattgtagttagcttggtgatacatcagcagttatgggattttggattttggatagacttgacagttaacccaggtaaaaaaccagggaaaaaaattttttcggaaaactactagacaaataatttatttatgctattattataagtcggtgggcaattcaaaagctccaacacgccagcatagcacagcggtagtgcatccgacttgtaatcggaaggtcgtcagttcaatcctgactgctggcttttttatttaactaaacacatacaaaaactatagaaacgaatttagtgttttattgtttaacctgcctaaatccaatttatgtatcataaaatgctaacatcatactttttataggaaagcaatatgcaaacaaatcaatcactatcttttcccagtatgggatgtggaacatgggcttggggtaatcaactcctgtggggatataatgaaagcatggatgaccaattacaacaggtatttaatctttgtgtgagtaatggtgtcaccctgtttgatacaggagactcctatggtacaggaagattaaatggacgtagtgagtcacttttaggtaagtttagcaaagaatatcaaggattaaatcaagatcatatttgtattgcgacaaaattagcagcttatccttggagatggacaagaaaatcaattatttctgcttgtcatgcttctgctaaaagattaggaaaaaacgttgatttggtccagatgcactggtctacagcaaattacgcaccttggcaagaagtaggtttattagatggtttagctgatttatatgcacaaggtttagttaaaggtgtaggattatctaattacggtacaaaaagattattatgggtacataaaagattccaggaaaggggaataccgattaaaactttacaggtacaatattcattattatctacctatccagtgacagaattaggtttaaaagatgtatgtgatgatttgggaattaaattaattgcttatagtcctttagctttgggtttattaacagggaagttttcggaaaatggcaagtttcctaaaggtgcaagaggatttttatttaaacaaatcttaccagggattcaaggagttttaggaactttaagagaaatagcaaatcagagaaatagaaccatgtctcaagttgcaattaactggtgtatttgtaaaggtgcaattcctattcctggtgcgaagaatttggaacaagcacagcaaaatataggtactttgggttggttgttgagtgatggggaagttgcagagttggatagtgctgctgctaagtctgaaaagaagatggtgcagaatatttttcagacaaagtgatctaattttttctagattcatctttggatttaattaaatattgactcagattatgtaataatcgttggtgtcgttctgtggaaattaagccaattgatccaattatattgttacgagtaataactgttaagaaactcaatctaattacagatgaactaactaaaccactagattgaaaatcatcatcatcagatgaaactatttcatcaaaatcaggaatatattgttttaattgggtgctaattccacataccaaaaaatcttgatactttggcatttctcgcaaaattaaagccggacggttttttatttctccatttgcttgaggaataggagttaatataatattaccttctttcataatctgggttatattctttgattgattctaaggtatattctggttcattttctgcataacattgattcaagttatttaaagaaaatttttcccagttttctgtttcttctgtattcttatcttctggtagaataggaataataaatacttttgttccttcgggtatagatacaggagagagtaattctattttcccgtctttaacaactgctaaatgtccagatgtcattattttatatccttattttatatcctagtttgcaatttacaagttttcttgtaatattattatatcaccaatttctcaaccatgctagaaaaatcaagattatatttaccaaaagttcccaaatctaattatcaaccccaaagtcaagatacaaacatagaagctgatgtttacttatttaatagattaagaaacctgacattaaaacaacgcctagaaatgtttatttcccatgaaaaaggcgtaaaaaaactatgtcttgtaggaattaaatcacgacatcgaaattttactatccaagaaattcgtgataaatttacttgcgctgtattaggagaaaaatatactcctgaatttcaaccaaaaggtattaatgaaaatatgtggattcaagattccatttctttagcaggggaactacatcaaatatttgcatcaattaatatttcttactatgtaagtggtggtgttgcgagttctaaccaccgagaaccacgttctactcgtgatttagatttggttatagaaattaatcaaaatcaaatagatttattagtagaaactttagaagcatctggatattattgtccagcaggtgcggtagaagatttgcaacgtggatatggtaatatattgaatattactcatccagaaactatcgccaatgctgatatttatatcacagataattcacattttgctatatcacaaatgaatcggagagtgttagtagatgtagagggaatacctagtttttggatagcttcagcagaagataatattttacacacaacacaaaagttgcgctggggtaagggaagtaaatcagaaaaacaatggcgtgatgttttggggataatcaagttacaagcagataatttggattatggttatttagtagaatgggcagaatttttagatttggttgatgagtttagtgaagtattaaatcaagctcgaatatgaagttatcatttagtataagttaaaatcgctgttacattcccaataatctctcaaccaaaatactcacatcaggaaaagctaaagatcgaatttcaccatttttaaaaatttctcgactttgataacctgcatcagtaggaactctaaaaacaatcaattccatattccgcaaattaattatccaatattcgggaatacctgcggaagcataaactttagttttaacttccaaatctttacttaaactagaatctgaatattcaattacccaaaatatattttctggataaggatgatgttcgcggtaatcttttcctaaacgtttaacaatagcaatatctggttctggttcggaattagtttctgggatagtaattggtttagcttgacgaacttttgctttttgtccaagtaaataaattaaatattctcctgcttcatcactagaataagcatgatattctccttcgggagccatttctactatttccccattaattaactcaacattacgatctgctaaaataccagtggcaattatttgatgataatctttaatattccattttacagtagttacattcatagcagttctccatctgctttattcccattgtaacttcattgatgacaaaattaaattcccagattaaattattagctccaaaatttgctaaactccaaaatcgggaaagatgaaaatattggttattgggagcgatcgcacagtgattcaaggtgaaggtacaatcaatgtagaaaatgtcaacccccaggattatacatggaagttctggccagttgtccccctttatccctacggaaaacgtcgcactattcgcaaagaagtagttaaggatactatctggatctttgatcagatgcaaggggttttctatgtagttgtacccatccgcatgacggtggtaaagttagaaaaaggcggtttattggtttatgcacctgtcgcacccacaaaagaatgtatccggttagtaaatgagttggtagcagaacacggggaagtaaagtatataattttgcccaccatctcaggaatagaacataaagtatttgtcggaccctttgcgcgatgctttcccacagcacagatatttgtagcaccagaacaatggagttttcccgtaaatttacctttaagttggttgggtttaccatcaaaccggacgcagatattacccgcagatagtagtcaagtaccgtttgctgatgagtttgattatgagatattgggacccattgatttgggtcctgggaagtttgcagaggtggcatttttccacaggcgatcgcacaatctcttgctcacagataccatagtttccgtacccgcagaaccaccagcaatagttcaacttgatccctatccgttgctgtaccacgccaaagatcaagcatacaatatcatagccgatacagcagaaaaccgccgcaaagggtggcaacgtattacattatttgccttttacttccgtcccagcgtagtggatgtacccaagtggaaagatgtatttagagatgcctggaaagcaccagaacgcagcctaaaaacatattttggctttttccccttccaatggcgaaaagactgggaaaggtcttatgaagcattaagaggagatgggcggatatttgtggcaccggttttacagagtttaatattaaatcgcgaaccccaggaaacaataaattgggctgataaagtggcacaatgggattttcaatggataattccctgtcattttgatgcacctattaaagcggaaccacaacaatttagaaaagcattttcatttttagaaaaatatcccagtgggggtttagtgaatagtaatagttatcctttaccggaggatgattttcaggttttgcgagatattgatcagggtttgaataggtttaaaattgtgccacctgcgagggagaaggtgtaggatgtcccctgacaaattaatacattctattttggagaggtctaatttaatcagattcggtttcactactaggtaaaagcagacgaatagcgaggatcgcaaaccccacagcagcgatcgcctttaaaattcttgtaggaaataactctgcaactgcacccccagctaatgctcctagtaaactggttaatactaaagcacctgctgtaccaaaaaatatagctttgcgtgattgaccttgaccagaaagagcgatcgccgctaactgacttttatctcccaactcagagagaaacactgtaataaagcttagtcctaaaagattccaatccataattttctctataacaaccaacaactgaaaattaaccaacaaacacatcccaaaacaacattacagaaatcaacagcaacattacccctgctgatttttccacagttttcggactcagtttactcgcaataaaaccaccaagcagcacacctaataaactggtagtaactaaagcagttcccgaacccagaaacactaaccaaggtgcatgagattccgcactcattaacaacgttgataattgggttttatcaccaatttccgctaaaaatatggtaatgaaggtagttcccaacaccatccatactgattgctgttttttgtttgcaggttgagcagtattttctggtactggtgactgggtttcaggttcggtaatggctacaggtcgagtgtcaactttcacgggtgttagtcttttcactaagtggttttcatattcttttcattttctcataatgttgtcataaatggcaactattctgagaaaaaagttaaaatcagaaaccgacagcttgatcaaaccggatcatttccaaactgcgatcgccataaatactttcaatctgctgatgacaacaatcaatcgcaaaatcatttagttcttctgcttcaataccaaacatatcctgaaaagtatcaacttggacccgacaaaaacgcggacgatcagcataaatagtacattctcgcgtttcgtggtcaaaattcacacaccaaccatcctcacctaccatactgagataaagtcccagttcctctggtgaaagatactcttctaagtctgggcgttctgtaggatcaagatgacagcacgcaccacattgttttatacattgccaggtagccataatatacctctaggagtaggtgacaggtgataggtgacaggtgacagtagggaacagggaaatggggaggtgggggaagattaataccccagtccccagtcaccagtccccagtcaccaattccctgtttacatttttatgtactttcctataattttgttaagtaacttaaaacttgctgcccctatccagatatgatctaatgcgggctttgcatttaagttattgaattttttaaaaccgtttggaggaaaaatggaagctttagccaatattaattgggaagttgtgtttcaattaacctgtgtagcattaattgtacttgcaggaccagcagtaatttttgtactcgcgtttcgcaacggcgacctataatttaggtcatgggtaatgggtaatgggtaattggtaatggataatgggtaattggtaatgggtaattgggaaaagctctttcctatcaccagtcaccagtcaccagtcaccagtcacctattccctaccaaagcctgcatcgcagcttgaataataccatcatattggggtaaagataaatcaacctgtttagcatcttcacgacttaaccctaacagacctattttattctcaggctgcatgactaataccttaccttcactatttttaattcttaattctgcacctgcaccattttgataaataccacaggtgtattgacgctgtttgtattcaaactttgtcggtttagaaatttttgatgtagtaaataatttttccacctgttgcgggagtctcaccccaactaattccagttctatattagtattaccattaaagctattttcccggagtttataagcaatatcaactcgtgatggtaggggaaaataatcacaccaacgccaagcgatcgctttaatttcataccttttattatcaatagtttgcgctaaggttaatttaatgtgacctttaccaactatttgctgttcaatcacttgtgcgttagcagtccaaaacaccggatcagggttttcaataccgcaaggatgaagaatatttaactgttggaataaatcttgattgatttgatagagatttgcttgagcatcaatttttagcaaagggttgagatgttgaatttctaaatatttatttgcaaactcagttaaacgtaatctaaaatctgctaaattatctgctggtaaagaaaaaccacctgcggctttatgtcccccgtatttaccgagtaaatcacgactatcttctaaagcttcaaaaacgttaaattcaggtattccccttgcagaaccacgaattacaccttcaccttcaaaagtaccaataaaaaccggaactccgtaacgttcaaccaaacgagaagcaacaataccaattacaccatgatgccaattttccttaataactactaaaacccgatctttatgtaaatattctacatataaatcttccactaatgatattgcttcctgttcaatttcctcacacattttttgacgttcagaattgacttgttcacactgcatcgccctttctagagcaattcccatatcatcagtagtcagcaattctatcacagtttgtgggttgccaattctgccaatggcgttaattcttggacccaaacgaaacccaatatcatcaggttttaaagattttgaattttggattttggatttcagatcagattttgaattactttctgtttctccttcactagcttgaactccagaaacttgaattaaagcttgaacacctggtaaagtagacttagataataactttaaaccacgttttacccaacgacgatttacaccagttaaaggagctaaatcagcaatagttcctaatgtaaataaagctaacatggggtgaactaaaccttttaattctcccatttgttgagctaaggacacagctaaaatataagctacacccacaccagcaacaccccgataaggagaagattcatctattaactttgggttgagaatagcattagctggtggtaattctttgggaagatcatgatgatctgtaataatcacttttaaacctaattctcttcctctagcaataggttcaaaagctgcaataccattatctaccgtgagaattaaaccaacaccttcactgttaaattcttcaacaatacgtttattaattccataaccttcgtgcattcgactagggatagcataatcaacatttgcacccaaagcgcggagacttcgcaataataaagcagtgctagtcatcccatctgcatcatagtcaccacagatagcaattttttcttgatttttaatagcactttctaacaattctacacttaccgctaaatcggggaaatcttccaaaggagaaggtaaatttaaactttcaggattgataaatttttctgctgcttctggtgtttccattccccgattaatcaataactgactgataataggggaaatattcgttaaactagctaattttgcagctaattctatatttgcgggcgcaatttgccaacgttggttaggtaaacgtttaatattttggtcattagtcatcggtaataggtaattggtgattgttgattggtgattaggaatattttataataaaagatgcagacaacacctaagataatatcaatagatattacataatagatattacagatgttaaaaaaagatcaatgccagtctgtaaatatctagcgtggaattgggcaaacttttaatttgatgcaaaacctatctaaattatgggtttaagctgattactgattactgatagctgaatgcttaaaaattacagaatagatttatcacaactgtaattatatctaaaattatatctaagttttttaagctaaattttataattgatgttatatccctgactgcaaaaaatcagggatattaatttttatgaatttctgatagcaaaattgaagtttaaaatacttgtaccttgccatcattgagaatataaagagagcgataaccaggaaacttattactaggacgcaattctaaacgcaaagtcccaaaatttggtttagaaacattagcatctaaagacctacccgtatcatcgcaaaacaacagagaaaaattaggttctgtagcactttccacatctacagtatattcctttccaggtgctaaagaaatacgtcgcatttctggtaattgatctaatgttaatactctaggcgtgcggttaaccacttgtacacgaagatattgaccaggtttaaattgcagtggttttggaccgcaattagaagcacaagttccagctaatgtaacatgagaattattgcttggtgttaataataaagcagtagcaatcaaagtagatgatattaacttgaacataatacactcctgaaataattatgtaaatttaatttttatattttattgttggttgtggggttgcagatggagttgatggactaatggtcgattgtggttctcgttggattttcaaccaatatcccagcaaaccagctcctaaaagcacacctaaaataattagtaattgtagtataagtttaggtttgggagtttgtgaagtttgtgaagtttgtgagttttgtggaggttgtgaattttgtggaggtactctagaaggtacttgtggtttttgtaaagctagtaaaactgcgttagctgattgataacgatcttgatattctaattgtaataacttatctagaatttgccctaactccaaactaacagattgctgtaaatgcttaggccattctttcacccaactataaccttgggttttccataaattccaaggatgaaccccactcattaaatgaaaacaacttacacctaaactaaataaatcactagcaggataaacttgtctatcttccatttgttccaaagacgcataaccaaaacttccaattaccgtacctggacgcattgttccctgaagttgtttagatgcaccaaaatcaatcaagaataatttcccgtcattctgacgacgcataatattttctggtttaatatctcgatgaatgatattttgactatgaactattttgagaactggtaatagatcaagtaataattcgcgaatttttttatcgttaaaatttcctttgtttgctaactcaattaataaattctctccatcaataaattcttgaattaaatacagacagtcattttcatcaaaatatgcttgtagttgaggaatttggggatgtttgaggtctttgagtcgccttgcttcttctgcaaatagttccttggctttatttaatgcgtaggtattttgagtttggggtgcaaattgcttaattacgcacttttcgtttaatttgtcaatatcttccgctagataagttttcccaaaacccccaccacccaagggtttaatgggacgataatggtttctcaggatggttaaaggaacaccacagttaggacaaaatttggttgtgttggtaactggaggattatggcaatctggatttagacaacatatctgagacatgggtgagttttggtagatacgttgagttctatacaagcatataccaatttattccttccagtctctgactggaaatactgttaaaaaccctaaaatctagaaaatcctatcccgcaactccttcactcttgtaaatcctgatctggctacgccacgctatcagacatcatttctataataggattgatcaggtgttatggggttttagcagcatgacaatagcagaaaaactagaacagttaaaagccttatttgcggaaatggatcaggcattaatagcctattccgggggagttgatagtacattagttgctaagattgcattcgatgtgttaggcgatcgcgctttagctgtaacagcagtttctccttccctactaccagaagaattagcagacgcaacagcacaagcagcaactattgggatagcccataaaatcgttcatacccacgaaatggaaaatcccaactacacatcaaacccagttaaccgctgctatttttgcaaaagtgaattgcacgacacactcaagcccctagctttagagttaggatatccttatgtggtagatggagtcaacgccgatgatttacatgattatcgtcctggaatccaagccgcaaaagaacgaggtgcgcgatcgcctttagcagaaataagtgtcacaaaagccgaagttcgtcaactttcccaacaactcggcctaccttggtgggataaacctgcccaaccatgtttaagctctcgctttccctacggtgaagaaattaccatagccaaattacagcgagttggtagagcagaaatttatctcagaaatttaggatgggataacctacgggtacgttccgaaggagacacagccagaattgaactaccaccagaaaaaatagcagattttgtcttaaaaacagatttacctacccttgttagcacatttcaaaatctaggatttatttacgtcactttagatttagaaggttatcgcagtggtaaattaaaccaagttttacaacaaattccagctacataaaatcaacaattgattgactgctatataaaacctagacaaaactagactttactttctacttcaacgggagcatgggagcagttatccctcagtagactttcacgccttagccagacgcaattgtgttccaattaagtttctgaaaaagactaccaccatcattgcttggttttcgcgtcggcaatagtctcaattcaatacttgatatcaccgtattatatatcaagtagttgattttttcctaaaaatatattgatttttgtcaatacaagtatagttttgtctatgaaattgtcaacttaggacttgctcttactattctcttcctactgtcaccaatcaccagtcaccaatcacctgcctcacaatcgttgagcgactatatactctatcttttgcagggcagactgccatacactatatcctgcgggtgacaaatgtaaaccatctgtggtcaattcaggacgtaaactaccatcaaaatctgtaaaccaattgtgaatatttaaataattagccccctcttgacgagcaattaaggcaatttgggcattgatatgacgaatacgactattggctatttgagggcggcgaataggcaaaatcgactgcaccataatttgacttttggggtgagtttgccgcaaactgcgaataattcgccgatgattgagtaaaatcgtctgctcactagcacccttgagcaaatcattaatcccaaccatcatataaataacttctggccgtgtctgggaaaaggctgataatctcctcaaaactccagcggaactatctccagatatgccttgattcaaccacaacttaccagcaggtaatttttctttaggaaaccacatactcaaagaatcacccaccaagatactcaagcgatttgtaccttgaccttgggaaattgctctcgcttccatcgctaataagcttttccaatcttgataactgactttctcttttttctctgacttccaatatgactgtaaatcttcatcatctacacgagtgtaaatttgcccagttttcagggaagctaatcttaaatagtacatttgactcccagatacaggagtccgcttagttttttgagaactcaagtttaaagatgtttttatcggtgctgctgaaaagttgtttgctaactcccctgacaaaatttccaccctggggctaattttctcaactcgtaccggggaagtctctgatgctgatacagcttggctactaaattctggcaaggagttacttttctggcgtactgctaactgtgaactccctggtttggatatagcttgattactgaattccggtaaagaaatgtcaacttgataagtgactttttcatctactcctggtaatcgtgaacttggatttaaatcctccaaaaatccagtattttcaggtgggagactcgacatctttgggagagccgatgttggtactgccaatcctgttaacaagcctgctgccaacagataaggttccttcatcgttgtttctttccttgtaaggactcactgcttttgcttatgacagccatatttggctgaattcaggaaaattctactttccttacgcggtatcaagatcccccatgagaatgtagtttacaacatataagtataaaaaatcacagattacaaaatgttaaaaaaatattgttaaattttattctatatacaataacgtcgtttaaagtgctaagatttatgcgaagtcattaatgtttccttttatttccgtggctagagctagtaccgcaattggcgtaagtccaatcatcaaagaaagagtgcaaacacaggcacattccacacgtttgaccttaaaagaggttattctcatggggatgatggcaattgataagctagacgatcaaggtcgtcaagagttagctgataaagtgcataaaatgcaagtagacggcgaaatatgaatctatattgagaagtctaaactctaaagtctttagtgcagcataattgactgttttgaggacaatagaacaaccacgactgatcaaaaattgattcttagccaagtcaaaagcaaattctcccgtccatcaacctcattcaattccaaagatacccagtggtgttgttgagtcatatcaacaaaacccgttcttttggaaaaagcgaaggggtctaaaaatagatccccttcatcggttaacaacttaataaagaactcagcgaaactctgaggataaccaactggattgattttaattaccgctggtttacaaacaaaaagtaaatcagcactaccaaatccaaattgacaatttatagcaaattcggctagattgccctttggtttggttatcctttgattatttccctgatatcttgtgtccatcgggacgaatatcggttttatagcactttttgagtcaatttcatgtactctcgctataaagcgataaaatacaccaacatcttatgttgagtacgggggtttctagatccccgaatcaaaatttttttacaatagatatagatatagtttttcgtggtgatagttgatagttgatagttgacagttaacagttggtggttgacagttggtggttgagagttgatagggaatcataaaattgattacccaatcaccaatcatcaatcaccagtcaccagtccccagtccctaatatcgactgaaaaccaaaaatcctacctgaaataacccgacaacaaaacctaaaataccgcctaaagtcacaattgcctgtaattcattcttgacaattccttcaattgctgcttctaaatcagcaggtgaagttgattttactcggtcaacaatcacttgatctatagataaaatgggaattacctgggcgacaattgcttctaaatctttttctaaatacttttctaaaattaaagctaactcttgagacactacttctaaggaagtattaaccactggtgaatttcgcaaacgatttaacagcaagacagcaatattttcccagtccgctgattcagttaattcttgtaacaaattgctaccactcttttgtaagtaatggcgtacactttccctagtggtttttctgagttgacgaactgtaccaacgggtaaattttgtaaagataaatcttggaataattttttgaggcgatcgcgcatttgcaaatcttggattaattcttctaatcgtttatttgtagcctctttttcatctaaacaaaaagtccttaaccgggtcagagtattacgtaaaccaaataaattagcgactacccaataagtaccgctggttttttcacgaaagctatcatcaatagtttgaatagtcctatctgttaaaaaatcaactattgcctgtcttaaaacatccgatggtaaaacaacttgcaacaaccaatcagctaaccgtgtagattgttcttcactgagttgaaattccagtaatacctggtcaaaaatttggttgatttgcgcttctaaaaaattttcctgtctggccaaaaccttcaggagacggggtaaagactctcccagcaaatcccgtaaaattcccgccacaattttggcacttttctggtttttatcaccttgaatttgctccagcgccaacttcaataaccagagaatcgcaccttgtacccgttctgtttgtaagagacgcttcgccagcttttgcaattcttctggcgttaacagcgatcccataatggtattagaaatattttttgccaaccgctcctgattgcggggaatcaacccaggagtaaaaggcactctgcgccccagaatataaatagctcgataggggcgaaatagcattttgatggctatatcattggtgaaatagccgataattccacccagaattgggggtgatacataaagccaaagatgtgaccaatccacaggattttggattagggaaagaggacaggtgacaggtgacaggtgacaggtgacaggtgacagttatcgaggttgactgttcactgttcactgtttcctgactcccaactagcaacttaacattagttagtaattacaaattatcaattatcaattatcaattatcaattaccaacactcccatcataccgttagaaatggggtaatgtgtggcgttgacaaaacctactttttgtgatagggctacttgctctttaccaatggggaaacggtctaaactgggactaatataagcgtattcttctttaacacctaaattagttgccaggggaacgaccaggttatctaaataccactgctgaaaagcgcggaatgtttcgttgttagggcgatgaaaatctaaaattgctgcttttccaccaggtttgagaacgcgatatatttcttggagactgcggggaatatctttcacgtttcttaaaccatagcccatggtgatggcatcaaattgatggtcgtcaaagggtaaattaagaacatcagcttctatccaagtgataggaggttgggggtaatggctttggcaacgttctttggcagttgtgagtaagttacaggaaaagtctacaccataaacttttcccgtcattcctgcgcgtcgtgccaatctaaaggttaaatcaccactaccacagcataaatctaaacaggtatctccgggtttagctccactccatttaacggtcatttctttccatatccggtgttgtcccaaacttaaccaatcgtttaattgatcataaactggggcaatacggtcaaaaatgttacgaatttcgttgtttatgggtgcttggtagttggtcatccgattttagattttagattttagattttggattcataaaagacttttgttgctgtcaccagtccccaatcaccagtccccagtcaccagtcacctgctgcaactactagaaagagcgatcgccactaattgcactgacagatgaatgaggttaagttcatcttcccttaaattacaaggtttttgccactggagcgataatactcctaacatctgctgaggataaataattgggataattaaatgtgcttggactccagcagcttggtaatgagtaagagtattgagattagggtctttagggatatttaaacaagattggatttgagcagtggcgatcgctgctttggcgagtggatcttcacagagccaattttcaactcctcctgtcacactgtaagctccctgggttgctaccagagtattttcttctataagttgtacaatacaaccatcagcagcaaaagtttcactaaaggctttagcaatggaagttaaaatttcctctatgctagaagcagcttgggtgacttccaccagcacagtcaacaactgcatttgtgcattagcgcgacgcagttcttctgttcgatgtttcagtaaatcataagttgctgctgctctttggactacttccttgagttctccagagtcccaaggtttggtaatgtatttgaaaacttgaccactattaattgcttctacaaggtcttcaatatctgtaaacccagtgaggataattctcacggtatcgggaaattgtggtaaagtccggctcagaaattcagttcctttcatttctggcattcgctgatcggagataatgactgctacttctccttcttgttcgagcaattgcaaagcatttacaccactgtcagctttgaggacgttaaaatcacgacgaaaggtacgataaagtagatccagattatctggttcatcatccactaccaggattttgagtttttttgcacgttcacgactactgaattgagagcgcacttgctcaatttcgagatttgtgttatccataaatttctttatatgttcttcacaattttgttatattccatacacagcagagttgaaaatcctgatttttagcaattcaacatcaaccaagctgtgaaacaaacaacctcaatttaaaatccaaaatccataatctaaaattcgcacatttaagggataattaagagcttaattactaatcaccatattaaattgaagtttgctcttccgattatgactgaactaccatccaacacaccagatacagggaatgctgctaatgatacagcacaagaattattagtaaaattgagacaaaaacaaggtaactgggtggaatggggagtagcgatcgcctacctccaaaaaaacggttacaatccccaagaaatctttgagtccactggatttgagccaatccaacaaaatcaggtgattgttggcgctcaagtttacagttctttagaaaagtttggtgcatcggaagcaacacgggcatactacggtacaagagctagtgatattctttatgaactgcgcttactgactcaagaagaccgagccgcagcggctgatttgatttttttacataaacttgatgtagacgaagcgcgggaagttgctaaagcaatcaaagatttttctcgcttttctaccccaccacaaggttttacgaacgatccaggggatgcagtcgcttatcaagcttggaaattagccagacagaactcggatttacaagagcgatcgcgcttaattgctaagggtttgcgttttgttcactcgcccacagctaggaaacaaatcgaacaactattaactgattttaccgtagttccccaacgtcccgcccccattctaccctttttccggttagagtcagatgaagaactaccccggcttgtacctgtagtgggtgaattaccattgacaccacaagctgtaaaagctgtaccaatagttacagaaattgaaccatttaaaattgtcaaattcgcaggggaacaagcttgggtagcattacctggttggcaagttttacgatctgcggaagatccagtagtcattattgctagtagcgatattttccctaacccaaatcaaacgaaaatagaacctgttttagttgtgatagatcgcaatcaaagagattgggatgcttctagttattttgcctttgataattctggagaagttgattttcaatggtttgaaactgcaccagaaaatactttgttaggtaaagttattatcattttacgtcctaagaaagttctcgatgaagaatttaccaaagatgcttggcaaattgatgagtaaaaattgataattgataattggggactggggaatggtgattggtgattggtgattgggtaatcaattttatgattccctatcaactatcaactatcaactatcaccaattatgaactataaattatgaattatgaattacatatcatctatcaaccaattaagagaaaagattaacaaaattcatgaaagtttgcgatctggacaaacacaaatggcagactgggaaacaggacctttagctgtatctgctgttccgggtgctggtaagtctacggggatggccgctgctgctgcaattgctatagcacgtcaatataagcattgtgtgaataatgatcaaaattatcgccgtcagttggtagttgttacttttacccgttctgctgctgctaacctaaaattaaaaatccgcgacaagttaaaagaattatccttaccacaaactggctttgttgtttataccctacacggtttagccttaaatattgccagtcgtcatcctgagttatcaggtttacagttagatgaagtcaaattaattactcctaatcaaagtcatcgctttattagactagcagtggaacaatggataaataaccatcctgccctatatcgccgcttgttagaaggtcagcaatttgacggagaagaaacagaaaaattgcgtcgtcagtcagtgctgagaacggaagtattaccagatttagcttataccgtgattcatgaagctaaaagctcgggaatattaccggaaaaactttatttatggagtgaaaaaagtcaagattcttatcaaattttacgtattgctgcgggactgtatgaacaatatcaaaaaatcatgaaattacaggatttcattgactatgatgatatgattttaggagcattacaggtattacaaaataagagcgccttacaggttgaaaaaaataaaattttcgcagtttttgaagatgaatcccaagattctagtcaactacaaacgcaacttttagaaatattggcaagtgaggaagatgaaactggagataaaaataatgtaaataaatcaacattgaatttagttagagttggtgatcctaaccaagcgattaattcaacttttacccctgctgatccgatttattttcgtgaattttgtcagacttgtaatattgataaacgactagcaacaatgaatcaagcagggcgtagtagcagaattattattgatgctgctaattttgctttagaatgggtaaatagtcattggttagccacaaataaaaacagacaaacaccatttttagatcaaaaaattgaggctgttaattttgatgatcctcaaccagatgcgaatcccgcaccagtgggaaaagggttagaattatatagtcctcgtgacatttatcatacagttgagttaatttctcagagagttgtagagttatttaatgaaaattcccaagctcgtgcggcggtattagtgcgagaaaatcgccaaggtagatggttagcagcagctttagaaccgatatgtaaagaacataaaattaaactttatgatgtgggagaacaagaaaggcgttctcatgtacctcaagagattttatcattattgcaattttgcgatcgcccccattctcctgattatttaaaagctaccttagatgttttagtacaacgtcaattaattcccacccaagatattaacacccttgctattttaccagaagaatttttatatcctggaccattagcaactccccaaacagaaacagtacaaaaagctgctcatttatgtcgaagtttacttcgcgctcgtttagaattaccactttatcaaatcatttcttttttagctttaacattaaaatatgatcaagcagaattagccacagcagacaaacttgcagaacgagtaaacctgcaaatgtttggtaataattcaatgggtgcaatgctttctgctttaagtgaaattgtcaattctgaacgatttgagccagtagatacagacaatttagaagaacaatataccaaaaaaggacaactaacaattatcactatgcacaaagccaaagggctagactgggattatgtatttttgccttttttacatgaaaatttaattcctggaagtttttgggttcttccccaaagtcaatttttaggtgattttacattatcagaagtagcacgcgcccaaattcgtgcagcactccatcacaaaggagaaaatatatcccaaataccatctcaaatacctcatgttagtcaagcttgggaagatgcaaaatatctgaaaatggcggaagaatatcgtttactttatgtggctatgactagggctaaaaagttgttatggatgtctgcggctcaacaagcaccctttacatggagtaaaccgaataatttacaagcttctgcaccttgtcctgtatttgcagctttaaaacgtcagttttctgaaaatgtgatgaatttagctgtattaactgcgggaaactaaacatttgtaaccaaccactccaggcacagagtacacagagaaaagaaaaaatgttaactgcactgggtgggaatatggggaacaaaattaaactaaaaatagtaaataacttggtatatcttgtcaataattaggtagcaaacacattatgttactttctcatctaaagaataacggtaagttatcgaaagcaattgttttaactttggctttaagcagtctgctggcctgtggagttgatattagtaataatcatacatctggagctattcctagcggagaacaaatacaaatagcccaaaatacgttacctagaaatatttctgaggcggtgttaagagatgcttctgtgcgttctagggtacaagtatctgatttgaaaatttctcaggtgactcagactacttttagtaaccgttgtatttttgagtttaaaaagggttgcactaaagaatataaaccaattcagggttgggttgtagttgtgcaggtaaaagagcaatcttggacttatcatgttagtcaatcttcgcaaattgtgattgagccaaatattaatttttttaatgcttctcaattgccaaggaatattgctagtaaggttttaaatgatgtggctaatcgttctggtgtaaacagaaattctctgagcatttatagttccacatctaaaatttttagtaattcttgtgtgtttaattttggtgaagtctgtgctgaaatttatcaacctgtagaaggttgggttgtagttgtgaaggtaaaagaagagtcttggacttatcatgtcaataagtctggttcgcaaattgtcattgatcagaaaattaaagctaatgagggttctccactaccagaaaaaattgcggaaaaagttttgaatgatgcttatcaacgttctcggttacaaactataggtatcaggattactcgtactgtgcaaaaaacttttagtaattcctgtgtgtttaattttggtgaaatctgtactcaacaatatgatcctgttgagggttgggcagtggttctcaaagtgaacaatcaattttggacttatcatgtagatcgtacaggttcacgcattgttttagatcccaaggtgataggtgacaggggactggtgacaggtgataggtgacaggggactggtgacaggggactggtgacaggtgacaggtgactggtgactggtgactggtgactggtgactgggtaggagttttcccaattcccaattccctgttccctctgataactgctgtaattattgacaaatgttggttaatttgagttttattggtatataattgtagattgtgttgattccaagccatcccatgcctaaactcaagactcgcaaggcagcagcgaaaagattccgcgccactggtagcggtaaaatcgtgcgccgtaaacctttcaaaaatcacttgttagagcataagtcctctagcaaaaagaacaatttgtctaaaatggcagttgttcatgaacgcgacgaagaaaacgtgcgtttaatgcttccttatttgtaaatccttcaggtactgtaaaaaatgactcgtgtaaaacgcggtaatgtcgctcgtaaacgccgcaataaaattctcaaattagctaagggttttcgtggttctcactctactctgtttagaaccgctaaccaacaggtgatgaaggcgcttcgcagtgcgtaccgcgatcgcaaaaagaaaaagcgcgattttcgtcgtctgtggatcacccgtattaatgcggcttctagacaacatggtttgagctatagccagttaattggtaatctgaaaaaagctaatgttgacctaaaccgtaaaatgttggcacagttggcagttcttgatcctgcaagcttcgctaaagtggctgaactggcaaactctgccaaaggataaaggtggcaacggatgaataacggatgtaacagataaattctgctgaaaattcaaaattaaacagaattaaacaaaattaaacgttttgtgaaaagttgttaaacgttttgaaaagttaatagcagtgtttcgtaaaaaagccaaggtcaattatgaatcagttacatctggtattatccgctacctttatgatcatttgttgcctgttctatggggagatagatttggttgcttctgcggcgactatggcagaaattcagcaacgaggctatttaactgtggcggttaaggataacatccgtcctttgggatttagagataaaaagggcaatttacaagggttagagattgatttagccaagcgtttggctagtgatttgttaggtaaaccggatgcggtgaaattgcaacctgtagctaatagcgatcgcttacctgctgtttttgatcatcaagttgatatggcgatcgccagagttaccgccactgaatcacgctcccgcatagttagcttcagtgttccttactattatgatggtacagcaatagttacaaaaaataccgctatcaaaaaacttcaggatttagcaaaacgtaaaattgctgtactcaatcactccagcactatctcatacataaaatactttatacctaatgctgaattagtcggtgttaattcctacgcccagggaagagagcagatagaaagcggtaaagtggatgctttggcggctgatgtcagcgttttaagtggttgggtacaagaatatccccaatatcaaatattgccaaccaaactatcaacagaaccattatctgtagtcatgcccaaaggattgcagtacgatgaattaaggcgaggaataaatgaagcgatcgctcgttacacaaccacaggttggctcaaagaacgaacaaactattggagactagaataattgataattgataattgataattgataagggagaaatttttattgttaattcttaatttatttattttctcattttcccagaaagttgataatagatagagaaagcaagtttaatatttgtatttgcaaccaatggataacaatctagtaatcatttatctttcagttttcgtcgggttgctcctatttgcgggagtgagtgtttttcgtcagattttcaaaactcgtaaacttgaaaattctctttctcagttgaaaaccaaattgacaaaagaaaaaggtactgcacaagaatattacgaattagctagtatttattctgaaaaaaaagtttttacccaggcaatacccctatttcaaaaagctatcaaagccgccgaagaagagggagaagaagatatagccccagtttacaatggtttgggatatgtttatttttcccaagaacaatatgacttagcaattcggcagtacaaagaagctctgaaattgaaacctgattatgtaacagccttaaataatcttggccacgcttacgagaagaaaaaattaatggctcaagcattggaaatgtatgaagcagcactaaaattttcacccaataacgccatagctaaacgtcgtgccgaatctttgcggagattagtttctgcataatatgacaggtgacaggtgacgggtgacaggtgacaggtgatatatttctgtaggggtttagcattgctaaacccttactatgtatgatttttttattgctttttaatattaattacactgtttttcagtaagagttttgaaatcaatagatattcactaactctacttagggtttgctgaataaacctaaaaccttgatatatcaaaggttagaggctgataaacacagaaattagtgcaagggttttgaagggtataccggaaaaagtgtgcattttttgggatttcaagagatggcaaagaaattttcaaatctcctcctgactcctgactcctgactcctgactcctatgccctcacggaaagactttctcagcaacccctacttagttatcaaacagtatgtttttcaatctccatcattttcggctatttacagaaacaacttatacctactaccaaaagattttaaaattggcgatcgccctaagcatcttaattttgaccaatttgttatttcctaatattacatttgctcaagaattaaatcaaaaatcatttattacccatcccctcaaccccttaacagaaacagaaattaccacagcagtggaagtattaaaacgggaaaaacgattaagcgaaaaagcatttttttccatgattacattacaagaaccagataaaaaacaagtcttgaattttcaacctgggcaaaaatttacccgccgtgtttttttgcaagtttatgacagggaacacaataaaacttttacagcaacagttgatttaataaccaaaaccttaactaactgggaagaaatacctcatgttcaacctgcaattttacccgcagatgatcaaatagccagagaagttgtgaaatctgatccgcgctggcaacaagcaatggaaaaacgaggaattaaagattttaaccaaatacaaataagttgttggggagcagggatattaactccatcagaagcaaaaaatggtcatagaatttgccgtgccttatcctattatcaaggtaaacattggaattatttctcacgccccatcgaaggtgttttagtcactgttgatttaaataaagaagaagtttctagttttgtagatcatggtgtagttcctatttcccaagaaaactgggactatgatattaaagctttcaataaattaacaccaccacctaaacctttaaaaatcattcaaccagaaggtacaacattcaaaattcaaggtaatgaaattacttggcaaggttggcaatttcgttatttaatgcacccccgtgaaggcttggttttgtatcttgttaaatataacgatggcgaaaaaatcagacctgttttatatcgtggaagtctttcagaaatggcagttccttacggtgatccaaatccaaattggtcatttcgtaacgcctttgatgtgggagaatacaatattggtttattagcaaatcaactaaaattaggtcaagaaattcctgaaaatggagttttattaaatgccacttttgctaatggtgaaggtgaaccttatactatgccgggagtcataggtatttatgaaagagataacggcgtactttggaaacattttgattttaacagtcaaaaaaattatgtccgtcgtaatcgtgaattagtcatgaaaatgattacaacagttgacaattatgattatactttaaattggatatttcaccaagatggaactttagaaatagaaaatgaattatcgggaattgtgttagctcaaggcacatctgacgaaaaacaatctagcaattatttgggaagattattagctaaaaatatctttggtgtcaatcatcagcactttttcaattatcgcttagatttagatgttgatgggcaaaataataatgttatggaaatgaatgttaatgctttacctatcagtgaacaaaatcctttaggaaatgccattacagttgaagatacattattaaaaaccgaaacagaagcagtgcgtgatgcagatattaaacatagtcgagaatggatgattaccagtgcagataaaaagaatcatttaggggttgcacctgcatatatattaataccaggagcaaatacaattttgtatgcagtagaaggtgcaaaaatacgaaaaaaagctggttttgcaactcatcatttttgggtaacaaaatataaaaccgatgaaatgtatgcaggtggtgattatccaaatcaaacatcactcggagaaggtttaccgaaatatattgctgataatgaatctttggaaaatgaagatattgttgtgtggtacacaatgggtatgactcatgttcctcgtccagaagattggcctgtaatgccacgacatcaagtaagttttaaactgatgccaaggggattttttaaaagaaatccagcgattaatttaggtgaataaatcatttcatctcgatctattttctcgttacctgtctctgacaagtaatgaaatatatgaggttctgcctcaatagacatttgatgaaaatgaatgtaaggacaattcatgaattgtccctacaagggtttcaggctacacatatttaaattcggtcgatgtctaatagacaaatcgctagagaaattatttgatctgtaaacttgcaatgtgagtgttaattagcctacgatatatcaaacacgcgcagttttgaaaacaggatagctaaaaactaatgaactttccagatattaatattcccggtgatggacaacttcacgcccgcttaaccacttccttgggtgaaattgtggttaaattggaggaagatagaacccccaatactgttaaaaattttgtcggtttagctaccggaaacattgactggaaagatcctaaaaccggtgcatctatgcttggtactcccgcttatgatggcgttcgctttcaccgtgtcattcccgattttatgattcaatgcggtgatcctttaagtcgttatcctgatatgtctcatcgttggggtactggtggaccaggatatagatttgaggatgagtttcatcctgaattgaagcatgatgaaccaggtattttgtcaatggctaatgcaggacctggaactaatggttctcaatggtttattacagaaggaccaacacctcatcttgacaaaagacacagtgtttttggtcaagtagttgaaggtatggatatcgtcaatagaatcgctaatgtacctacaaaacgcgatcgccctaatcaagatgtggtgttagaaaaagtggaaattttccgcaagtaattaagtaattttttcagatccttgacttgtttaatcaagttggggtctgataacttaaatcatttatctaatcatttatctaatcatttatctaatcatttatctatgtatgaaaaatgatcagtcatattacaattataacagatatcatcggggtaaatttatctgcaaaattgaacttaattcaaagaagtgaattaggtcaatttctcactcctgctacagttgccaaatttatggcaggacaatttaataatttatcgggtcatattagtttacttgatcctggtgctggtgtggggactttaactgctgcgtttgtagaacaactgttgctaaattcccatcaggttgaaagttgttttctcacagcttatgaaatagagtcaacatttatatcatccttagaaaaatgtctgatagaatgttgtcgagctttagaaaacaaaggaattaaagctgattatagtgtaaaacaggaaagctttattaatagtctaacagcaaataatttaccgctttttaataatgcttctcaaaattttacccatgcaattatcaatccaccatacaaaaaaatcaacagtcaatcaattgaaaggaaacaattatcaaaactaggaattgaaacagtaaatttatatagtgcatttgtttggctgacaatgttacagcttgcagaacatggtgaaatggtagcaatcacccccagaagtttctgtaatggtgcttatttccgcccatttcgtcaagcgtttttacagaaaatgtcactgcaaaaaattcatgtttttgatagtcgtgatttagtattttccgaggatgatgttattcaagaaaatattattcttcatgctattaaaacagaatatcaagataattatattcaaatcagcattaattcagaaatagaactagatcaagtttccgaaattagacttgttccatatcatcaaattatagaaaaagataatcctgagaattttatccatattattactaactatttagaagatactttaaaagtgcaaatggataaatttccatctaccttagaagaattaggtctagaaatatccacgggtccagttgtagattttcgtctcaaatcagctttgagaaattttttaaatgatcaaacagttcccctaatttatccagaatctattaaaccaggaaaagttctatttcctccccaaaatccaaaaaaatcaattgctattgttcacactcaagaaacacaaaaatggttgattccccaaggttgttatgttttaactaaaaggttttctgctaaagaagaaaaacgtcgtgttgttgctgctgtatcctaccctatagattacccagtattgggtatagagaatcatattaactactatcatgcacaaggaaagggaataaatatcaacttagcaaagggtttaacagcatttctcaattcaactttatttgatcaatactttcgactttttagcggtaacacacaagttaatgctacagacttacgcaaagttaaatatccctgtaaagatgatttaattcaactgggaaaacaaattaatgaatctggatttgatcaagataaattagatgatattgtcaataaaaatctatcaattatgagtgaaacaatcaacgcaattgcagctagtaaacgtattcaagaagcaatgaatattctgaaagaaattgctgcacccaaagaacaacaaaacgaaagatccgcattatgtttactcgcattagcagatattcgaccagaaacttcttggaatcaagcaacagcacctaaacgcagaattacagaaatgatggattggtttcgtgatttttatgggaaacaatacgcaccaaatacacgagaaacagtaagacgacaaacaatgcaccagtttgtacaaatgggtttggtggtggaaaatccagatcaaccaaaccgaccaattaatagtcctaaatggtgttatcaattacaaccaacagcactatcattaatcaaatcctataattctgaactgtgggaggaatcccgtcgtaattatgctattgctgttaaaaacttattgcagaatataaatagaaatataccacaaattcccgttactctaccagatggacaagcaatttatctatcatcagggggacaaaataatttaatcaaagacattttagaaaagttttgtcctagatttacaccaggaggtttggttctttatgtaggtgatgctggggataagtttatcattaatgaaactgcaaagtttagagaaatgggacttgatttagatcctcatggtaaaatgcctgatattgtagtttattatcaacaacaagactggctaatattaatagaagctgtaaccagtcatggacctgttaacctcaaaagacacaatgagttaaaacaacttttccagtatagtaataaagggttagtttttatgactgcttttcctagtcgtaagacaatgagtaaatatttaggagaaattgcttgggaaacagaagtgtgggtagcagatcaaccagatcatttaattcattttaatggggaaagatttcttggaccatattcataaatctgcgattttaaccatattaaagttttatataaaggcaaaaaaatcaaaataaaagtttttaaaaactttaaccattacctaatttactaacaaaatccgcgtgttcaacagactgtaacccagcttgtaaaacctgcaaaacatcagacatattacctgttaacaactcatttactgctaaccataaacctggaaatagacgactttttaaaataccattttcatcagcaactaattctaaatattcacctttttctaaacaaaaccaagttaatttttgctctaaaacttgccaaacaatatactctttcacaccattacgacgataagcttgttttttaccatgtaaatcaatagctgcactactagcagcaatttctactactaattccggcgcaccttcaatataatcatcttcactaattctagtttgtccacctgcttctggtgtaataatcaaaactgcatctggttgaggttcgttatcgaagtctaaacgcactgtaggttcaaccgctaattctacaccagaagtcatagcttcataattaaatagccaacctgttattctagcatgaggttgaccatgacttttaaaacgtaaagcagcaggcataatataaacaattccttcaattaattcagctttttttatatcacttgtactatcataacgacgctcaaattcataacgattaagtttatcaccgttagttaaaggaaaaataaaagtagaaggaaagggtagtttaaccattatttttttactggataattacaccataaatacatgataacaaaaaaacactttacatatctctaaaaactgataaaaatatttcaggacttacgcaaaagggaacgaaagtaggggtaatacccttcgggaagcaagctacatgaattacccctacgcaagaataaggttttcagtcacatcttgcgtaagtcctatatttatcaaaatatttatcaaaatattaagacttctttacttaaaccatggaaaaattttagcacttaatccccgaaatcctatctatgactacctttgagcaatgctaagatttgctaacactgagaagttaacttcacgtacttaaaaaagcttatttgttgatagctaaaagttttgcgacaatccaagttaatcatcaaataataatcaaaaactcatagttacttgagtgataaagggagaagaccgaatgaaattagcttactggatgtatgctggacctgctcacattggtactttacgggttgctagttcctttaaaaatgttcacgctattatgcacgctcctttaggagatgattattttaacgttatgcgttcgatgttatccagagaacgtgattttacaccagttacagctagtattgtagatcgtcatgttttagcgcgtggttctcaagaaaaagtagtagaaaatatcacccgcaaggatgcagaagaacacccagatttaattgttttaactcctacttgcacatcaagtattttacaagaagatttacaaaactttgtagatcgggcgcaaatggatgcaaaaggtgatgtgttgttagcagatgtcaatcattatcgcgtgaatgaactgcaagcagcagatagaactttacatcaaattgtcaaatattacattgaaaaagcgcggaaaaaagacgaattaccaacttcaaaaactgaaaatccttcagtaaatattattggtatttccaccttgggttttcataataatcatgattgcacagaactgaaaaaattaatggctgatttaggaattgaagttaatgctgtgattcctgaaggtgcttctgttcatgaattaaagaatttaccaaaagcgtggtttaacttagttccttatcgggaattggggttattaactgctaattatttacaagcagaatttggtacaccttttgtagatattaccccgatgggagtggtggaaactgctagatgtatccgcaaaattcaacaagtaattaatcaacatatttcgacttcgctcaatataaaaggtgcgaatgttgattatgaggaatttatcaatgaacagactttgtatgtatctcaagctgcttggttttcccgttctattgactgtcaaaatttaacaggtaaaaaagcagtggtttttggtgatagtacccatgctgcggctattactaaaatcttatccagagaaatgggaattcatgtagtttgggcgggtacttattgtaaatatgatgctgactggtttagagaacaggtaagcgaatattgcgatgaggttttaattaccgaagatcatggagaaattggggatgcgatcgctcgtgttgaaccatctgccattttcggaacacaaatggaacgccatgtaggtaaacgtttagatattccctgcggagtcattgcagcacctattcatgtgcaaaatttccccataggttacaaaccatttatgggttatgaaggtacaaatcaaatcactgatttaatctacaattctttcactttgggaatggaagatcacctgttagaaatctttggtggacacgatacaaaagaggtaattactaaaggaatttctgcggaatctgatttgcattggacaaaagatggtttagcagaattgaataaaattcctggttttgtgcgggggaaagtaaagcgaaatacggaaaagtttgcccgtgaacggggggttaaggatatttcggctgaagttttatatgcagctaaggaggctgtaggggcttaggtttggggttgaattaataatattaaggggtaaagattaattgatgatctttatcccttaattttgtggttaaaaaggattgacaaatactgcaagttgaaagtataatcaggttattataaaaaaatatattaactaactataatgaaccaaaaatttaatagaaaccaaaaccaagatagactaactctattagctgaacttgaccaactaggtattaagcatacccctgagaaaatcgtgcggattgccaagcaatcagatggtaagattgtctttttagaagaaggcaatgctgacgcaggacttcagcacatattggagagacattcttcagaatttgcagatcagggaatagaagcagatcaaataccagatgtaattattaaagcagttatagaaggaaagatcactagttatcaaggcagaaaaaaaactcctcgccctatttatgaagttaattttaatggcaaaacctattatatagctgtgactgtaggtgataatggatatatagttggagctaatcccagaccttcctcataacttggtaaagtgactatggcagaaaaaatcaaactcatggctgattatggatgctacccactatggtgggttagttctgataaagctggagatattaacccagaaacactgccaatcagccaaaaaaccattagccgtttagaacaatgggctgatatttatgatgaaaaattaaactggggagatcctaattcatcgggtttttctagtttagaagctaaagcagcttttgaaaacgaaggtattagtttatggaaacaactacaaaaagaacttgcacctaattataaagtggtttatttcagtgaaactttatctaaagtttttacagatatcaaagaattagcatcttctcttcctacgtatgtttaaacaaggaatgtctgtttctctatcaattgaaagtttaccagcaactcgcaaaccagccaaatttggcggaattggcaaagatcctttatgggaaatcctggattagttttatctaaagaactgacacagggattagaaacattatcaggtttccaagaatttagttctggttatatttggcaaccctataaaggagaagtttatcatacatcaatggctctccagacttaaaaccatgaaaacagccaccctatttcagtgggtagaactaaaacaagatgttcctaacagcctagtcaaagctggtaataggggggttgttttggatcatctcaatcctactaaaactcaactagaaccaggatatattttagaagtttttgcagacggtgaaactctagatgtagtttctgttcctatttcttgggttaaccctcttcctgaaacttggggaaatgttgaatatgatgcaagacaaacagcttaaattctactgacattttccatcaaaaaccgcctcagaatgatagcgtagcgtggcgtaagccatattctgaggctaataacaaaagtcgtctttagacgactataatcattttagatttacaatctttaatccgttgatgggtttctacaaaaatttccatcattaaccgtgatttttacaactaccttccccatgatggtggtgttcgtgattatttccatgagcgcaaccttgtaagtcttgctgcattaaattttcactcattgctttaaaagactcatccacgggttttaaacctatccatgcgtcaattttttcgacatcaaaacctacttctctttgctcccctacttctaataaaggacgacggatcaataggggatctctcaacatcatcattaaagcggtttctgcgtcaatgttttctgggtttacctctcctgatttgatgctaggtgcagctttgttgaaccattcaattacggggcgatcgccaaaaaatgattttaatctttcttttgtccaaggttctgttaataagctatatgctatcacttgatgacctgctgctgtgagtaatactttctgtctggtgttgtttttacaacctggtttttcatagaaaattactctggccattgttgtttctcctataggtttcaagtttgatttttggatgggaaatcattaaacgcagatgaacacagataaacgcagatgaaaaaataaatcattcatttaggattctatatttatcaaaataatgtgttatttctctttttgccactacaatttaaaaaaattagaattttttagcaatgtgattagttacataaaattcaaatcttgcttttggatcggtttcaccataaatattaaatgtaaccgtaggttcattacccacagcttgaacttgatgtattgtctcaggtgtaaaactaattaaatcaccaggttgtaaatttagttctcccactttttcaattttatcaggaaattcatctgtgggattacgtcgccaaaatgtgtttttttcctgaccttttaatattgcgactattccccaagttccatgattatgaatattagaagttgttcctggtgcaaatgtgactgtttgcactgttaagggaaaacccaattcatcgtataataataacactgatgttccggttttcggatctggttctaaaacttgactttgtaaccaataggaattaataattaatcgcctcactaacattctcagttgaggaataaaagttgatttatcctcaacttgattgagaacatcttctacttccgtaagaaagcgataaaggcgataattatcacgtaataaatcccagtctctcgcggatttacaaatttgatgttttccatctccagagataaaccaatcctgaccttgcataatttatatcgtatcaatctagagtgtaaactgtgaatatttaggtaaaaaaaccataggaggattagcttgaggatttctaatttcaggaattggaggcttttccggttgtcctggtaaaataatggtattagttgtagataatgacaaagagtgataggatattgggttgagagaaaaccaattgttcatgattagtaattttgtgatctgtaattacgaattaagaattattcgtcttcttctgggggacgggttaaaatatcgaaaagaatactagcaccaaaatcatttttattatcaataccttgaattttggtactgatttctttagcttgttctaactttcctagtttagctacaactaaaccagaagcagcataagcatttaagaataatctgatattgggttcttcttttctttgctgtaggattggttgcagttcttcccaattatgaggtaaattctctatttctttgattttagcaattattttttcggctgttgtcagtgctaaactataattatttttgtaataaaaatatctgtaagctgcaactaaaatatctgtattttctccggttttagctaaagcttgctgcatatatttggctgattcttctgtattttcccatgttttggcggctaatattaatagttctttgacttcatcagatacatcaaaccaggagaatttgtttttggtttgcataagaactcaaaaatataaattgattgtcagaatcaggattttcaggatgtgaggattttcaggattaaatttaccaattaccaattaccaattaccaattaccaattaccaattcccactctaatttattttatagcatggactagaagtaattatgtaaaattttatattatctaaatatctatatatagcgtttcccagtctcatgaggtacaccctaatttatttactgttaccaattcccaattcccaattcccaattccctaagataaaaaactctgtacctcactagcttggtaaatgctatatattgaaaaataataaataattaaacaaaatcatacattggctcaataagtaggggaaaaagaaaaaacgatcaaagtgagcaagggagacaaagcattatccaacagatttttttacttctgagtgctatacagcttggttgcagcgcccctactgactcttcctataacttttgtttcaattggacaataaacaactataatttagatactgtaatatttgatgagtaatagctataaagccacaagtgttgaatcctggaataaaactttacaatcttggcgttttacccaggtaaaacctattgtctattgagaatagagtcattaattgctcaaatttggtatcactgatactaatgcacaaattggacaatatcctcaaaatcttaacattcaacacttctgctataaagcttatctaagttaggtaaactattgtaaagttaatttttgataattaatattttttaaaatttatcaagatataaatcagtttgttaagcctttaataatagttatctcaacttgtacatttattcagtcagctaatatcgaaattgtgtaatctggaaaaaactaagctaaataattaaatagaggtctaatgactcctacaattatgcgtcagctttggtctatagttgaagctgctcaaactgtaactcttttgcagctggacgatgccagcttggtacagtggttagtcaaacagaccacaaaacaagccctattagatccccatgaaatagattttctttgtgactacatccgcgctcggctcagtcttatccgtgatcttgcttatgaacgtcaacagtcatagggtattggtaattggtgattgggaaaaataaccaatgactaataactaatgactaataactaataactaataactactgacttttttgtggtaaataaccttcaactaaacagtcagaaccgacgacacgccaattaactctttctaggggtatagcatctgtcatagaagtaaaacctaaatcacctacgggtgtaggagcatgacgaccaccaatgattttaggagcgataaaagccagaattttttggactgcattttgagcgatcgcacttgcggctaaagttcctccgcattcccataatacgctgcaaaaaccacgctcatatagataagccataacatgatctggtgtgagcaagggaaattccaccacttccacacccctgttaagcaacatctgttgaaaatctggggaactgcccactgctgttaacaccaaagtatgagcttccgccacttcccacagacgggcattttctggcaaattcaaactgcgactcatcaccacccgcaaaggattatgtccttcttgctgacgagttgttaaataaggattatcctgtctaacggtattaccaccgacaatgacagcatcacaagctgccctgagttgatgtacttcgctgcgggcatcgggatttgtgatccaagcactatgaccagaattagtagcaattttgccatccagggtcatagcatatttcaaaatgcctaaaggacgtttgtagagaatgcgatgaataaaaccttcatttagtttttgacaagcttcttcttccacccctacgactacttctattcccgcatcacgtaaacgagcaataccacctcctgctaccaaagggttaggatcgaccatccccacaactaccttagatacacctgctttgattaagccttcggaacagggaggagtgcgtccgtaatggttacagggttcgaggctgacataaatggtagcgccacgagctttttctcctgcggctcggagggcaaaaacttcggcatgaggttcacctgcacggggatgaaaaccttccccgacaatttccccatctttgacaaccaccgcccccaccaatggatttggtgaagtgcgtcccaaagcacgccgggctaattgcaaacaccgttgcatcatcagggaatcaaattcactacttaccatatttgaggacattgtgactggggaagaggtgattggggattggtgattggggactggggactggtgactggggactggggactggtgactggtgactggtgagtggggaagaaaattaaaagtcaaaagtcaaaaaatagggaacagggaacagggagcaagaaatatttattttgctcctgcctcctgcctcctgcctcctgcctcctgttccctgttttatgaattatgaattaatttcattttttgccaccaacgattgagagggtaataaagcacaggagcccatagactactaagaatagcagaagctaaggccacacgttggtaatatatccagatgtcttccgctttgcggaaacattctgtaccacagctaccacccatgaaagaaaattgcaatgccaaaatagtatttgacaccaccgccatgccaaagacgattaaagcaatagaaataaagtcttcttgaataaaacgttgcttttgaattaggctggtcagcattcctacaattcctaaactgatggcatgggacggatgaggcgctgtcaaagcatcttgcagtaaacctaaaatgatacctgccaatgcacctgcaaatatagagcgtttcacactccacgctactacccaaatcagtaaccagttaggtccaatacccaataattccatgcctgggaatcgagttggcaacatcaataaacataacagcactgagccagatgtcactgtccaatccatgacttgacgtagccagggatgccaatctgttagttggggaattaaggatttggatttgcggactggctttcttgctttcttgcttgtgctgccaggaaatccaggaattttcattggttttgctcaatttttcaggtaattggtgatcggtgattggtgatacaattttcttttccagtccccagtcacctcttagtttggttgttccggatctgtattttctggacctggatatactgttacccaatctaaatagcgtattggtgggaataattcaactttggctactgaggtggggagtttctttaaatctaaagatttgattctgcctactggtacaccagcgggaaatttcttactgtaagtagaggtagaaactaaatctccaactttgacattggggactttttcataaaactctagcactccttcgctggaagaatcacctcgtaaaactcctttagcagatgtacggctaatagtgacacctacttgacttttcagatcgctaactaataatacacggctagtattgggagtgacgctttctactaaacccactaaaccgccttctgctttgaccacaaaacctttctgaatacctgcttttgtgccactatttaaggttacttgctgccaccaatggccagcactgcgtcctattaccctggctactattgggcgttttgcaagtggttctttctctacgtatcccaataaactttgtagtttttgattttggctttctagctctactatccgggtttgcaattctaataacttggcttcacggatgcgattttcaggagtgtttcctggctgcaacgtctttaatggagtggcaatacctagatatatctccatcactagcgctccttgagtctgtcgtagtgtccaagcactaccaaagactagtgctaacaaaacgatttgtaatcccttattttcccaccaacggcgtgccgtaaacatttatgcctgtttatatttgataaattattaagatagagcagaattaagaagtcagaagtcgtaggggcgaagcattcggaaaataagctgtgagcaaaattgataattgattgcccgaatgcttcgcccttacaggaaaataagctgtgagcaaaattgataattgattgcccgaatgcttcgcccttacaggaaaataagctgtgagcaaaattgataattgattgcccgaatgcttcgcccttgcaggagtcaggagtcaggagtaagactggtgaaagtgtataggtttcaatttagattttgtacctcattgttctgtaatctgctgtataacagataggagttttaaaagctgactgctaactgctaactgctaactgctatattaaaataatggtggctatattattttatagctatagctacagaatccattatcttgttttcgcttttgcctacatattgcgagagtgtccgctgaataccctttctagctgcttgaagttttctagcacacgacctgtacccaggacaacacaacttaaaggatctgctgcaatatgagtgactatacctgtttcatgactaattaaggtatctatccctttaagtaatgcgcccccacctgctaacataattcctctgtcaataatatctgctgctagttctggtggtgtccgttctagtgtgcgtttgacagcttctataattattgacaatggttccaacatactttctcgaatttctggacctttgattgtgactgttcttggtaatccagaaagcaggtgtaaaccccggacttccatgatcgcatcgtgatcatcgtcggtaggataggcagaaccaatacgaattttgatgtcttctgctgttctttcaccaattaccaggttatgaacttttttcatatactgaataattgagtctgttaattcatctccggcaatacgtactgattcgctgatgactgttccttgtaaactgagtacagctacttctgttgtcccaccaccaatatcaatgatcatgttaccggtgggttcggctactggtaagccagcaccaatggctgctgctactggttcatcaattaagtatacttctctagctccatgagacgcggcagtcattacagcttgtctttctacccctgtaacaccgctgggaataccaatgactatccgtggtaaaatcagggacttaccttcatttactcgctggataaaactttttagcatcagttcggccgtctcaaaatcagcaatgacaccatcacgcagggggcggactgctattacattacccggtgtccgtccgagcatttttttggcatcttctcctactgctagtgctattttttcattttgatcaatggcaactactgacggttcttgtagtacaattcctttaccagatacataaactagggtgttggctgtaccgaggtcgatacccatatcccatgatgagcgaaagttacgaaaaagacccacgcgtatctatgccccctatatgcgctaatttgtgagtgttaattgataagtgtgacatttaattttcctggattttatgatctttagttgcctgactccagtaaatcagactatttttttctataatttttgtcaatgttgatggctgtagcagtcatcttattttctctcttctcatatttactgaacttaaccgtataatttgggcaataattaccagtaatttttaaatcatctgggacaattaacatatatgattgttaattacttaacatattttccaggtttttacaattggttattatgagatcaaaaattaatcagtacaatcgtactcaagtttaacagtaatttaagactaaggtaagacccatgagcattaatgttgtcactcttgttggacgtgtaggtggcgatccgaatatcaggtattttgagtcgggaaaggttaaatgtgagttaactttagcggttaatagaaaaacaaaaaatagtgatcaaccagactggtttaatttggaactgtggggaaaaactgcggaagtagcaggtaattatgtgcgtaaaggaagtttaattggggttaaaggttctttgaaatttgatagttggagcgatcgccaaacaggtgttaaccgttcaaaaccagtcatttacgtagaccaactagaattactcggttctaagcgtgatactgaggcagctatgggggatatgtctccagagaatttttaggtgcaggagtcaggagtcaggagtcaggagtcaggagtcagaataaagataaatatttcctgttccctgttccctgttccctgttccctgtttcctgttccctgttccctattccctgttccctgttcctaataactaatttgcaaagtaacagatgcttgtacttcttgttcaccgccgactatgggggtggaagcatctgcgaagtttgctttagcaatttcagcccgttgtaacattggtggtgggggcgcacttgccccattaatttgaatactcactatttcttttggttgaaaacccaaggtgtcaagaactgcatcggcttgttgttgggcatcctgggtagctttttttaatgcttgtttttgggcgttgctaatagcttcatctgtggcgacaaaactaataccattaatttgtgttgctccggttttgactgcttcatctaataatgtaccgactttatcggtgggaaagcgaaaactaacggtgttgctggctgcataacctgtaattctttggacgttgttggtataactataaactgggtttagccgcactcctgtggtttctaatttctcgacattgcggcttttaagtaaggcgactacggcagatgacttgcgggcggcttctttttgtacttcttcggctgtttttccttgcacttctacacctaaactaacttgtgataaggtggtagcaattctttctactccacttccgctaacggttaaggtgcgccataatttggctttttcttcggctgatgctggtagggcgaatatcatacatattaataaggtggaataaagaatttttcccaggttcttgatatgaagggaagaaattgataaggtatttctagacataaaatgcacactcctcaaaaaaatcaatcaattatctactgtcaacttttaacagttaacagttactaaaacatctgggagatttaactcctattgatagtttggcattgtctagatacaagttggctttggttacgttttttgtaacaaattagttagtttgttaattatttttattcaattcttttttatattcccgccactgtggtataaattgatccattaaagcttgaaatttagcgttatgggtgcgttctaacaggtgggtaatttcatgcactactacatattctaaacaatgaataggtttttttgcgagttctaaatttaaccaaatgcgtttagcttgtatattgcaagttccccattttgttctcatggtttttattccccattcgttaatatttacacctatgattttttcccatttagctattaatgggggaatttgtatttttaattgttgacgataccaattatttaagactttttgccgttgttctgtattacttcctggtttaatatataaatcaatatatgtgttatttctaatttctatttgtgcattaccaggtttttcaatcacgtttaatatatagcttttaccttgaaagtagtgattttctcctgataaatatgctattttttccggtaggttggaaaattgattattaggttgattattaggttgattattagatttattagattgattattagattgaaacttaatttgatgttttttaatccatgctaatttttcaattacaaataatcgcaaggattcatcattaatatgtaaaggtgtggcaattcttactcttccatctggaggataaactgctagatgtagatttttaatgtcttttctgacgacatctatagttaattctccgatggttatttgataggtttgcatagttatttaaaggagtcaggagtcgtaggggcgaagcattcggaaaataatcttgtcgtcaaatttatcatcaatcccccgaatgctgaacacctgtacaggaatcaatagtcatagggcgaagcattcggaaaataatcttgtcgtcaaattgagaattgatcgcccgaatgcttcgcccttacaggaaataatcttgtcatcaaattaataatttatcgcccgaatgcttcgcccctacaggaaataatcttgtcatcaaattaataatttatcgcccgaatgcttcgcccctacaggaaataatcttgtcgtcaaatttatcatcaatcccccgaatgctgaacacctctacaggaatcaatagtcatagggcgaagcattcggaaaataatcttgtcatcaaattaataatttatcgcccgaatgcttcgcccctacaggaaataatcttgtcgtcaaatttatcatcaatcccccgaatgctgaacacctgtacaggaatcaatagtcatagggcgaagcattcggaaaataatcttgtcgtcaaattgagaattgatcgcccgaatgcttcgcccctacaggaaataatcttgtcgtcaaattaataattaatcacccatcaccttaatattcactttgctgtttaattatctcaaatatactttctaaatcttctggtttgataaatttcttaatggcgtttttaattaacctttctttcattttgtttcccctccaactatcttgttgactatttctcactgctgcatctatatttaaagctaattcttcattttgatctaaattatcatataatgatcttttagcaggtgtatctaaactctcaggatattgggatgatgtacttggttggtgaatttgtttagctagggcgactattttttgtaagtattcttgatatgctagagtttcatcttgacggatcgctattaattcatttaataaaattgatattttctcaaagtatttggggttggtgggttcttgttctatgattaactttcgcagattattttctatggtttctgcaacagcagtttgattatttctaattcctggaggtaagctattgactgcactcactccattgttaactattaattctactaaagtcagattttcaaagttggctaaaatttgactttcttttgcaccaatataactatctatcaggtgacgcatatcattttgataaactttaaaatctattttatcaccacttgctagtttaatttcttctgagacaatttgataatgtttgacttcttgttgaatatcaaaaatttctctcgttgtatatcctgcggtttctagttcgttggcaatattagcatattttctgactaaggcagcaacacttttatataatactaatcttctgggttcggtggtttgtaaatcttctgggttttgggtattgccacaaaaatatttaatataatctggggtatcataagggtattttacaggttcacaaagggcttttagggcttctctggcggtttctaggtcatttttgcctttttctaatctatcagttaataagccgtttatatcatcgctgtcatattcactaaatgctgctgatgtgtaatcataaactgatttttctaaactttgaaataggtctttataatctataatataaccatattctttgtctggtgtatgtaatcggttgactcgacaaactgcttgaaataaatcatgatctctcatggatttatctatatataaatatgttgctggtggtgcatcaaaaccagttaatagtttattgacgactattaataatttcatcttttcaggatggtgaacaaagtcgttttttacctctgtttcaaatttgtctggtttttgtccgttgagcattttttgatagatttcatattgatgtattttgtcggtttttccttcaccggtgctttctcctttgatgctttgcagtgaaccatcataagatgtaataatggcgcattttgtaaagccggcattttggaagatttcataatatttacaagcttcatatatacttccagctactaaaatggcgttacctttactattttgtaatctgtcttttgtgctaaagtctaacatgatatctttgactatgatctctagtcgagatttggaactgaggattttttgcattgttccccagcgttttttaagttctgcttttgcggtttctgttaattgtttggttttactttcaaaccattgatcaattttgctttgggaggtgatatactgctctacatgacgagcttcataacgtaagtctaaaactacttgatcctctactgcttcgttaaatttataggtgtgaatatagttaccaaaaacttcgatgcttttttgtttgtcttgttttaataatggtgttcctgtaaaaccgataaataaagcatttggtagtatttttttcatagctttatgtaatttaccggactgggtgcggtgacattcatcgacaaatacataaaattctccctggggttggaagttttgggggaggttgcgttttatttgtttgataaattcttcgtagtcttttgattcgttgttactgttatttttcccgaatttatgtattaaggaacaaattaacgagggtgtggtattttgtaattgggtaatgagatcctgactgctttgggtgcggtaaatgttttcattgacacctaaaaaaatactttcaatttgtccatctagttcttcgcggtcagtaattattaatactctagcgttggggttatattctcgtatccatttggttaaccagaccattgttaagctttttccgctgccttgggtgtgccagatgataccaccctctcgacgtttaatatactcttgggcggcttttatacctaagtattgatgagagcgacaaatttttttaataccgctatcaaataaggtgaagtcgtggataatttctagaaagcggtgtttttcgcatagttgcagcaggtgttgatctaagatgttggtaatatttagggtgttgataatttcgctgtgggtgtcttctttccaggtaaggtaatatttttctggggtttcaattgttccataacgtagtccttgggtgtcgttacctgccatgactagctgcatggtgttaaagaaagatttgataaatattgatttttgattgtctagattttggcgaattgcttcggaaacaggtacagtgctgcgttttagttccagcactgctaaagcgatgccgttaatgtataaaactatatctggtcgtttggtgttttcgcctttgatgctgacttcttcggcgatgtaaaagctattttttaagggttcttcccagttgatcaggtaaagggtttgtgtgttttcccctgcttctggtttgattttgataccgtaacgtaggagggtgtatatttctttgttgatgttgtagagtttttgggttttgtcgttggtgtgtttggttagttcgtgaagtgctttgttgatgaggtctggggggtatttttgaatgtctcgtaaaaatgtggtgagtaagtcggtttctatgttgctgttgtttgcgcggttgtaccagtttcctatgtattgataacctagtttttgggtgagtagtgcgatgactcggttctgggttgcgcgttctggttgtccgactttgctcatggtttttactgtttattttttagtatattatttctcacgcaaagccgcaaagacgcaaaggttaaaggttaggtttcttgtggttctgtgataattgctaaacctgctaaaatttgtctaattctttctttggatagtgtaccgattttttcagttaataaggctttatcaactgtaaaaatttgtgatacattgactacgctttgtttatctaaattagcttctcctaattctagtaaaacattccctatagcttttcctcgcctcaagttagaagttaatgcacaaactatcactgtcctaatttgagaattattgattaaatcattttgaataactacataaggacgcagataagcgggttctgaacctataggttctcctaagtcgatccagtatatatcaccttgtttgattaccattctttttgttgtattttcccttgatgatgtctcattttttctaacatgatttgttctggttcatctaaaccatctgcataagcttcattgatactttctaatatttgatgttgttttttacggtgcaaatattcctctattgcaatagcaaacaatttactgcggggtattttcattgctgttgctaatgcgttgacttgatcatataatgattgttctatggaaattgctgttttaatgctggtcatttggttataccttttgtatgattatgggtataactgtattttactgtgtttctataattttggcaaccaagaaactaattaacagatattgtcagggtttagcaatgctaaacccctacggaaaatgtgggttttctactatatgggtttcgcgcaaaggtgcaaagtcgctaaggaagatcatataattatcaattgtcaattgtcaattatcaattatcaattatcaattattctcgtttttccggttagcagttcttgcatcattccctgtttgatgtttttgtatttctctcttttcttttctaatgtttcaatttttttatccatttctgtaacgatatttttgtttttgatatactctaagacatctgataaaatacgactattcaataatttcttcatattcgttggtgtcttctacttggttcatttctgcaaaaacatctgctaaggttttgttatctaaccattgatgacgttctttggtatagtctccttttcctggacttagatattgaataaatctaattgcgtctgctactcctaaagatttgattaaagcatcataaccttgtttgataatttcattgtgagttttcatcattattttcctctagttgtattacttctgctaaccattgcacagggttatcaactctaacattcactaattgagaatttgtctttgcttttttaattagtctatcatctgtagtgagaaatacatcggcgttactcctttctgcactagcgatatgagtagcatcatagctggaaaatcctaattgttgtagttcggttgatctggtttcaataaaatgactattaattacttttattttagcaatagaaagcatttttttgacattttttagtctttctaggtctggggtttggtttaattcggcaattaaagcagtgctgttaattaatttccagtttcctgactgacattgatttataattgttattactgattgtgattctaagtaaatacgcggttggctttgatcgtcaaaaggacgatttaaacaacaaacatctaaatatattttatatttttttttcatatttatctatcctctaaatttattttatcctctaaatttatttttaatctcgtttttcctgttagtagttcttgcatcattccctgtttgatgtttttgtatttttctcttttcttttctaatgcttctatttcttcatccatttctgttaatattttggcgatcgctttttgttcgggaagtgggggaaggagtatttctatattttttaaattacttttagaaataccatatactgatataccagtagcaattttttgtagagattgcttaacatatttgtttgaagtaatatatgctttaaactcatcagctaaaagttgtttatttcctcgtaacagtaatgtatgtaatcctgatacaatttctttatttcggatatttttgatctcaatactaattcctaaaccttcataatcttcagaagcatctgctataattaaatctccattttttaaaataggaagttttttaactttttctctgtctattaaaggtatattatacttatcacaatctaaaaataaattccattttgtatgaatatctccataatgtatataacccacatttccatattctgataaatcacttcttgaattacttcctgtagaaagaaaatcaaaacattctttaaaagttttcacctcccactcaccagtaaaaccaggtaagcgttttttacctgtgagtaattcttgcattgttccctgtttgatgttacgctttttggtgatgagtttatctattgctgtaattaggttatctacatcactaagagattgagcgatcgccttttgttcagcaagtgggggaaggggtatttgtaactttttgaaactattaagatttagatgtccaacagttgaacctacagtatcaccaagtaatcttttttgggtatcttgaaaagttagaaggtacaaaagaaaacttggatatagtttatttattaaaggttgcaaaacaataatactttcatagatactaaactctgtttctgtatcaactaaagcacatactccaagacttccagatttactaactaaaacatcacctaattttgcttttctatattttgtaagttgtttatgttgtttatttgaaataaataaaacatttttgaaagaaagttttccattagatatatcagtagctctaattaatggtactcctccatgattaacatagtcaacctttgcagttaatcctaaaaaaatatcttgacaatatctagttatagaatcaatttcccaatctacaggaataacccccacctcagaaaccttaaaaccatcaggaatactcataaaaccccccaaaaaaaacaaacaaaaaatcaaatcaatctgcgtttatctgcgtttatctgcgttccatttattgaaatagtcgggtctaaaaccttgcctttaaaggcgaaaagttttttgatcggggtatatataaatccccgttacaaaaacggcctcctgcctcctgccttcgttatctatcaccaaacaaaccccatttgttgtaaatgttgatcaaccaaactcgtcaatttatccacctcattagtcaactcaaacaaaggagtatcataacgttcacctaactccttaattctctgcgtcaaccgttgggaaatacgatccatttccgcatttatcccttgttttaaaatccccatccatttatcatccaccaccaaactcttaacttcctcctccgtcaactccctatatttctttaacaccttatgatgtaactcttgggtagagtccttaattttcttattcaaaattgcttccgactctagcaattgtaaataggattttaacacctgcaactcttccgcatctgcaaataaaggatttttttggatttccttaattctcacattaatattagtcttagtaattttcccactgtcattagtcacttcttctaataaaccttcctctcctccatattcttcttgcatttcttcctgttgtctgattatatcatctttctgattttccaactgagctattttactttgttcctgaagaaaataattattaatgattaaatcttccggtatcaattcacaaacataatcgataattgtaccttttttattggtgatgggtgtaagttctgctttccaaccatcttcaactatcatatacacatcatcccccatgacttccaaccaataagttaacagatattgataaacgtcatacttatctattaaattttgtcctgtaaatgccgcaagtaaattctcacctaatttatagataatttccctgggtttatctcctggttggatagcttttaataagggtgtatgttgtttttcccaagttgtaaaaacctgctctattttctgactatatttgataaattcaggatgatgaaaaatacaatttttaacttcatttgcagcaacttttaactgttgatatccggggttttcggttggtgcaaataattcttgttgtaagttggggtaaacttgccaaaattcccctaatgcttgaatatctttctctggtattcctcccaataaatgcgctgcaatatcttgaatgtcttccgcttcttgggagtctatataacggggaatgttcaagttaaaatcattatcggcaatttctgttaacgacaccatgcgggaatatttagcaatttctaattgcttattaaacacatccacaattttatgtatatcctgttcccgcaaacggtttttattaccatctttgacaaatcctttactagcatctatcataaaaatgccggcagaattacccgctttttctttatctatgacaataatacaagctggtattcctgtaccataaaaaaggttaggaggtaagccgattatacctttgattataccttgattgatgattttttttctaatatctgcctctgcattaccccgaaataacaccccatgaggtaaaattatcgctccttttccctggggttttaaggaggcaattaaatgtaataaaaaagcataatcgccgttttttgcgggaggtattccataatctgaaaatcgtttaaattcatctttttctaggttaattcctgtactccaagcttttgccgaaaagggagggttagcgactgcaaaatcaaaggtttttaaactaccatcgctatctttaaagtggggagttgataaggtattatcttgtttaatttctgcggtaggatgtccatgtaatatcatattcatccgcgctagggagtaggtagcgttatccatttcttgcccaaaaatgctgattttgatttctgtttcatccgcagcttttaataataatgaaccactcccacaggtaggatcatatatactttgttggggactggtaacgctgttaataccaatgacttttgcaatgacgcgggaaacttccgcaggggtgtaaaattgtcctttactttttcctgactgggtggcaaagttccgcattaaatattcataagcatcgcctaaaatatcatctccatcggcgcggtttttgctaaaatttaaggcagaattttcaaaaatggcgactaagttagttagtcgttctttcatttcttggccttttcccagtttatcaggatcgttaaaatcagcatcattaaatatattacctaagtcgttagcttgggcgagattttgaataattaaattgattttttcgccaatatcttttttaccttttaagttcacaatatcctgaaaactgccgccttgaggtatttctataagtgcatcttcaacgtctgcatatttgtcagatacgtatttaacaaataataaaactaaaacatagtttttatattgggaagcatccatacccccccgcagttcatcgcaacttttccataaagaactgtaaagttcgcttttcttaattgccattttgtgtatcctagagatgcccgaatgaaagaattgttaggaattatgttttaataattgtattcattatatagtattattaattgatttgtaaagtctgattattaacccaatgtttaaaccataggacttacggaagatgtgactgaaaaccttattcttgcgtaggggcaattcatgaattacccctactgatgttttcacgtaaccttaatattaaatctttgggttttttaccagacaaaatcaaacttgccaaaaaacttaaatctaaatctggcaaaaatacactttttgaaactttctcatacttatcaccctgcaaagaatataataaaaattgattattttgccaaaataaaacttcccgtacacccaaaccttgataaatcaataaatcatcaattcccccactcgtcacaactacttcaatcgccagatcaggaacagatttttcagaatcaaaacagtaacattcatctggttcaatacccctagcggacgcttcccttctgaaagtagttgatcctaaaggataaaaatcaatatctttttctataaaataagtttctaataataaagcaattagctttttatcaaactcatgacgacgactaggagacattatttctaaaacaccttctaaatatttaaaccgataatgggaagtattttcaaatcgctgtaatagtatctcatatatattccagttaatgccattcatcagtaaaatttggtcagaatcaacatcttgtaaagctgattgacttgttaattctttccagcaacttaatttatccagtaaacccaacataattactactccaacatacatttaacttctgtaggggcattaatttgtcaacgcagacaaattatttggcaaacgacaacagaataaatggagaataggagactcgaacccctgacctctgcggtgcgatcgcagcactctaccaactgagctaattccccttgatcacatcctattttaacactcggtctttatattgttcacatcttgctgcaaaaaaatttcctgtacccgttctaattccaactctgtcaaatagtcaactgtccagttagcttgacgctgtaacatatgaaatgggtaagtattggcaactcctacaacttgcatctgagcgcgtttggctgcttgaatacccgccggagtgtcttcaatagctaaacattcctgactttgcaaatttaaatctggatatacttgatttaatttttctacagccagcaaataaccttctggttggggtttactggtggtgatgtcatcacctgcgacgataaccgtaaaatattcaatcagtttagcacgttccagcaccagttggatttcttgacgcaaagcaccgctaactaaaccgagtttaaggttttgcgatcgcacctgaaaaattaaatcttctattcccgaatacaaaggcaatttttccagtttttccagttcttgtacataagcttgggctttacgttgcagcaattccattaaatactcttctgtagccactctaccacgatttttgagcaaatcttgaaaacaagcgcgatcgcttcttcctaaacaaccttgacgctcatgcagcttttgcggttgcaaattttcctgcactagaatttcatctattaattttaaatgaattggctcatctttgacaatgacaccattaaaatcgaataaaactacctttaaactcatgcaaacacgctagtgctataataattaagatcctcaacaataattatgatgtattttggcgtgcatgaccagccaagataccgggtaaaattcccaaatttgatggactttgtgcgtgaaaggataatctattctcccgacttttgtagggtttagcaatgctaaacccctacgactccttacctttattcttgatctggcctaacacttaaatatctatctttgcgaatagtattgatcacagtttgaatgtaactttctgctgctcccaaagtttttaataaatgatttcctaactctaaagctgcttcaaattcaggttgtacaacttccttcgcacccatttgggttaaaatatcaatttccttgttattatgtgaacgcgcaatgacatctaaatggggtgcaatagtcaaagcattttttaaaagtaaacgggtactagcagcgtcaggaagggcgatcgctaaagctttagcagtggctaaatgtgctttttctaatactaattctgaatctgcatcaccaaaaatataaggtatttgacgcattcttaatctttgtacagatgcttcgctattttcaatcactaaaactggatatccttcagtttgtaagatattaacaactacttgccctactctaccataacctgctacaactacatgatcagtcattatttctggcatagatatggttttgggtgcagaaaatctttgtaagaaattccctagtacgggattttgatttaaattatcagcaataaaaggagtaactttaagtgagaatggtgtgagaatgagtgtaattgctgttgttcctaataataaagaataggtttgttgagatatcaattctaattgcaaccctaccaaagctaatacaaaagaaaattcacctatttggttaattcccaaactgactataattgcatttttcagagaataaccaaattttaaaacaattccgaaaataattacagctttacccaacatgactaaagccacaagttctaaaattatagcaaaattgctgatgagaatagccggatcaatcaacattccaatagaagcaaaaaacaaactagcaaaggtatctcgcaaaggtaaaattttggctaatgcctgatcagcataatcaatttctgatatcattaatccagcgacaaatgcccccattgcaatggaaagtcccaagtgtgcagttattaaagcaactcctaaacataaagcaattacaactaataaaaataactcattgctttctgtagcggcaatattgcttaacacacgaggcactacccaccgactaaatataattgcaactacaacaaatattgtaattttaactaaagccaaactgagagctactgcaatattttctggttgttgtaaagctggaattattgccaacatcacacccaaagctaaatcttgagcgattaaaattgccagcataatttgcccatgtactgtattaacttcacccttttctgtgagggtttttaatactattgctgtggaagaaagagataaaaccgcacctaaaaagatgccttttgtaatgctagaagcccaacctgttaagagggtgactattgttactaaggcaattgttaaaccgatttgtaagaaactacctttaatagcaatttctttcactcgtttgagttctgctaaagaaaattctacacccagcgcaaacagcagaaaggcaactccaatttccgctaaagatttaatttcattcacattacttaataacttaaacccaaaaggtccaatagcaaaaccactaactaaataacccagtatcacaggttgacgcaaccgatgggcaaaaaatcctcctaaagcagtagcgactaacactgttgtgatatccaaaattaaactatgttctgttggcatcttttttttgaatttattttgttcaggacttacgcaaaagggaacgaaagtaggggtaatacccttcgggaagcaagctacatgaattacccctacgcaagaataaggtttttagtcatatcttgcgtaagtcctattgttatcaactgatgtcacttactttcagagtagcttgaattgataacagtaaacaggtaaacagatccccaacttcttcaagaagtcagggatctatatccagggatataaaaaaccttggaacttaaaaaaacttggaatataaaaaaacttggaatataaaaaaacttggaatataaaaaaacttggaatataaaaaactccaagtctgaaattaagatttattggtttttggttttgagattttttccttacagcgtcaaagattgggggttggtttcaatcaattttgctaaatcttgcaagaatgcagccgcatgagcgccgtaaataatacgatggtcacaggtgatgttaaccttcatttgttgacgcacaccaaataaaccatctgcggtagcgacaacttggggacgagcagcagcgatcgctaaaattgaaccttgtcctggtggtaaaatcgcatcaaaggtatcgacaccaaacattcccaaattagacagagtaaatgtaccagtgctgtattcctctggttgtagttgtttcgctctggctctgtctaccaaagatttccagttgcgtgacagagaatagatatctacctgatcggcgttttgtaacactggtgtaatcaaaccaccatcatccattgccacagcgacagaaacattgatattggaatgataaacaataccttgatctgaataactggcgttaagtaaaggatgtttttgtaatgtcaccgctacagctttcgctaatagcgccgtcatggtgacacctttagatttaatttgtttgtaaagtttatctaatccatccgtggtaatggtgtaaccaacatggaatataggtactgctaggctggccatcatattgcgtaccaccgcattttgcagagtagttaatggtacgacttgaccaggaacggcagcaacaactggggcgggtgcaggtgttggttttgccggagcagcggcggcgggggcgggtgcaataggagtaataaccggggtagtaggtggctgaactttaccaacagcagcttctatatcttcggcgacaatgcgaccgtaaggaccactacctttaaggttatttaaatcaactcttaattctttcgccaacttgcgagcgcggggtgaagctactaaccgtccttcccgatggtttgagccattttgagaagctgttgcaggtgcggctacagttgccgcagcggccacaggtacgggcgcgggtgcggatgcaggtgcggcttcagctacagcactaccaccaccagccatagccttagcggcttctatttctgcttctgtttcggcaacgtaagcgatcgccgcaccaacaggggcgctttcaccagcttggacaatgatatgggctagaaatccttcatagaaagtttccacatccatatcagccttatctgactcgacaaccaccactgtttcgcctttttccactttatcccccggcgacttcacccaagagactatctttccctcagtcatggtggaactcagcgccggcataaatacttcatgaatgctcataatggtggtttcagaatcaataattttatggactttaacaaatgtcgccagatcgaattgtatcttgctatgaggattttagagcaaatgattggggactggggactggggactggggactggtgactggtgactgggtaatcaattttatttttcccaattaccaattacccattaccaattatcaacaggacttacgcaaaagggaacgaaagtaggggtaattcatgaattacccctacgcaagaataaggttttcagtcacatcttgcgtaagtcctatggaactcaaaacaaaggtagatgtctataaataaagcaatcattaatagttcgtcaatagcaactaagattgctgtatgtagccagagtcaaggtatctaggaaatcacctgtcacctgctatatatatcctccttaccactccttcacacacaaaacctgctcatcagcagttactaggggtgaaagttaaatctaaaactcttggaactttccctttcaatactattattatgtcggcaaagctcaaatttcttttaattttgatactcagcatctttgccactgctgctggggtttatgtgatgcagcgacagccttctgctttgatgactggaactgctaatggacaacagcagcagttatatgtagaacaagattcatcagcattgctgacttatcctgaacgttctcattataaaactattcctttagaaagtatcaattctattctccaaggcagtgaccctgctactctggctttaaatattctagatgatgtgaaatctatagaggtcaagccgcaagtagaggtagcttatccccaaccaaaccaagctttagtgacaattacaaaactcaatccagtaaaaaataattcagttaattcagtaagtgcaattaaatatcgagtagagatgagccgctttgggcgatcgctcttggttagttcacccccagtctgggaaattatctgggccggttctcaagtccaatgtttctcaaaaactccagcccaaaataatttgacccaaaactgtgattagttgggaattgggaattgggaataaataggggttgctgagaaagtctttccgtgagggcataggagtcaggagtcaggagtcaggagtcaggagtcaggagtcaggagtcaggagtcaggagtcaggaggagatttgaaaatttctttgccatctcttgaaatcccaaaaaatgcacactttttccggtatacccttcaaaacccttgcactaatttctgtgtttatcagcctctaacctttgatatatcaaggttttaggtttattcagcaaaccctaaataattatctattcactgtccccagtcaccagtcaccagtcaccagtccccagcgatgcactgagcttgtcgaagtgtccccagtccccagtccccagcgatgcactgagcttgtcgaagtgtccccagtccccagtctccagcgatgcactgagcttgtcgaagtgtccccagtccctaataactaaacatctccgcgaatttcttcgactacaccatcacggaggacaatttcaacttgcattttactaatgaggttgtctccagtttctatcttgaaaaagccttccatttgaaattggttaacttcttgatctaactccagatactgcacttgctgaaggttttgtagtgattggtttttttgctctagcagttcacttttcttttgattaacctgaagttggatattgtcaatttgttgtatggtttggggtcctggtggttgtaaactctgtttttgtatggcggttattgctctttgtccttcaatatctagctgttgcagttgctgatctagttgattgatctgcccttgcaattgctgttgtacttcctctttccagagaggagtaacaatagctttgacgttaacgacgcgctttaaaagtaattgagggttggatacatccataaaaatttcacgttcactctgatagtttgcaagtggagttatttggcaaacattccgtcaataatatctcgatatcgttccatgacaacgtgacgacgaatttttaaagtttgtgtcatcatgccattttcaatggaaaagggttcgagaattagtgtgaatggtccaattctgtcatcggctctgtaacctggacggtttttgacttcccgattcaattcctgccgatataaatcctgaattattttactctctaagtcaattttttgactggttgagccagtatgatcatcttgagtgcttaatttcaaattctgactttctgcccatttttctaaggcttccaggttgggaacaattaaagctcctagactgcgctcgtcttgtcctacgagcataatttgatcaatatagggcgatcgcaaacaagcattttctatgggttgcggttcaatattttccccattgctcaaaacaattgtatctttagccctaccagtcagcaccaaatcattttggggtgtcacccagcccagatcaccgctatcaaaccaaccttccgcatctatgactttttttgtcgcttctggatttttgtaatatccttgcatcacttgtggtcctttgagcaacaccaaacctcgttttcctgctggtaagggttgtctcgtttctggatcaactattctaacttctgttcccggtattggttgccctgatgaaccccgcaaatttcgccacggacgacgggcgtttgtcactggtgaggtttctgttaaaccatagccttgtaaaatctctacaccaataatttcaaaaaagttgtctatatgtcggggtagcgccccaccaccactaattacttgctttattctgccccctgtggcttctcgcactttagcataaactaatttttctcccagtgcttgaaacggtgataaggctaattttactattttcgcccctattcgctccatatctgaggcattaacatgatctaaactcaatccctgggcaatgcgtcgcgctgtgatatatttctggctcatgtccaagaaaaatttaatcaacttctgtttattggctggttggctgcggaactgcttttgtactccttcataaattgattcccacaaccggggtacagcaaacatgaaatggggtttgaattctttgaaatcatcttttactgagcgtaaattagtgtaaatttgtgtacaaccttgagaaagtaaaaaatactctccactgcgttcataactatgccatgtcggcagaatgctaaggactatatctcctggttgtggttgaactatagttcccaaggtcttgacttggtgcagcaaattttgatgagaaagcatcacacctttaggtttgcctgtagtcccagaggtataaattaaggttgccaaggcatcaccgctgggtttatttgctactaaagtttggttgctaccaatgtctagtaattgggtaaaattgagcagttgataattttctgctgttggtggtgtttcatcagaaagtaagactacgaatttaatcggtaagtcttgcaaaccagcttctagttttttgactgtcttgatatcttcaactaccagccccgtactaccactattggcgataatatatagtaattcttccctttcagcttgggcgctacgcactgcgtttactgctcccgcagtcatgatcccttgatcagcaataaaccagcgcggactgttatctgctatcagggaaatgcgttgtccagtgctagatgtttcatcctcacccatattcacccctaaaacctgcaaacccgctgcaaatcgttgaatttgtaaggatagctgagaataggtaatctttacttcgggttttgcgtgggggttatgcaaggcaacaatattaccaaatttcctggcagccaaagtccatatttctggcaacgactcaacatttgtgtaatctgccaaactttgcaatgctcggtattctcgctcagtgacgttggataaaaaagaggaatcaggttgtatttttgacatagcacttagttgtttagtgtttagtgtttagtaaatttgtgatttttctaataacagtattagatatcagctttcctgactgtgtatgacagtagcacaatttccacagttctattgaccaaaccttatgctaaactaaatttatatagattaaatgcaatagttctttcttggtatagttccatgtattttactgcgtcagctacccaatgaccaattcatagttactaattcataattcttaattctctcaaacctatttgcataagtcaaaaaaccaggttgctctacagtctagagatgatgaattatgaattattactgcctaatttctgaaggaggtgattagctataggtttaattgaggcattattaattactatcatcaatgcttttgcttgtctagctttgcccaagtttctatatatgctgtcttctggcaaaaccaaactacctaaaccttcactgatagattctaggttgaatacagctaaagtagaagttacgagttttccctattgtacagtttaccatttgactggtagccaattttgtaaatttagccctcaattttgttctcggtgttctcctggctggggagaataaatagcttatttaggggttgctgagaaagtctttccgtgagggcataggagtcaggagtcaggagtcaggaggagatttgaaaatttctttgccatctcttgaaatcccaaaaaatgcacactttttccggtatacccttcaaaacccttgcactaatttctgtgtttatcagcctctaacctttgatatatcaaggttttaggtttattcagcaaaccctatttagcttatttggtttggggaaaggttaaaagtttttgctttttcctttacctcttcctctgaattttaagttttttaaagttataattagttatgtaaagtatttgatttatttatatacagcaaaagaaattcaaaatcgaataattgccctaagatcaaagttatagttcatactagatcagaccagcaaccaagtttcacaaagggagaatgatctatgagtttaatagatggtatacttataactttgttaaatacggttgtctgtttggttttacctaaatttttatctgtcatacttcctgtgaaaaagacgcaaataaatcaggaagaacaaaagattactgagatgactgtccctacatcagaacatattccagaaattcccagtttttctttaagatagaaactactcgcctatcagaattaataatgaaataatgaaatgctgagattctcgacttcttgaagaaatcgagaatcttgttagtaattagtgttacctcttaacaatttgttccatcgtcacatactgaggttcggcactgggagtaaatttacacttagaaagtggtgtaaaaggttctattccagtaccgtcatttttgatttctacaccctgcatcattcccaaatcttcatgaatgagaatgtgacaatgcagcacatattcaccatagtagtctgggaatcgctgcacaattattttgctcgatgctctggcgacagcgatagtatcataccaacgccaattactggaatcatctggtccgttgggatctattttgtcccctactacttggaagggattaacatgaatatggaatggatggggtgaaccacctgttcctttgtctccaccagaaacatttttgatagtccaaatttctgctgtgttcacacctacgataattttcttatcttcatctacaccatatccatctacaccatattgatgttcattcactgcatactttccgtacttattaacaacatcttttcctgctcttaagggaatactaaagcgtacatcttggactgggcgttttaataatcctgctgctgtaaacagttcctgatattcgataggttgtaaataatcaggtaactttccgggtattaaataatcattggttgtaggatctggatcattgccattttcggcggatgtgctgactttgatggtagctaaaagctctggtttggtgattcttatatctgtccacacatctttgatcaaagataatgtactcccatcttcaatgctatctggcaaccacaagataaaatcggctcgattcccaggagcaagatcccagcctttagtgcctgtggattgggggtttttaccatagaaggaaataccatccacggcgatcagatacatcggcacgatctgatcataataggcttcttttttgtcaaaattttcgggcttgaagtttttcaccagcttgagattggtgaaactacgtggtgttgctcccccattgataaaccgccaacgctgccactgttttttattgactttaatagttggttgataaagtccattgactaaaaaggtggcgcgaacacttgtttgtgattcttgtgggtaaatgtcggtttgttttgccagtccaccaattacttcttgtactaaccaaactttatccagttctgaaggtactatttcattttctttgggttcaggaataattattgcccctactagtccgttggatacctgtaacccagatgacccatgcaggtgggagtgataccagtgcgtaccaggtgcatgaaagtctggtaattttacggtgtattgctggcttttaccaggattcactgatatgagtacgctgtcagaggcgatgccatttttcatctctggtgatacgtgcaaaccgtgaaaatgcaagttcgtggtgttgaaacaacctggtgcataattgtcttgagtcatgctaatgtgacattcaccttgatctatcaccggaaattggttgttaaaattgatgttcagttcgtctcctggttggatatataacgcttctccgggaacatgacagttataagtacgtacctctatggattgataggtcaattcatctttctctggatctatttgctgacctggtatttgcaatgaggctattcttgtattgattgtgtggttcagttttcccccagcacttttgattttgctgagttcttgaaattcctgatgaatgggaactgggattttggtatcacaattttcaattattgttgttccctgtgctgtatgactaccttccgcttgggctattttcggtaaggctagggcagcagcagtgatcacacctgcaccgataaactgacgacgagtaaaaacagatttttctggttctgatgggaactgttcttgctgtgtcatggcaaactcctgatatatgtggaaatactgttaaaaatcgatgcgttaatattgcggaaatcctctttaaattagtgtttctgcaattgcgtataggttggattcagattatagacgtggattgcagtataagatatgacttatgacttatgcaaaacttgactcaaaacctgattcttgcgtaggggtaatttatgagttacctctactttcgttctgttgtgcataattcctgtaagtaagtctgaggtaatgtgtaactaaatttttcctagttttaaatattttcttgtaagtaaatttgcttaaattacacattacctagattaatcaattacagttgatgactgtagttataaaatgattactcccactgcaaacacatattagtttcacaagtcttttacgtgtgtctgagttatttttttacccgcgacgaatgctagagcgcagtacattcacttcttgaattaagtcaacaatccgctttttcgcttcctttgcagaacttttatcttttcctcctaaagctagtctagcttctgtccaatcacggataatttgttcttcttctgcttcgtctccctcatctaaaagcatgaagcgacggaaatatggtacatcccattcaaccatgtgtgtccagacatcgtagggagcaatagtccaatcaatttgccaaacttgttgaaggagtcgaaggaaaaccttttcttcactggtgcgatcgccgctatctactaatgatgcaagtgctgcgcttaattgtcctttatccattttaccctccaaattattttggatgattttttcttttatatcttacacggattattccattatctatgtgtaaatttattgcaatctataaaaaaatcatcaatgaagagaagctttagtatacaaaatttaataaaacataaattatattttaaattcaagttaaacaaacatatactttatctaattctgactacaaagtttatttaacaagggttttggcgtttaatcaaatcagatacttatgcaaaaaccaagtagttacgatttgattaacggcaaaattatctaaacaataataaataataacagttggtaaaaagttggtatttattagcaattggttggtatacaaaaatatgaaaagatttgtatcagattctatatttaaatcaaattacaaattatttacttgtcagaaataagagaatatggcaaataataataaagctaggaaaatgctattatctctgaaaatattactgtggaatttctgaccccatcttttgatgctcaagccaataattatgatcaacgtgcgggtttatctgaagaactttgtcggcaaattgtgaaagttgcgcttgcttatggtgaagtacaacctaatgatttagttgtcgaagttggtgcgggtacaggcataattggtcagtggtttgtacaatcatcatgccattacataggttttgatatctccccaaaaatgctggaggtttataaatcgaggctgtatagcaataaaagtaataaagataactggacattgttaacagccgatggtaacgaaaagtggcctgtggcagatgctacagcccgcgtgattttcagttccagagctattcacctcttggatacaaaacataccgtcaatgaattatttagagtagcgagcgatcgcacccttttttttattggacgtatccaaagacacaaatacagcatcaaagaacaaatcagacaacagatgcaaaaactattacaaagtcacgggttgtcaggaaaagggggagaaaaaaaacagcgtcaactgatggaactatgtgtacaacgtggggcaaaagaaatagaaccagtagtagtgagtgagtggaaagttaccagtacaccacaggaatctatagataattggcaaaaaaaaccaggtttggggggtatcaacctgggacaagaaatcaaacaaaacatcctagaagaactgcaactctgggctaaagccacctatggccgactagatgagcagatggaatcccaagaagcctacattttacaaggcgtgtatttagtgggtgactggtgattggtgattggggactggtgattggggactgggtgagaaaaactaagtctttatcctgactcctgactcctgactcctgactcctgactcctgactcctactataaaactcaggtaaaaattctcatcaaaattatgacaaatacaattccggccttagacaatcaactattatcacaattgggacaatctatagttcaaggttctctcagtgatcaaaaattactcgcacagacatctttagaaccatcaatcaagattttgccccatgcttgcgttctcaaaataggtggtcaaagtttcattgacaggggaagggcggcagtttttcctttaatagaggaaatagtggaaaacttaggccagcacaaaatgattattggtactggaggcggtacgagggcgcgtcatgcttatagtgtgggcttagatttaggtttacccacaggagttttaagtgttctgggaacttttgtgagtatgcaaaacgccagaatgattcattatttattagcagaacatggcataccttttattgaaccagtgcagtttccccagttacctttatatttagcagaaaggggagcagtggttttctttggaatgcctccttacactttttggcatgaaaacccgactaatggcagaataccaccccatcgcacagatacaggcgcttatttagtcagcgaagtatttggcgctaagtccatgatttttatcaaagatgaagaaggactttatacagcagatcctaaaaaagaaagaaacgccaaattaatcaaaaaagtttctgtgtctgaactcaaaagtttagatttgcaggatgtaattatcgaacgttcagtattagatttaatggctaatgctactaatagccgttctattagagtaattaatggactgacaaaaggcaatttaactagagctttgaatggcgaagatatcggtacactcatctacgctgatgaaaattagctagatatttgatggaaattgaattgtaaaatgtgaaataaggtggtatttatccaatggtacaaacaaatattaatggtgattacagacaacatttaacatccctattaatgcgcgaaagtttaatggatagggatgtagaattaaccacagaagaaaaattaacagaagcaccaattattagaatgcttccagatactcatgtagtaaaaattggaggtagatcaattattgatgctgggagggcggttacttatccagtcattgaagctttaggccaagttttacaatcgaaaaaattaattattggcgctggtggtggtgttagaactcgtcatgttttttccattggtattgacttaggaatgcccaccggtgtattagctacattagctcaagctgatgctttgggtaatgcacatattttaggtgcgttacttgctccctatggagttgtagccattcccccggaaatttttggacaccttttacccctatttattagaactgttccaggtgtaatttttagtggtgttcctccttattctttatgggaacatcccccagaaattgggcgtgtacctcctcatggtagtgatgcaggagcatttttattagccgagtgttttggttgtgaaactgtcaccttagttaaagatgttgatggtttatttgatgaagatcctaaacaaaactctcgcgctaattttattcaggaaatatctacatcagaaatcaaacacggaaatttccaaaccctaccttttgaaagaattttagtagatttgatggcacattctcgattaattaaacgggtgcaaattgttaatggtttacatccagaaacaatcattgcggctgtagaaggtgaacacgtaggaacaatgatttatgctgattaaaactgaaatcatagcatatttcatctaagtgaattataccattagcgggcaagatgcccgcaccacaatcatggtctaattaatacataattacaatacataattgaaggatgaacaggttgaaaacagccgttttatcaccaattaccaattaccaattaccaattaccagctttaactagacaactagcaaattaagttaagatacattattttttacctttttcccgtcgccatctagctctaactaaacgaatttcatcaaaggtataactttctcctaaatattccctaataggagttaaagaaatatcacccaaaacatcaataacctgccaaattttcttttgtcgctcaaaaggtactaataaatttaaatctacaggttgatttttttcgattaaatcagaaagatgacggataattgtagtagttcttacattgcgttttgcagcaatttcttgaatactaaaaccctgttgatgtaattcaaatgtggttgattctgtatcagttgggtaatgatctgtatttttgggtggtggaaaactttgttcttgacaatgggattgaattactgataaaaacttttccccatattgactgactttataactaactacaccatccaagttagcaaattcttctaaagttttaggtttgacttgtgccattaattttaaagtcgaatcttgaaaaatcatataaggtggaaaaccctgttcatcggcgatttgtttccgcaaacttcgcaacctgttcattaaaagttccacatccaaagctttactattcacatctactaaatttaatctttgagaaacaggaacagcaatagaaacctggcgttgttttcgcattacttcccaacttaaagcattcagttttaacaccgaataaccatcattagtttgttctaataaaccttgatgtaaaagcgatctccctaacattcgccattgatcagcagttttatctttaccgataccataagttgataattgatcatgtttattcaaagtgattttttgagttttggcacctcgtaacacatcaataatataactcatgccatatctttctttacaccgcgctacacaagatagaaatttcattgcttcaatagtccaatcttgcacaggtttgggataacgacaattatcacaattaccacaatttccgggaaatctttccccaaaataacctaattgaattgttcttctacagtctgttccttcagcataatctatgacttgtctaagttgttgtttagctattaattgttcttggggatcggttttttggttaatactccattcaatagttttcacatcaccaaaactaaaaaataaagtacaccgtgatggttcaccatctcttcctgcacgtcctgattcttgataataactttctaaattacgaggtaaatctgaatgaattacaaaccgcacatctggcttattaatacccataccaaaagcaatagtcgctaccattacccgcacatcatcccgaataaatttagtttgatttttgcttctttcatcatcagttaaacctgcatgatagggtaaagcagcaactttatcattttgtaatttaacagttagttcatcaactttttttcgggttaaacaatagataattcctgaaccttcattttctctgactatttctaagatttcactgtatgaacgactgcttttaggacgcacttcataataaagattttggcgattaaaactggcaatgtgaatacttggttgttttaatcctaattgttgaataatatctgctcgcactctatctgtagcagtagcagttaaagcgatagttgggacatgagcaaaacgtttttttaataatattaattgccgatattctgggcgaaaatcatgaccccattcagacacgcaatgagcttcatcaatagcaaaattagccagaccaattttttctttaactacatctaaaagcggtaaaaatctttcactaactaaccgttcaggagcaacatataataatctaactttaccagtcataattgcttcttcacgggagcgaacttgataggtgttgagactactattaagaaatgtggcagcaatattattatttctcagtgcttccacttggtcttgcattaatgctattaatggtgatactacgactgttaaacctggttttaaaagtgcaggtaattggaaacataaagatttacccccaccagtaggcatgactaccattaaatcccgattttgtagagcatcttcgataatttgccgttgtccagggcgaaattggtcataaccaaagtaatgttttaaagatttttctagttggggatactgaagcatggtaaatgtgtgtgcagtttgttcacgcagggataaggatatgaaaattttaactcacgctggttacacaacggggaatagtggctataattataaactaggattgtctgatagtgaagcgtggcgttagccatatcaggatttctggttactgagcgacttgtactgagcctgtcctgagcctgtcctgagcctgtcctgagcctgtcctgagcctgtcctgagcggtgtcgaagggcggtgtcgaagggcggtgtcgaagggcggtgtcgaagggcggtgtcgaagggcgcagtcgaagtaagtcgaagtaagtcgaagtacagtattttaggatctacaagatgaagatgaggattttatcagtaattaccctggtttttgaattttactatcttgtgaaagaatttaacctgtaatttcttcagattaatttaaaaaagtgaactggataaactcatgtttattagtattgaacagattagagagtctcttaaatatttggaaaaggtagattctttttcgggaattacttttttaaaatttaagcaattacaattgccagtaggtactactattaaattatctttatattcggaaattaaagatttcttagaaagatactatcaaccctgtaaaggatctaaattttcttatagatgtttccgtttatcaaaaaatcaagatagatggttgaaccttgacaaatatgtcaagtctatcataaaggatattcatataacgctatttatagaagcattgatctctgataaaatcctagaagaagaatggggatggaaagataaatatattggatttttaaaatatttgttatataataaaaaactaattcctgcttttcatttagcggtttggctatatcgtgaaaaagaatggtcatctgaaacaacaccagaagatattattgaacattttaaaaatgatttttggttgaatgaggaagaaatccatcaattatttgatatttcaattcctgaaggaattaaccgaaatcagctttttcaagatacagtagtttcttggcaagaattaaaaactgttattggtaaacctccagatattctaccagaagaaggtactttaacttatttagaaatacaaggtgtaggtgctgccaaaaaactttgttttgaaccagcagaacgactgagcttaattacaggtgataatggattaggtaaaacttttttactagaatgtgtgtggtgggctttaactggacagtgggcaaatttaccagcatatccaatgccaactgtaactgaagatgaacctgtaattacattcacaatttctggagattctgaatctgatacagagagtatttcttatgattggcaacttcaaagatggaatgaaattaaaaatcgctcaactattccaggtcttttaatttatgccagagtagatggttcttttgccgtatgggacacagcaaaacaatatttatcatcttcatcacgtattagaaatattgataaaaaaccacttccttttgtgtttacaaaagaggagttatggaatggtcagaaagatgaaaatggcaatacttttattaatggattattacaagattggactcaatggcaaagtagaccagataaatatccatttaataccttagaagaagtattagcacgtttatcacctccctctgaaggagatttaggaattttaaaaccaggtgaacctgtcagacttccttatgatgctagagaaattcccaccatagaacatccttatggaactgtttccattattcatgcttccgcaggagtacagaggataattacaatggcatatttaatagtttgggcttgggaagaacataaaattcaatcaaaactgatccgcagagaaccacagaagagaatggttattttagtagatgaattagaagcacatcttcacccccaatggcaaagggctattttacctgctttgttagatgtgagagatgatttagcatctgatttacaagtgcaaattatggttgctactcattctcctctagttatggcatctgtagaacctagatttgatgaaagagttgataagctatttagtctagaactggtgaaaagcgatttattagggaatgaagtccaaattgaagaacttccttttatccgtcaaggtgtggtagactcttggttaatgtctgatgttttcaaattgcgtcatgcgcgttctttggaagcagagaaggctatagaagcagcaaaagttttacaattatcagataatccaaattcggaagatgtggcaagagtatcaaatgatttggcaaggtatttatcagaagatgatagattttggccaaggtgggtttattttgcagaacagcatggagtagatttgtgattccgattaaaccccagcctgaacctgatgattttgatgaaaaagttagaaaaaaaggtgaagaatttttaagtaaagttcctaatcctgaaaaaaaagattggacaaatcgtgattattggcggagggcattaccggatttatacaaagcttgtaatcatatttgtgtatattctgcagagtggattccttatcaaacaggtagtccagcagttgatcattttattcctaaaagtgttaaacctgaactagcttatgaatgggataatttccgccttatttgctcaaaaattaactctaacaaaggaacaaaagaagagattatagatccttttttcttaccgatagatagttttattcttgattttccttctatggttattaaacctaatcctaatcttttagaaccactaaaaaaaagagtaatttatacaattaaagaactaaaacttaatgaagaaacgtggcgattggggcgttcagataagctggtagattattgtaaaaacgagtattctttagactttttgaaaagaagatatccctttattgcttatgaattagaacgtcaaggtttagtagaagtagaaaaaatagcatatattatgggcgtgagataattttatatatataaaattattgtcagctttttatatattttctagctttttacggatggttgattaatgtatcattagcgacaacaaaaaaagatcataggaaaaatggggaagaatttatgagttcaaattctcaatttaggtgtcacaataagaattgttaacttttttttcaatcctcactatgaaagcaacttggaatggcgctattttagccgaaagcgataaaaccgtagtcgtagaaggaaaccattactttcctgctgacgctattaacaaacaatatttcaaagacagtgatactcacaccacttgttcttggaaaggagttgcgagttactacaccattgaagtagatggacaagttaacaaagatgcagcttggtactatcccagcaccaaagagaaagcgaaaaatatagaaggttatattgctttctggaagggtgtgaaggtggaagcatagaataacattaaattaccatagccatttatttagccagggaataaattccctgtctaatagctaaagtcggttaaaaccgactaatttttaggaagtaaatgtctatcgtaaaattgggcaactttttgatttaatgcttaacctaaccacattataggtttaagctgattactgattactgatagctgaatgctgacatttaatctttagcaatgacaatatcatttgatttaatcacagcataagcttctgcaccttcaactaatcctaattcctctgcggatactttagtaatgattgaagttaattcaactttatgtacaatttctaaagttatttcactgttaaccgttcccgtagtgactcgtttaactactccttttaaaacattacgagaactaacttttaatggtttcttgggaataatattttctatctcaacattctgggtttctactttctgttggggggttggttgtgatattgtgggtgcagatgcagcaggtttttgatttaacccccgcaccagttcccgcaaaatctcagttttagtgcgctgagagtgttgacagaactcttctaaaatcttccgttcttcctctgaggtttggaatgttacccaaccttgttcttttctgggcataagtttaccaaaaatataccaatttatttggtactcattattatagaatcttgatacaatcctagcaggtagtggcaaaaattaatcatcaaacccaatacctagttatagaattaaatcagatcagatagtatttggttttgtgaactggttttgtgaaatttttcatcggttgtgcagtttgggcttataaaggttgggtgggcgaactttacccctctggaactcgcaccacggactttttgcatctttacagtcgtcgttttaccacggtagaaggtaataccactttttacgctgttcctaacccggaaactgttactcgttggatgacagaaacacctccggggtttgagttttgcctaaagttaccgcgagatattacccatcaacaattactgcaaccccatactcctgaagcgttagcatttttaaagagaatgcaaccattaggtaagcgtttgggtccaatgtttgcccaactaccaccgagttactcacctgcgttactggatgacttgcagacattcctggaagcatggccacgtcaagatgtacctttagcattagaggtgagacatggtgactggtttaaagaacctcatttgagtaatttaacaactttgttagaaaatttaggagttggtagagttttattagatactcgtcctgtgtattctggggaagatgatccacaattagcatcagaaagacgtaaaccacaattaccagtacaattttctgtcactgccaattttacattaattcggtttatttcccatccccgtttatctatgaatgagcaatttatgaatgaatgggtgacatatattaaaaagtggttatcagagggaattaaaatttatttgtttgtacattgtcctacagaggatatgtctcctaataatgcgcgttattttcaacaattattagaggaaaatggtgtagaagttccgcctttaccttggaatactattagtaatagtaatcaactgagtttatggtaagtaggtgacagatcataggaatgaaagctaatattaaatctgttatttctctttcccatacagagtatgggaatgaatttacagaagaatctgacttctattttagtcgagtcagagactctatcaaagcattcccagtctggagactgggaacaagataaattagcaacaaagaaatatagctgctgctagtagcgtgttagcagggttagttttagataaacaagtgatcaggaagattttcaggagtgaaattatgcgcgagtctgtaatttaccaagaaattctcgaagaaggtaaagctgaaggtaaagctgaaaaagctaggaatgtagcaatcaatttactaagaattggtatgagtttaccacaaattgctcaagttacagagttatctattgagcaagttgaggaaatacaaaaatcaattcaaggatcataattgataccaaaatccccgacttctgcaattcagtcaaaatttatggacatgataataaaaaaagtcggggatctaggggatctaatttagcaaattaagcaaattaagcaaattaaggcaaccaaaaattaggtaaaattgatttacccacatcacggatagcttgattcacatttctcgctatttgtatatgatgttcatcttgttctataggtaaaatatttgcttttttccctgttcctaaataatcaattgctaaatttgcagcttccaaacctgtaacaaaggctttttcctgtgaccatgaaccgtgacggttaataatccaatcaccactcataaatacattattcaaactggttttagctggtaacatattctgataactaccaggtgaaaaatgtgtaactgcatttgctaaacgaatgacgctactatcaattacttttgcttctttaaattctggtacacaagttgctaaataaccttgaactattttgacaatttcctcatcacttaaatgtaaaaattgattggcatgataaaagtcaacttctacaactgtttcggtttgatttttatattcatcatgcaaagcattcaaatcaaaaaaagtccatccggttgtattatcaaatccaaaacaagcattagaaggacgaggaatattgatttttctgtcaaaccataaccgagtcgctaatacatctattgctcctaaattgctgatatttctaaattctgcataatgttgtaaactaggactattagcaacaatttttttcattcctgtaattcctacagaaaaaatcacggcatcagcatcaaaaacttgatcaccacaaactacacctttaatctgattattaccaccgacaattacatctgtaactcgatgtttagctaaaactttcgcccctaacttttctatcttctgcacccaaggacgaaagattttttcgcctactgttccccgacaccaaactacatcaaaatctggttggtgagcgaggataaaataatataacattcctaaagttgctgctgctgaacattgttcaccaggggcaaataaacccactaataacataggttcaaatgcttctttataaagtctggcggaaacaccaaaagttttgaataattcacgggcagttatataatcatatctttgccaagcatcatgagaattatcaaaatcaattaagctataaagtaaaggtaaggcgctgagtctgtcaattaatggtaatctttgaaattgcgggtaaataaaagttcctaatggggttgggagtctgggtaaatcttgaaaaattggtgattcaacttctaaacctgcgggagaatattgagcagaacgagtccaagttgtaaaggggtttatttctaattcattgatgagagaaaatatatttctgtaaggataccaaaatccatgaataccggcttctacagattttcctgctgaggtttgccaacctgctaccaaaccaccaggatatggtcctgcttctaaaagtgtgacatcataaccttgttttgctaaatgataggttgcccctaaacccgcccaaccagcaccgataactactacccgtttttgttgtaattctgacatttttgcacccatgtttttctgtacagatagttatcatatcggtttgagcagggaacagggaaagaaaattttagattttagattttagattttagattttagattggaattggcaaaaacaatccaaaatccaaaatccaaaattctgcctcctgtctctttattaactatgaatactgccatcgggcataatagcacctgttaaaaaagcttcactcatatctgtggcgtttaaattagctctggtcaaatttacctcacacagattagcttcacttaaatcagcgccggttaaatttgcgccttgtaaatttgccttccacatccgcacacctcccatttttgcaccacttaaatttgcaccttgtaagttggcggctgtgattgatgcttgatgtaaattagcatcacataaatctgcaccagttaataaagctccactaaggtctgattcatttaaatgggaattagttagtatagcttgagttaaatcagcaccacaaagaatcacttctgataaattagcattttctagtgttgcacctctgagatttgctttacttaaatttgctccactcaaagatgctgcggtgaggtttgcacctctgaggtctgctctaccaaagtctataccacccaagttagctccttgtaggtttgcggaaggtaatgcaataccgttaaagcttctttctcctctggcatacctagttaatagttcttgaatatccatagttttgagttatttgtacttagttgcaagatttaacttgtatttggcgaaaatttatttaagaaaaataccaaaataaatacaattattaaaactaaaatctcaaatatattaactattttagtgacctcaaattgatcaatataatgaatgctactgataacattgatattgggagcatccgaattttgccaatataaatgtagctacatcaaaagtttgagtgtttataccttgtatgaagtagccatactgactcatgagggcaataaacaggaaataggtaatagaaagtgttgagaaatcattgaggatgactatatatctatatatatagtacctataaaaaaatcacttttccacaaatgctaaaaatctgttaggatttgtcaccaatatcaaacaagttgagggactttatacagaaattttggctggaataatcaagactgaatttgctataaaaaaaccgactagtcttaacatttgtctgcaatgaatctctagtcgggcataattatatagcgttgtgtgattggcaattgtttctagctggattttagcgatcgcttacttgcataaatagaaacaatctgctaggataagacttctatattattaatattcttttttagaccaactacctcgtcgatcatcctctcgtggttttgctttattcactcttagttgacgacccatccattctgcaccatccaattctgtgatagcagcatcttcttgtgcatcttcgatcatgtcaacaaaagcaaatccgcgcatccttccggtttcgcggtcagtaggtaaaacaactcttttgacctcgccataatcagcaaacacggcttttaagtctgcttcggttgcgcggtaagagagatttccaacgtagatagtcattatgagtcacgtaattttcaacaaaaagcgatagttcagatggaaactggaactcagcaaattttaagcattgctcccgttgccttggattcatgtatgacaaaaattgtaggagattagtcatcaattatactagttcactactcaacctgccaccagactgaacatacccatctgctcattatgataactgattatgacattttccaaagtatgagaatttacaaagaattataatataaaattatatgctttgatctattggataatttaacagaatttattgctaacaagctgcggtaatctaactacattttagcaattataaaccgttaacgttgaaatgttaacggtttataattgattaatcaattgaaatttgctgagggccagaggctttgccattctggacttcagtggctgttttggggaagttggctgaagtaatatgttgatctagccaacttctaacaggatcatcagctaggttaagtcggaggacaccagaaacaaacccacccataaatgacactggatgctgggcaagttctttaaatagaggagacaattcactattaaacattacactctccaagtattgccgtaaaaaaattattaattcttcatcaattttaacagatactggctaataagtgacaataaacaaatttaataatattaagatgtataatagttatgattttttcaatccacaacaaattaattgaattgaaatttattaagctatgacaagcaactgggaaaactttatcaaaaatataggtgagtggaggggttcatttactcaaatatccccccagggagaaatattaaaatctacgcctagcattttaaacttagaagccattgataataaccaagctgtactgtttagattacgtcgttttgatagtaataattattatagttctcccattcaagattatcaacaagaatatcgttctttagccaaagaaaacatattttttaacacaggtgcgtttgccaaaggaacattacaactagcaccgtttacagaatttggtgcagaatatggctttatagatgaaaatagacgatcgcgcttagtgcaattatttgacaaacaaggaaaatttagtaatttaaccttaattagagaatttagaactggtacagaagccaaagaaagaccaccattgacagtagaacaactaattggtaaatgggaaggtcaagcgcacacagtatattcagacctcagaccgtcagaaacaaataccagttatttagaaatcaaagaactagacaacggatatttagaacaaacactaacttttgcgggttatactattacctcacaagcccaaatagcaggtaataaactgatatttgaaaaagagagaaatatcagagaaatcctattattacctgatggaatttctagtaatgttcccgtaaaactagaactaagaaaacccttttttgtagaagctggttggttagtgagagataatgaaagacaaagattaattcgcagttatagcgaaaagggagaatggataagttcaactcatgtagttgaattaaaaattaaaaattaaaaattaaaaattaaaaattaaaaattctcgttcccagtctccagactgggaatgcagtacagagtctctgactcgaaattgaggtaaaggcagagccttcagaaattcattcccatacagagtatgggaacgagaataactcctgaactcctgaactccttatgtgggtgactgttctgggaacatacacttatcagagtcacaaccgctaggtcctgcttctgacatttcccctagatcataacgactcaaagcaccacaaaaatcatccgttttccgtctcgcttttacttcctgagataaacgctcataagtctctttatctatgggttcaaagggtaaacgggggaaagtttgaatgtcatcaaaccgcgctaacaacgctgcggaaatgtaaccctcatccttttgaatggcttcataaatgcgtgttcccaaagcttcaacctcttcagaacgtaattctaaagtcgcagaagtattgtaagtaagaatattatgttctaacgcaaactggttagtttctggttccataacacaccagccatattcctgaaaatctaatttttccacagacaagactttccacttcttagagaaacaagatggtttgagtttctgacggtgaaaatcacgcaagatcaatgaatcgtgaactgaagagcggatgaaacgaactgaatatgcaccttttgaattttcatacccactaggtttctgtatataaatactagaaataaccaaaccaagttttggacaaacctgctttagccaatcaactagttcagcccggcctgtacttaatgaaatacaagtaccacaaacatttccatcagtagccaaaagtccagcaatgaatccataaagataagactcatctgcatcaatactggggagttccttgtaataactgggcagaagggtcacacgagtttgattaatatcatcacgctccatccttcttggaaagtatcgtcccagttctcgtttttctccacacagatatacttgacaagcacccgtatctttacgccttgttccatcgcctaaaacaatgccatgttggataccagaaacatctaggttcggcagataggaaagcaaaatatctggtattttatgttctaacgtcaggtcttgtgtcaaagttacttcttctaccagtctgccgcctgtacgacgaaaagtcttccaacgatgatcttccgttgatacaatttgtacaagtctctcttcgtggatgtctgatgctctttgcaaagttatacgatacatagtgcgagggcttgatgtgcataccacagtagcaatagaccagttaccattagcattaatcacttccaccttgtcgcctggttcaaagtcattaaaggaaaaaattccatgacgtgtgataaagcgagtatcccgatggaaacaattgtgccttgtgtagaatttttgcacttgcataacaaagtctaactgtgccaatgcagaaaacttagatacatcaattgcatctgcacctggtaaatctgcccaagaaacagcaacgggaatttctaccaaccactctgtacaacgggggtcaaacgggtcatttaataagttaccgttttcatctttatcagactgagaaggtatgacattatagccgtaatctatacaagctaaggctacggggtcatttttacggaaagtgatccggcgaataaatctttgcgcttttgggggatgccaaccagaactagcacctgttaataaagattttgtcccgctaggctgcactgtagtacaacggttagggcgtttaatcccgtgtttatcgcaatattcccaaacagcttgatgtactatttctcgccatttgctcaggtatttttgctcaccacgtctaaatattaaaccttcttcggtttctggccttccttgttcccaccagcgcaaccagtccacaccaaaagcgtgaacgaagaagtcaaataaaccagtgaaggaaacgccaacaatgggatctagttcccgactatattgatagcggggttcttggaactgatggtttaacaatgcagcaacagataaagcaccggctgtaaatgcttcctcttgttctttgtagttgtcgggatctagttggtttaagtgtacctcagccaagttacagtggaaattagtacctatgatttcaccacacggattaagcccgtagcggcctaatcggtgttctaattcttgatcatcaatatttgggtgacgttcttgtatccatgctttagcttttccttgttcgtaagcttgcaggaagtcttttttcagttctggggtgttgagtaaatcaatattagctcttgccaccgcttcaccagcccattgaattgcaccttcaccactgtaatactgcttttgcactgcggcaatagattcttctagggtgggtttgcggtgaaatactcttgtgtggttggccatacgtaaagcgtcgcgctctggatctatgcgccagttaccttctgtgtcttgttgccagaggttatcttttgcagttgctccttgttggtcttctgcgacgaattgtctcatgccggcactgttagaaactaaaataccttcacagacaaattcatggactgtggcaacttcaatatcataagtaggtgcagtccttacatcaaaatcaacccccacaactttgactggtactaagtcggttgcttcgggaaggtattttcttaatgtagggagtaccatttgttcctggttattactccagtgatattggtaggagttaataatgggacgtaccatagtttgcgggaaaccatgatctttaaatgatttgggggtttggcgtttttggtgggaatgttgcagagaatatttgtcaaagcagttgtttacagattgatatgctgtttcaccaactgtaactaattccccttcccatttgcctgtacgtttgcgaattgaactacataaacgggtggtaatgcccaaggatgcgtacaaggcttgaacttgctgtaaaaatcgctgttgcacggaagcaactaaaacgccttgagaatgacatccatcagcatcagcaagaccggctaggtaagcttggcgaatgtctgctttacctaagagaatacagtcgggaacgtttaatggttgagatggttttttgaataatcccaaatattgatttaaagctgctgaattaaattgcagttcgtaggctttggtttgacattgttcaggagttctcagggtgtgtgtgtctaaaccaaattctcgcccaacagcaattaaatgttctaaaatttggggactgttttcatgtaccctgaatctgactctactaccatcactactaactgaaccgtcgccgtgtaaataaccgatgaagtaagcaacatcgggggttaatgcgggtatggtgatgggtttggttttgcctgtgattttaccgcgaaattctggtagttcggtggctgttccgggaatggcttgtggtatgaatattaggcgatcgcctggttgcaaatctttggctttgaccattttgtaattgccgtacacatcggtcaatacagcaactttatgatctgccgtacattcaaaactaccatcttgggtttgaatgcgacaaagtgactgttctccttgagtgaagaagttagtaacaggatagaaccctttgctggtgaggacgcgatcgcctattctcactttagcaatgggaactaaaccggtttctgtatgcactagggcattttcaggtaaacagcgccggatattcccggcaacaattgatacagcagcttcatcaattaataaacagcattccacagaggttaactgtctacctaaagctttattcaggatagaggcgcagcgttcatacaaaccaggcaattttacagggttagcgacaccaccaaaacctttgagggtttccccagactgacgtacatcactaatatctacaattacctgaacgtcatcggtatggtcagtgagcgaagtcgaactgaagcgttcatcggtagaaagttctaacagggtttgataggattttacccaaccttcccgactatctccgacgtgaatagtaacagtgttaccttgtatatcggtttctgtaaattctcgacgctgttctacaggtgtacggccaacttcacctgtaatggtaacatttaagcgattacggatagggggcaattgattaatatactgcggttcgataatagcacctgtaccacaacccatcatggccagatccatcattaaaccgaaggctttccaatctgttaaatttgtagaagtacaattataagcaccagaaaagtttttagatttttttaaccagtcggtgccaccaacccacaaccagcggccactgggtagggatttcatgttgcgctgcattttatctaagagggcggcttcttcttgggtaagtttgcctaactctactaaaccttgtaaagtgcgatcgcacacttcgtcccaggattctcttaaacctgctgctgtacgacggctgtaggttctaaaaaatacagggttggctgctggggcagtttcggggaaagatgcactctggcgttgacgttgcaattcttgaaccataataaagtctgattgctgactaacagattaagactataacgccaactcgttatattatgaaaggttgctaaatttaccactttgtgatctcaaatattttgtataatatgtaacatatttgtatttgatggcgacaaaacaggcttcctaccttccttaacccaatacatcgggaatttaattaatgcgtagagactcaattttttataaactattccaacaatatccatatgttttatttcagctattgaaaaacccacctcaaaatgcagaattatataaatttgattctgtagcggtgaaagaaccaaaatttgaaattgacggcgtgtttttacctccagaaagtgaaaccaagggtacagtttattttagtgaagtgcagtttcaaaaggatgaacaactgtatgagcgattatttgccgaatctcacttatatttctaccgtaaccgtgatagatttagtgactagcaagcagttataatatatccatctcggaacatagaacaaagtgatatttctccccatcgttctttgcttaatggcgatcaagtgcatagaatatatttagatgagttaggagacattcaagaattacccctatgggtaggattaatggtactgacgacattaaaagaaagtgaagcaccagcagcagctaggaatttattaaccagaagtaatcaagaatcatcatcaaaagagatgattttagaaatgattacaacaatcatgatgtacaggtttgaaaatttgactttgcgggaggttcaagtcatgttaggaatttcactagaaagaagtcgcgcttatcaagaaattaaacaagaaggaagacaggaaggaagacaagaaggactcaaagagagtgctttaaatttagtcatgcgacagttaaccagacgtttgggagagttgccagaggaagcaaaaaataatattgctcagttatctttgagcaatttagaaaatcttggggaagcgttgttagactttaccagtttacaagatttacaaagttggttaagtcaagtgcaagattaatttattactgatcagaaccccgacttttcaagataattcaatatttatataagtcggggatctcaaaaatagtagattttaaattataattatggaacaaacaaatcaaaatcaaattaccaaaatattacagtaataataatgtccctagcaccttggagaagtttaataactcgcgctttacacaaaaaccgcagtttagtttattcccgttatgtgcaacttgcaaccgtgcgagaaaatggtttacctgcaaaccgcactgtagtatttcgtggttttctggaagataccaaccagctaaaatttattaccgatattcgtagtgcaaaagctgaacaaataccacaacaaccagcagcagaaatttgttggtattttcccaactctagagaacaatttcgtattagtggaaatttaattttagttacttttaattctcatccccatttacaaccagcgagaataaaaatgtggcaagaattaagtgatgctgcacgtttacaatttgcttggcctactcctggtaaagaaagagtaagaacaccagaagcatttacaccatcagcacccaaccctttagaaccattagaaaccttttgtttattattacttgaacctaccgaagtagactatttagaattgcggggtgaaccacaaaatagaactatttataaacttgatgaaaatcaagaatgggattttgaagaaatcaatccgtaagtcttcaggtagtagactcataacttctattcttttattactgtcacctgtcacctgtcacctgtcacctgtcacctattgctcttgacattaaggtaaaatttccacaatcgtacctttctgaacaactttatataattcatcaacatctttattttttaaagatggacaacctaaagtccagttattttttgcatcaatcatttcatcagcacccgcaggtacaccatgaatacctacttcaccaccaataggaagataccaagctaattcaccattgattttagcttgaaaatgctttctccaagattgtgaattaggataatttaaccacataaattttgaccattggggatgaggataaaggtctttaatttgtaaaataccttcgggtgtttttttgtcaccttctctttttttatcacctgtggggttagcaccaaaaaccacaggataagatttaataggtgtgagattgtaatataatgttagtctgtgctgagatttttcaattaagatagatattttatctttattaataggttcggtaattattttttctattggttggtcataatttaataattcattgccaattataggtttatgtattttgtgatttgtttgacaatttgtcatacataaaacctcggcaatttctgtcactggaaatatcaaacctgcacgcaagagtaacccataaaatacagaaccagtaacaaaaaacaaaataatgtttaataggattctctgttgtttaaggtatttggttattgattctgtattcatgatttgtatgtttgtttaaacctgctacaaataaatattctgacttttgactcctaactactgattcctgaattattacattggttaaatcccagcaccgtctaaaaattcctgtattgttttatctcgaagattacagaaattatgctcttttggtaattcatctacttgaatgtatttacctactaaaaccggaactttgacgggattttgcagagtttctattttttcttctagtgcttcaatacgatctaataaagtacgaattacttgagcttctgagtctggtaggttgttgtgttccaatggtgaaactttcactccagaacggtaaacaatacgtccaggaatcccgacaacggtacaatcagagggaacatctcttaaaactactgaacctgcaccgatacggacgttattacctatttgcagatttcctaaaacttttgcccctgcaccaacaacgacgttttcacctaatgtggggtgacgtttaccgctttctttacctgtaccacccagggtaacgccttgataaatgagggcgtagtctccaataatggcggtttcgccaatgacaacgcccataccgtggtcaataaatacgcctctgccaattactgcccctgggtgaatttcaatacccgttaaaaaccgagcaatatgagaaatgagccggggaataaagggaatgccaatagcacgcaaccagtgagccagtctgtgaaggattaaagcctgtaaaccagggtagcaaaacaagacttctaaccaattccgggctgctgggtcacgttcaaaaatgatgcgaaagtcggcacgcagtgtagatagcatctagatagtacccaataagcaaaacaagctactttcccattttatcgttacttggtaattggtgattggtgattgggaagtatcggctcattgacactctcctgcctatatgattcagatcacggacaagatgttgccttgtggtttaggattcggaaactgctactctaattagtggtctaatggtcatggtgcatcaatttgtcagtagattttgtagtttcaggaacttgtaatctgctgtgttagtcaagtaaaaaagtgcagggtgcagagaggaaatttctgaggtttcggaaattctctttggatatttaggtaaatggtagggtttgttagatgaaagatttgatttgctctgtctcattaactctggaattattcttaccaaaactaacagttctccacagccagcctacacaaataactttatgatttactgaatactaaatattgttggtaaattaagtaaaaaatgtaactcattctgctatgcagcaagaggttttaatgctgtaaaaatattccggtggaatgtttctactgactgctggtatatattactgacttgccttcactcagtaattacggttggctcggtaacgattatttcacatctagaaagtaaaaaaattggcttaaattttccggatctacaaaaaattttgagtttattgttacacgtaaatatgtaagcacgatgaatatcaaactcgataaacacactccagatagtctggcatctttatttgtccttctcatggaagaaggaatgacaccaaatcaaattttggttggtattattcgtctagcgacggatagcaaagaattagaaggcacgattgtctcagccgattgtatacgtttcctgttgtcgacaatgccactagatacaagtgcgccaggggtgactgggtttgtattatccctggccaaagaaggcgttagtagcttgatgctgttggatgctttgggttttgcctgctatgtttgtggtttgttcgatactgctagtttgctccgcttgacttatcagagattgcaagctgacaaaatcatttcccaaatgctgcgcgactaagagctaatgactaaccaatgtttttttagacggctcatgccaaatcaaaaaatgctcaaccaaacaatggatgaactgataaaactgataaaagagttatatgtttcctgtgagatatttagccagttgtagtgaagcgactacaaggttcagggactgctacaacatatagcggtgttgtgcagtgcttcatcaacaactggcgagtggctgtaagttctaagggttggctgccatccttcccttggaactatttttaactatcctgttctttttgttgatatttctattaaaacggtaactaaaaaattttgtctgccaaattgccaaaaccttgaattgtttggctgacggtggaaatgaggattttgattgcatagatggggcgttgaggaacgccccttttcctattttcctcatggtagggggagttggggagaaatatttaggggttgctgagaaagtctttccgtgagggcataggagtcaggagtcaggagtcaggagtcaggaggagatttgaaaatttctttgccatctcttgaaatcccaaaaaatgcacactttttccggtatacccttcaaaacccttgcactaatttctgtgtttatcagcctctaacctttgatatatcaaggttttaggtttattcagcaaaccctatttacctcctgcctcttgcctcgctcatgatcataatgttggcacaattctttactagctgtgcagcaagttcaaattgaggaaatttttactaattcgtaattcgtaatcagtatttaataggttcaagcctacataaattgtaattgcgaattatgaattatgaattatgaattatgatgatatgttttttatgatcaaattgaattttaccttgttgttggaactgactcagtaagcgcgtaattgtgactctggtagtaccacagatattggcaatatcttcatgagtgaggcgaaaacagaggcgtgttccttcaggtactggttctccaatttgctgttttaaaagttgtaataaatgctgtaatctttctggtacttttcgctgaccagcaataaataaaaaagattgtgtttgttgtaatcgctgttgaattttaggtaataggattttattgaggttgggtgtagctgcaatttctgaaaggtaaattggtactacttcgacatctgcaatggctgtggcttcgtaaatgggtaaagatgtcatactagagccaaaaatcatgcctggttttgctaaccctgtgattatttctgcacctgtttcactaaatgcactgagtttaactaaaccatgacgaacaaaccaaattaataaaggaatgagggtaataatttctcctttggaatgtttatgtataggacgattttcaattaggtcggtgaaatttttaacatctgttgattctactggatcagaggcaacacttttatttattaaccagtgtaatttcgtatgttgctcatgctgattggcaacagatttgactttccaagaggcatcaaatgaatcatcatgacgtggctttaatcgtaataagatttctcggatttgctcagattgagatatctgattaattgtactgaaaaagtaggagtgttgttcttgtgaaatgaaatttattattggttttccaactagaaaattttcgtcaatgtttagtaattgtgctgctactcggttggcttctttgatgataccttgctcatcagttactaaataagctgctggtgcaaattcaaataattcttggtaatgttggcgttgtatttccagcaaggtggaattttgcgtgagttcttcattttgctggtaaagttcctcaactgctaattgcaacatttttgaggtgctatgtagttctttaaatgcttggggtagtagatcagagggaatccagggtaatacggtagcagtttggtataaatctgctaaatgctggtgtaatgcttctgctcgttgcataaatagttgtatgttcacttttaattcccgcctttatatggatattgagtgaaaagtcccattactgtaaatttgggaaagtttttttatagcctttttaatatgttaaaaaatgaaaacttattatattttaagttttaattaatcatttggtaattgtttttaacgttttattattcatatatatatatatatatataataatgagttaaatatattaaaactgtttattttttagcttttctatgtttacttgtagtttgcattataatgcttaattgatgcgaataaccagattgttgatatctgacgtaccctaccaatgtgccagttgcgtaagtcgtccactgataactatatttgtctatagattgggcgaatttgtgggatactgagattggcgatcgcctgattttttgtgagctttgttaccattttgctgatcatgctgggtttgtatctcataccattcactcatgcaatattctgaccaacaaaagcagtattcataccaacaaaaatcacataagttggaatctgctatttgttctccgttggatacaggtttgacgctattatgaggacagtgaatataattactcattggtgttaactcttttttgaatgaaaacaacagctttattaagttatttgtattactcagtttagtgaaaaatggtacacattaggattaacataataaaagtgtgtcaatttttctctgtttaacctagattagtcatatttcgcagccagcaatattaagcacatggatactaaccagttaaaatttgtattaaaacttttaggatgtcccaactaccgcgctgggttaagttccagtgtttttgatgcttttaaaaaagataaaaacaaaatttgcagagatttgaaagcactagaactagtagactattcccaagagattgccacagtaaaaatcaaggatgctggacaggctttgttaaaattagattccagtcaattacccatcagtgataaagaactgaaagtattggaaaagatcggtaaaagttctaaaaaaatcgcccccagtgaaattaaagtttctggtttgaaatcagatgaacgagagacgatattaaacgtattaactggaaggggtttgattgaaatagaaatcaagatgaaaagactcaaagctgaagtgtggctaactccaaggggtatggaatttttgcaggatgaatttatccccaatgaaggtaataatcctgttattagtttagacttattgggtaattatatccggtttttgcggaaaaatttacgccagtcagaaccagttgcttctgtagtatctagcagtgaaaaatcagaaatagaaactatcagtaaacctagtgatgaacaggttttagagactattaaaaaattagattatgaactgggaacagagaattatttacctatttttcatctgcgagaaaagttacaaccacctttatcaagggatgaattagatcaagctttgtataggttgcaaagaaatgatctaattgatttgagttctttacaagaagttagtgcttataccccagaacaaattgatgcgggtatccctcaaaatattggtggtcaattgttttttatcatcgtcaactaacagttatcaattcatccacatagtttgattattttctgattattttctgattatttgcttttttccttaattcctcctcacaccgatttttagatttagcaatgacaaacattaacgatattatcaaacgtgaagtcaacccttttgatgttatcaatttaaagcctactaatttttgggcggatcaacaggatgtaacattaatggttgattcaattcataaagaagcaatcacagagatagaatatttactaaatatagtaggtaaagatcatcgtagtcgtacagttttattagttggtgagtctggtgcaggtaaaagttatttattaggtcgtctcaaacgcactcttaaccctaaagcttttttcgcttatattctttgtaactgggctgatagtagtaatatttggcggcatattttacgccatacagtagatagtttaattcaagttcctgaaggtgagaaagaatcacaattaatgttatggctgaaaagtttatcagcctttacaaaaagtgatatcaaaaaaagaatatttaatgataatttttgggaagcattacaaagtgatcgccaaaaatttattaaacatctcaagaagacctatcaaacagcaggtatctataacccagatatcttttttggtgtgctgcacgatttagcaaatcccgaattatatgatatagcttgtgaatggttgcgaggagatgatttaagtgaagaatccatgaaagaaataaaggttaaacactgtattgatacagaagatgcagccaaaaatattttagctaattttggcagaatttccacacaaacccaaccaatagtcttatgttttgataatttagatactatgcctcaatcgccagaaggttttctggatatccaacctttttttaatgttaacacaactattcatggagaaaatttaaaaaatttcttagtcattattagtgtgattacaaatactttaaaacgccattgggatcgtgtactcccagcggacaaagccggaatatataaaacaattcagctaaaagacattactatagaacaagcggaagcactttgggcttatcatctcaaaccattacatcaattagcatatcctcaaccagaatcctctctttttcctctcactcggcaaattttagaaacaaattaccccggtggtagaaccaagccaagaaatacattaactctgggacgtgacgaatatcaaaaatataaaattgatatcatcagtggtcatatcaaacctgaacctgtagcacaaacaaaagttaccataccccaacaaaaaatcacttctgatcctataattactatttctttatctgtaagtgatccagaaacaactcaagcagaatttgaattactatggcaaaaagaatataataaaattcagggtaaaattacaaaattatctctgttatcatcatctgatttggttcagatgttacaacaagctttatcagctttacaactacagggaattaaacccaaacttttaactggaaaatatgctacttattcattgagttatcagcagtctcaaaaacaagaaagagtaggaatagtctggacagaagattcaaacatgactactttttttcatgttatgaatgcttgcaaaaatgtaattcataacaatagctgtaaaactctttatttagtccgtgctggaaatgtaggaaaaccaaatcttgcaggaaatcaactttatagagaactttttactcacactcatcaccaacacatcaaaccaagtctaacagcagttcattatttagcaacataccaaagttttgtcaattctgccaaatctcaagaattagtcattggtgggaaaacgattaatttacaaggactagaatctttaatgcgtgaatctcaaatcttgcataacaaatgtactttgttacatgatttaggtcttgttgctggaacagaaaaagatacaaatggtaaagttagaagagattacagacctgtaaaagattttatcttaaatctcatcaaaactcaaggatttatgggagtaaatacgttaatttcccaaacagctagtcaattttctgatgttcaagaaagtgaaattaaaatgttaattgacctatcatgtcaggaaaagaaagctaaaattatgaacccaaaatctaaattacaagaccaattaatttcttggaatcctcaactataatctatatatcagccaatgcactacctaaccaaagatgcggaaatatatcagcaaatttcccaaatatcccgacataaaactctatggatagatacagaaattgctgattggaatactccctaccccagattatcattaattcaagtattggctgataccacagacttaactggtgagtctgctttaattttagatgttttagataaacctgatttaatccattattttatcaatcaaatcatggtaaaatcagaaattgctaaggtttttcataactctggatttgatgttaaatatttagggggaaaactagcccaaaatattatttgtacataccaattatctagaaaaattacccgcgaaaaactacaagtaagtaatttaaaactcaaaaccttagctgtagaactttgtcacttttctgatgtagatgtagaagaaggaacaagtgactggggaaaacgtcctctcactcaaaaacagctaaactatgcagcaatggatacagtctatttagctgctgtccatcgtcgcttactacaaatatatcaacctgaagctattaatgagatttttaatatggtcaataataaatctgaaaattcatctttaacaccgactaaagttagagtagcgtttgaatgtccgcgtttattttatctcaatcatcattttgatcataaagcaatattttttcctaaaaattccatttccggtattggtaatgtttttcataaattagccgatgatttgatacaattacttttgattaatccccaaattaaatctttattaattgccgatgtaagtagattaaatttagaacaaatatcatcggaaattcaacaaatattttatacaaatcaattcttcccttatttacaaaatattatcagtcaagatgacagtaaagcacccgctttattacaaatttggcaaggaatacaaggactgattaaaaaactcacagagttattaattatcaatcggcgttattgtagtgctgagacagtaattaaaaatacttttattcaggaagaaagaactttagaatattattttaatttacctgatggtacacaacaattagttagaggtgaatttgattgtttagtttttaattttgaagttaaacgcctgtgtatgatagagtttaaaacctatcaccctgtagatccagcagcacagttagcacaggtttctctgtatagttatatgttatttcacaagaaaaaagcggcggtagattctgcggtttattgtgttttacctgaatttaaagattaccaatattcctgggaacaattagaaaatacaattcatcaattaattccctacaaactattacaaatgcaggaatggttaaaatgggaatctcccaaccccaacccaccacctgcgacaactcaacctcatttgtgtgaaatttgtcctcaacaacaaaagtgtcagacattttttaatactaaaaatccaatgtctaatttaatacaatgtatagagatgatgatagagttatgtgatcggttaacaactaggtcaactattaatgctgatgaaattggggaatgtttagttacaaatgtagaatcagatcccccccaactccccttagaaaaggaggagaattcaacaactattaatgctgatgaaattggggaatgtttagttacaactttggcatcttttaaagttaatgtagattattatggtgctgatgtgagtccggcatttattcgggtgaaaattaaaccccatttaggggtaaaagtgccgtcaattttaaaattatctgctgatttacaagtacaattagggttagaatatcctcctttaattgcgccccaagctggttatgtcagtgttgatttaccacgcaaagatagacaaattgctaaatttgaagattatattcaaaaacagtttttaccagcaaatacacctgtaaaaattgctgtgggaataggtattgatggtagcttattagaagctgatttatctgatccgaatacttgccattttttagtaggaggaacaacaggaagcggtaaaagtgaatttttaagatccctacttctcagtttattgtatcgtcattctccccaacatctgaaaattgccttagttgatccgaaaagagtgacatttcccgaatttgaacaaattccctggttatattcaccagttgttaaagatagcgatcgcgctatagaattaatggaagaattattgatagaaatggaatctcgctatcaaaaatttgaaaaagctaagtgtaaagatttaacagattataatcacaaatcttccccacctttaccccggatagtatgtatttttgatgaatatgccgattttatggcagaaaaagaaattcgtactgcattagaacaaagtatcaaacgtttaggtgcaatggcaagagcagcaggaatacatttaattattgctacccaacgtccagaagcggggatagtcacccctattattcgctcaaatttaccgggaagaattgctttaagaacctctagcgaagcggattctaaaattgttcttggtggaacacaaacagcagcagcatatctgttaggtaaaggtgatttactttatcaagttggttctcagttacatcgtttacaaagtttattagtaaaaaatatgaaactaccttaaaaaagtccttaacttttttcggggtataaccgcataaaggagaaaagatagcccaaagcaaattttcgcatctaccaaaagactaaattaaccaaagttaaaatctattagataatatgtacgctacattaatgggaatgcgtcagcagaggaaataaaaatgggatatgtaattgcaactgcaaacatgaaaggtggagtgggtaaaactacggttactgttaatttagccacttgtttagcaaaaaatcacggaaaaaaggtattggttctcgatttagatagtcaaattagtgctaccctcagtttaatgtcaccgatggagtttgctaaacgtcgcaaacaaagaaagacttttagatatttgatagatgaagttattaacccatatcccaatgctgaatacaagattcaggatatcattcaaggtgaattatgtaagctgccgggattggatttattgccaggagatatcgacttatatgatgaatttgtcgtttcagaaatgctgcataatcaagcattagccttgggtgaacaagattttgaaactatttggaatcgttttgaaagagtcttaattagagacattttaaaaccagttcgggatgaatatgattttattcttttagactgcgctcctggttataatctcatgactcgtagtgctttagcaactagtgatttttatcttttacctgctaaaccagaacctttatctgtggtgggtattcaattattagaaagacgcattgctaagttgaaagacagtcatgaacatgaagcaaaaatcaatatcaaaatgttgggaattgtctttagtatgtgcaatactaatttattgactggcagatattataaacaagtaatgcaccgagttgtggaagattttggtgtagaaactatttgtcaggcacaaattcccgttgatgtcaatgtagcgaaagctgttgatagttttatgccggtaacgttaatgagtccgggttctgctggtgcgaagtcatttatgcagttgactgaggaattattgcggaagttgtaaaggctatataatagatcctcgattgattaaaaaagtcggggatcttggtatgctcacattatgattaaatttgctataatatattctgaaatttcatgcacattatttctcgtaaagcttttcgtcaattttgtgaacagtatcctgatagtgaaagtgcattgactcgctggtttaaacttatgaatggggctaattttgaaacttttgatgaattgcgctctgtttttcctagtgctgatatggtaggtgatttaattgtatttaatattggtggtaataaatatcgtttaattacttcaattcattttaatcgccaaaaagtgtatattcgcaagatattaactcattcagaatacgacaaaaatctatggaaaaattaactacattgccccctgatattaatatccattggactgctattgctcctttgcttacaattcgtaatgaagaagaatatgatcaagctatcgaaagattaaataatttacttgatgaaatcggtactaacgaacagcatcctctttataatttactggatacgttaggaacagtaattgaggcttatgaaaaagaacattatgctattcctaattgtcatggaaatgatatattagcttatttaattgaagaacacaaattgagtttatcagatttacctgaaattggtacagcagaaacaataaaggctattttgaataaagaacaagcattaacttttaatcaaattcaacagttagcacaacgttttcatgttcccattcaagtatttatcagttaaactctaatttattggtacttattttttaccaaatttctcttaaatctaaaacaaatcctggtaaaatatcttcaccatttaatgtttgaggatgatctaattcttccacaggttgactaggacgataaatatatactttctgttgtttcctgtcaattaaccaagctaatttcacaccattttctatatattcttccattttttcttgtagtgttttcaagctatctgtttcagaacgcaactctactacaaaatcaggacaaattggcgcaaatttctttctttgttctgtgggtattgcttcccatctttccttttttatccatgctgcatcaggagaacgcacagcaccattaggtaaggtaaaaccaccactagaaccaaaacctactcctgtaccatctttttttgtccaaatacctaattgcacaattaaattaaaattacgttcatctgtttctgatccggtaggtgacataatcaataaatctccaaattggttacgttcaattctaaaatcacggtttaattgacagaaatcgaaaaattgatcatcagtcatgatgatatctggctgcatttttatcaccattggtaagatttctgtaactgtgggtgtttgtgtattcatagttttgtttttggatgtagaaaatgaagatgtagatccgttgattgattaatcattaattgattaccaaatttctcttaaatctaaaacaaatcctggtaaaatatcttcaccatttaatgtttgaggatgatctaattcttccacaggttgactaggacgataaatatatactttctgttgttttctatcaatcaaccaagctaatttcacaccattttctatatattcttccattttttcttgtagtgttttcaagctatctgtttcagaacgcaactctactacaaaatcaggacaaattggcgcaaatttctttctttgttctgtgggtattgcttcccatctttccttttttatccatgctgcatcaggagaacgcacagcaccattaggtaaggtaaaaccaccactagaaccaaaacctacacctgtaccatcttgttttgtccatgtccataattgaccagttaaattaaaattgcgttcatctgtttctgaaccggtaggtgacataattaataaatctccaaattggttacgttcaattctaaaatcacggtttaattgacagaaatcgaaaaattgatcatcagtcatgatgatatctggctgcatttttatcaccattggtaagatgtctgtacctgtgggtgtttgtgtgttcatagttttgtttttggatgtggaaaatgaagatgtagatccgttgattgattaatcattaattgattaccaaatctctgttaaatctaaaataaatcctggtaaaatatcctctccatttaatgtttggggatgatctaattcttccacaggttgactaggacgataaatatatactttctgttgttttctatcaattaaccaagctaatcttacaccattttctagatattctaccatcttttcttgtaatttttttaaactatcatttggtgaacgtagttcaattacaaagtcaggtgcaatgggagcaaatttttcttgttgttcaggtgttaaactttcccatcgttctttttttacccaagcaacatcaggagaaacatcttttccattaggtaatttaaaacccgtggaagaatcaaaacctttacctaatttggtttttttattccaaattcctaattctacaacaatatcaaaattacaatttcctgtatcgctacctgttggtggcataattattaattcccctgatgctgtgcgctcaaatcttaaatctcggttattgcgacaaagttctaaaaattgatcatctgttaaattgaggtttaatgttagtctaggaggtaaagttgttatagtagtgttcatgatgtttacctcaatatgttaggttttgattgatccagttgataatcttgtgaaaaatgaggatgcagatccccgacttctgatgtgaatttatcatttgtttacaagattaaaaaagaagtcggggatcttaaccacctacattatatgatactaaaattcaccagctaatgcaggaacacagcgttcacaaagtaaaggatgtgcttcggattctcctacatgagtagaataattccaacagcgatcgcatttctcaccatctgcatttactaccccaatagtccaatcttctgtggttgctgtatatttaacatcagcaattttggcaggatcatctactatttccacctgagatgctaataataaatatcgcaactcatccacaccattacccttttcagtattgaacccttcgatagcttcacataactgtttgtgagggatatgtaataacacctttgcttccaaagatgaaccaatcattttttctatccgtgcttgttccatcaccttattaacatcggtgcggagtgtacgcagcgtatcccaaaattctgctaattctccattgtcccattcatccttaacctgaatccaaccagcttcaaacactgatttataaggagtttgataggggataaattgccagatatcttccgcagtatgacacaaaacaggtgcgatcgctctggctaaattttccaatgcaatttgcaaaactgtttgacaactgcgacgacggaaactatcagcagcactgatatataatctatccttcgcaatgtctaaataaaaattagacaaatccacaacacagaaattctgtacagtttggaaaaagcggaaaaattggaagttatcaaaagcagttgtcacctcattaaatacctcacggatacggtgcaacatataccgatccaaatcaggtaattcttcaaaatcaaccgcatctttttgaggatcaaaatcatgcaaactacccaacaaaaaccgtgcagtattgcggattttatttctcacatcagctaattgtttaatgatgttaccacccaaacgcacatcaccagaataatcaactgaagacacccacaaccgcaaaacatctgcaccataagcgggttcttttttctgatcctttcccccattaataatgatttgtggatcaaccacattacccacagatttactcattttccggccttgttcatctaacacaaaaccatgagttaaaactgttttataaggtgcaattccatttaccgcaacactggttaacagcgaagattgaaaccatccccgatgttgatcagaaccttccaaatacatatccaccggataacctaattctggtctttgcttcgccacagccgcccaagacgaaccagaatcaaaccacacatccatcgtatctgtaccccggcggtacttgcgcccattactgcggtaaggttcgggtaacaactcctcaacagacaactcccaccaagcatcagaacccttctctgcaatgatagcttggatgtggttaatggtatctgcattcagcaacgcttccccagtttcctcatcatagaacacaggaatgggaacaccccaggaacgctgacgagagatacaccagtcagaacgttctgcaaccatcggtgtaattctattctcaccttgtgcgggaatccaacgcacagatgcgatcgcctttaaagcatcttccctaaatcctgccacagaagcaaaccattgttcagtagcgcggaaaatcgtcggtttcttggttctccaatcataaggatatttatgagagtatgcttcctctttcaacaaagaacccgcttctgtcagcgcgtcaataattgcttgattaccatcacccaacacattcaagccagcaaacttaccagcctcatccgtgaaattaccattatcatccaccggtgcaagaatcggcagaccataacgctgacccacaatgtaatcttcttgaccatgaccaggggcagtatgcaccaaaccagtaccagaatcagtagtgatataatcaccaccaaccaccaccggactttcacggtcaaaaagcggatgacgataagtgcagtgttccaaatcctgacccgcaaaagtcgccttcacagtcaactcaacatccaaagttgcagtcaacctttctaccaactccgccgccacgatcagatacttgcatcctctctgcgcctctgcgtctctgcgtgccacctcaacaaccgcataattcaacgccccattcacagccaccgccaaattacccggtatcgtccagggagtagttgtccacacagctacgcccaaatcaggcaagaacggctctaaaacagattttagcttttcggacaccttcaccaccgggaaagcggcgtaaatactccgagaaacgtgaccttcaggatattctaactcagcttctgctaaagcggttttagagctaggactccagtgtacaggctttaaaccacgatagatatatccttttaagtacattgccccaaaaacgccaatttgcgcggcttcgtattctggttttaaggtcagataaggattatcccaatcaccccacaccccatagcgtttaaagctttctctttgttcatctacggttttaagggcgaaccctttcgctttttggcgcaattgtaaaggtgtaagattttgtcgttctgctgatttcatgttttgcagaacttttaactcaatcggcaatccgtgacaatcccagccagcgacgtaacgaattttacgaccttgcaggaggtggtaacggttaataatatctttgagaatcttatttaaagcatgaccaatatgcaactgaccgttagcatagggcggtccgtcgtgcagtataaatacttcgcctgggttttcttgggagaggcgagaataaatgttgttttcttcccagaatttttggatttcgggttcgcgcttgattgcgtttgcccgcatatcaaagttagtcttggggaggttaacggtatctttgtattgtccgggttcagtcacagtttcatgcctaagatatgtttgcagttatttgatcaattataagagataggcatgaaaaccaagatttcccctttagtcgtaggttgggttgaggtacgaaacccaacagcagttatgggtattttggaatcatgttgggtttcacttcgttcaacccaacctacggaactaatcttgaataaagatttagaacagttaaaagatatatggacaaacttataaatctattgggttgagaaagcccaacagcatacaagactattatatttggcttaatttatgttgatgaattgctacgaaaataaccacctccttgttcagaagttaggttttcagaagtattaccatctccatcccgccagtaaccttcaatataagtcccatttcgttcatatccacttacccaatgcggctgtacataatcaacatcattagtaaaattggaaacttcttctaaagcatttacttctgaaacatcttcataaagaacaacatccatctcactcatatcagatggattatcaaatatttctgcttccataaccagagattcattaataatttcaacatcaggaatgattgtatcacctaaaatcaatatatcacctataccaacagctaaagtgccaacagcaataaccttggcgacttttttagcacctcttcctgccatttctaagtcattattagcaagtccattgaaaacttcacctacgctggtagcagtgtatcccaaagttcttcccacgccaatagctgtagacttaactgcattttcaacatcagaaaatccacttgcaatttttcgttcatcgtcagtagcaactccgtgaactgctgtaactacaccatcagctaaagtagctaatgtttctgtggatgcaacagttgattgatatacaccttgtccgacttctttgataaagttgctgtccaagtaatttcccaccacttctattccaccaccaacagtgctaccaataattttaccagcaatattaccaaaagtttttaagaatcccatattttttaatacactcattaatttaagtatcaattaatttaaacccttgcgtcaacagtaaaatcacttatttgaatttttaatttattactaacataatttttctaattagtgcctgaaatagttacaaaatgatattatcgaaataatacttactattcatggttcagcagatttatgatgaataaacttttattatctacttccgtaattactacatttgttttgttgactacaacttctgctaaagctgaaaggttatttatatattctcctggtgataatcaatttcttggcgatgtagggtataatggtagcttatgtaatgaaaatgaaagggattgtatttttaatcctgttggaatttatggttctgaggttggtcgtttcagcatctttaatgatgttagtcattacggctctagcgttggacgttatagtgtttgtaatcagattattagacaaaaagatgcaccagttttaatcatggaattaggcaataaatgggaaatgattgatgtcctaaatattcgttatcaacagcaaacagaaattgggcgcagattagtttttggagcttgtagggataattaattgatagagaaattaattgatgagataacccaacaccaccaattggtattataatgttgggtttcatttcattcaacccaacctacaaatattggaagttatagaaaatgactaaaaatacaccccaattactagacatagtagcacttacagttgatttacctgaatataaattgttgcgtggtcaagttggtacaatagttgaactattagccgatagtgctgcttttgaagtataatttagtgatagtaatggacaaacatatcaatctgttgggttgcgtccagagcaaatcatggttttacatcttgatccagcaccacctaatttagtaccggaaatggttacagcataagtaattgtaggttgggttgaggtactaaacccaacacttcacatttatattttgattaagtgatatgagtaaagacaacatactaaaaacttttttagatgaattgtttctgcaaagagaggctttaagtacactatttactaattcaacagcttccgaaaattctgcgtattttttctcggaaatggcaagcggaactgacccttttaatgatagttatccaggtccaccattatgggatacagattgggatgatatgaaaattatgtaccactggcaaaaatggacgcgattaaatcaagtaaaaatttattcaagggatatttatgcagcatcattatttcttgtacttaataactggatacaatctctcggagttcaactaggaattaataaccaagacgaacgcctaaatgttggcgaaaatattagaaatgcaaaactatcaaaacttatatgggcaacagcaaataattttcgtcattataatgagtggtcttctccaactaatcaggcacaacgatcaattgttgttctattagatgctggcattactccaccaatgaatataattcttgccgcaaaagttttgtatgttattggggtcaacacatacgaggaactagaaaagaagattgttgttataggtgaagaactaaaagataaagcagcataaataattccgacagcctccattactggttacgccagtagtcgtaggtttggttgaggaacgaaacccaacacctcacatttatataatgttgggtttcatttcattcaacccaacctacattttttgatttctcaggtttacaatagacatctccgaaaattaaatatgcataacctgaaacccttggtagggacaattcatgaattgtccctacatctttttcggagaagtctaatatatacaatattttttatataaaaccttcaacatctggaattataccctgacgtaaccattccatcatcaaatcaggatgtataatatgaaaagcatgattaggtgtcgtataaatcaggtgtctatctggttgaataatgcgcgtatcattagaaatgaaatctttaaaattaactgttactaaaatattagccttaccagctatagcagtttctaaaacatgggcatcttcttgatcactgatagcaattacacccgtaccccctaaagttaattgtggagaaaaataaactggtccgagttgggtataactaacaattgccgatagataagaattaactaatgttgtggtaatatttaactgtgactccaggaccgaacgcaatcggttaatcataccccaagatataattaactgtactaaccctatttcacaacgtccttgagttattattgtaactaaactttgactcgatgaatttttctttcctttcctatctgacagtaaagaggcacaccagatgttaagatcaagacataaccgtattaaattttcttgttgctgcattttcaaataagatttaacttgataaagtgagttattaatgaataatagttaagtttatctaatgtctatcctctttaattttagaggaaatacaatctttattataccataaaataaacaagtaatttatatgtcagaacaaccgagattgactcacagtgagcaagaaagcaaaagtatgatcattgatttgtctaaaatcgcagaaaaaacacaaatacagaatattcatctagccttaaaatttttagcctatctcccaacagaagcttatacagcattgcaaaatatagaagaaatagcttcatctgaagattggcaaaaactcagttatctaatagcacgtactttagtagatgcacaatatgaaattactcatcgtcaaattatagaacatataaaagtggataatttggatgacatggaatctgatgatgatattttagctgctgctgtgaaaattacgagttgtagattgggttaagcgcagcgtaactcaacaccacatcttgaatattattatcaatgttgggtttcacttcattcaacccaacctacattttttgattttccaggtttacaggtatttagattttcatggtaatttattgcgatcaaaatacttaaacccgccataagtctcacactaatagatcaagtgttgagattaatgacgggtttctctatcggcttcaaggtactggtaataactacaaaaaaacctaaaccttaactggctgtttgacggtttctgtcgcctgataaggatgagaattgttaataggttgtggtcctaagaaagcttccttacctgtaatcaatcgagaacgacgattacgagtaatataattccatgcccactgaattaccactaccatcttagtatcaaactcaattaagaaatagatgtgaattactagccaaaatacccaagcaataaaacctgtaagtttcaaaaaacctaaatctactaccgctcaattttgcccaatcattgctaaactaccaacatcggtgtaatgaaatggtggcaaagtatgaccttaacttccgatcaatagcgaactgcttgcagcagcgcttcgctatcgcccaaaaataattaaaaaatcacgttaaaatgcccgaaacccatacctcatatttggttgatcctggcgtaagtcctaaattataagagatgttatgattatgggatgcggtaggtatactagagttttaagtttcacgcaaaggcgcaaagcgcgatcgcagcatcttaagtataaacctatgttaaacttttaattaaattcatacggaaataaaacgcattaatatccgctttcctaattcagttaatatttcttgttccaaacgcatggcttctgttttccgcaagaacatttcagataattcatgggcggaactaaaattcacaagattagaagctaaaaattgtcttatgaatggctgtatattatcccagtttctactcaatattttatatggttcaaaaggagttatcattgccattgtcagactcatcatgttatcaaacattccttctaatttagtaaccatttctttaaccagaacataacggaatgaatttccttgatcagaatataaaaactctatcattcgttctgatgcgatgtagaggttaaaatcctcaatttgagaaaaagtggttaataaatctgacactagctcccattggatagtttcatttttcacacataaatttttgagagcatcccataacacaggcgatcgcttggttaaagtccatttaacaatataaggaaagccgactttgtaagcttgaaaatcgggattcaatttgatagctactccttctatggtggcaaaggctcgaaaaaccaaaacgtagaatttaggaatttgccaggaatactcgtaaactaagctcaatagtttgtcaaaaatttgcctgaagccaaattccacaatagtactttcccgaacattattgccaaatagctgactcagtctaggaattaaaggaggtaaatcagtttctggaggtaaaaattccaatgcaaccaggtcttcagccatggattgaaaatcaccagatataaaatgtaagaagaatataatcagcaagtcacttgtttctggttcaactgcgctcatcatgccaaagtccagaaaagctagttttccatctgcggttactagcacatttcccggatgaggatcagcatgaaaaaatctaccttcaaggagttgttgtaaaaaaaacttaaattccaaagacatcaaatcagcagggtttaatccttgattgcaaagctcttcaattgaagtgatttttacaccattgacccactccattgtcagaactcgactggtggtatactttgagtagatatacggtatataaatatgtggtatgttattgtaaatttcagcaaatttctttccgtttgctccttcttttacatagtccatttccttaaaaatagaattagccagttcatcagtcaaggctctaatatttgtgtggatgaatggaacatttttttgtacccaacttgctaattgctgcaacaagtagatatctaaaaccagaatttcgatgattccaggacgttgcaccttgacagcgacgatttcacctgtatgaagttttcccttgtaaacctgtcctaaagaagcggaagctactggatcgggattcagttcagcatagacttggttatatggaattccaaattcttcttctataatattatacgcttcctcatttgcaaagggaggcaattggtcttgtagattagcaagttcatctacataaataggtggaatcagatcaggacgacaggaaagcaactgtcccaacttgatgaatgtgggacccatattaatcagcttttccactaaaatcttggctcgtagctgctggttcttgaccaagcgtatagttaaccagtcccatagcaggagtaataggaatgagaaagcaaaattgaaaatagctaaccgacgcgcccaaagtttctttggcgattgcttctgttgggacagatcagcaatattatctggtaattttactaattctactgtattatctttcattttttttaagtatagaattcatatttttgaaatcatgcaaggcaacaaataatgctatccatgttggtgattatctatgttgagggacaattcatgaattgtccctacatttatttttctaaatctccaaatcaccaatttttgttgtgtgacagatgagggtagcgaatgcaggttttagtgttgtcacccatcacctatcacccactataattggactttttgtcatcttttctctcttccagtatctcctgcataaaaggacgtgcaagatccttaatgggacgaaccatctgctcccaaaattgtttctgatcctgtaacaatttgagatagacttcggggctatggggaaaaggaaggctaaaaggcaaagagaaaagtccagacatagagacagaggcactttgaccttcacccatacccataattgtaatagcttcgccaccgttaccatacttgccaaggaaaagattccctacttgtagtccttcaggagcgatcgcagagacaggaaatggaggatcgtaaggatatgtgggaactatatcgaaaacattttcaatgcgataagctaattcttttcctatttgttggttgtagaaatctataaattcttgattaccaattttcggtgatgcgattgcataaactttgatcgcaagtcccccagatgccacagagccaaaccaacggcgtagcgataaagccacacattggctcaaggcggcacccaagctgaaaccagttacccatacctctatgggtttagttggggatgataccctagataaaatcttctcttccaaaaattgaaaaatcttttctagttcttcatcgtcatcaatttcatcgtcttcaaggactttctcaatcaaatcttgagctttttggttaaaatctgctcccagtataattcctcccgcatcagctacagcagtaatgcaagcaaattttcttaaaggaggcaactgacggatatgccggaaatctgagggttttagctcactccttatagtcttgaaaaagtattgaatttcatcagccaccgattcacaagctagatgaaccccttggacaatttttgccctttggacagccacagccccataattaatcagtttccaatcgaaatcagaaattatattatccaagctgacaacgctacctttagtaccaagagatgtgcctcgcaaggaaatggcatactgattaccaatttgagtatttttgagaattagtccccgaatatttgttttgtcattacggatagtgtgaactaactcccatccctgatttttatagatagccgtgtaaaatttttttagctcttcatcattaacactatgatcatcatactcgaaaaaatcatatgcatattgagaaagattggtcatcaggatagcttcatcaaaactaaatcccttacgaagcttcaatactggtttggattcttgttgattttctgaaatcacagatgattcagtagatggtgctgatgattcttgttgattttctgaaatcacagatgattcagtagatggtgctgatgattcttgttgattttctgaaatcacagatgattcagtagatggtgctgatgattcttgttgattttctgaaatcacagatgattcagtagatggtgctgatgatgattcttgtttattttcaggactagagatcggttggcaataaattcccaagcgcagtaacaaaccctggggaccaccatgagaaccaaagaaaccaataatttcttgtccttcaggagcttctaaaacaaaaggttcgacctctgcttttccactacctccaccaaaaattggagatttaatgccttttttggtttcaaattggatggtgataatgtcgtgtttgtgatatcctggtgctgaccgtccccaagttccagttaatttggttaaatgatctcctgcttctatagagacttcttgtcttttaccaccaccaagtccaattcttgctgaacgataagtttctacaggagtagaagccatattttcatattctacttgaagtgtaccaattgcccaagcctcatttataataacgctttttaagcgtgattttggggctgtattttgaggtaaaaattcaaaatctattcctgatattgaaccacctactgcaccgactttgaccaaactattatcagtgataggaacttcttcttgctcccaaacagcaccattaatagtaccatgattagcgttgctagttttatcattactatctccattcaagggataataacctactaatcctgactcatttcccctcaaacgagagttcatattttgctgaatttcttctggagtgcgggcaatattccacaacctaacttctgcgattttgcctttaaagtaaccatcaagtgaccagttacttttggctatatagttcagcttgcggtcaatgttatctggaagatgaaatggtttagtttgcactaattgaccattctgataaagtttagcttccccagatttgctaatagtaacagctatgtgtatccacttaccaatttctaaagcattgggaatttcaataaaatctattcccgcgctggaatacagatgaaatcctagattgttagatgttcctacatgacccaaaacaatgttgttttgtccttgtccattgccaaaatcaataattcttgaccaggattgttgaaagctgctgtactgcacccaagcttccactgtgaatccctgagaataatcattgtttgctgcgggtaaggatacataatcgtctatcccatcaaataatgccatgacggtaatcccccttatcggttgtattacttgtgctaatgctacacctgaataacatacaatccccaatacagaaccactgttaggaatatgttcccaattactggttaaggtctttctggtatatagttggttgttcatgcctataccgactattgtaccgtctggcattacggtaatacctattacagaaccactgttagcaatatgttcccaattactggttaaggtctttctggtatatagttgattattcgtgccaataccaactattgtaccgtctgacattacggtaatacctattacagaaccactgttagcaatatgttcccaattactggttaaggtctttctggtatatagttgattgttcatgcctataccaactatcgtaccgtctgacattacggtaatacctaagacagaaccactgttagcaatatgttcccaattactggttaaggtctttctggtatatagttgattgttcatgcctataccaactatcgtaccgtctgacattacggtaatacctaagacagaaccactattaggaatatgttcccaattactggttaaagtttttctggtatatagttgattgttcatgccaatacctatcacaccaggtatggttttatcacttgtagaaataatttctactacccattcattaccgataccagtattccaagatgtaacgccttgtgctgagtcaggacgatgtaagtaatctcctttccaagatttgagttgaattttgttctcacctatgaactcaattacccattcattaccgataccagtattccaagatgtaacgccttgtgctgagtcaggacgatgtaagtaatctcctttccaagatttgagttgaattttgttctcacctatgaactcaactacccattcattaccgatatcagtattccaagatgtaacgccttgtgctgagtcaggacgatgtaagtaatctcctttccaagatttgagttgaatttttgttcctgtagcgatattcggatgtgcaggaggtttaataaattcagcagtacctattaatccttgtccactactatgagcaagaatgatttgatttagttgtgaatcagtttgtaaatcagtaatgaaattaccattgttttgataaagagttttgactcctgcaaagagaggatgattgggattattaactgctatattaccgccaattccgttgtacactccctggaatttcaaaccaaaagcagctaaaaaagtattccaattatttgcttctacttgcgctcctccttgacctgtcccagcacaaaggtaaaccttacctccatttttcacatattcaattaaaacttggttatttacaatatcgccaccaataaaaatcccgtcatatttttccagggtttctaggttaataggaatattcattcccttagtccaagtatgacccgctttggtcattgtttgttccagagatgctcctgttaacccaaaattattagaaagtacatgaaatttgcctttattatcgcctacaaaatatttggcaatattcagagcaaatgtagctgcatcaggtgtagttttgattcctgcatcacttatagtccattcgtctgcattaacgacaattcgacctaaagatttcaaaactgctgtagtttctggtttaacttctggtttaacttctggttgactcttgggtgctaatgctacacctgaataacatacaatccccaatacagaaccactgttaggaatatgttcccaattactggttaaggtctttctggtatatagttggttgttcatgcctataccgactattgtaccgtctggcattacggtaatacctaagacagaaccactgttaggaatatgttcccaattactggttaaggtctttctggtatatagttggttgttcatgcctataccgactattgtaccgtctggcattacggtaatacctaagacagaaccactgttaggaatatattcccaattactggttaaggtctttctggtatatagttggttgttcatgccaataccaactattgtaccgtctgacattacggtaatacctattacagaaccactgttaggaatatattcccaattactggttaaggtctttctggtatatagttgattattcgtgccaataccaactattgtaccgtctgagattacggtaatacctattacagaaccactgttagcaatatgttcccaattactggttaaggtctttctggtatatagttggttgttcatgcctatacctatcacaccaggtatggttttctcacttgtaggttgtattacttgtgcaacaccttttaccctgatggaataaacgcgattacttgagccagaaaaggctgtagcatcagcaccagtgttagtgaaaagaactttactagttaaatttcccaagtccgaagcttctttatctgttgtgaagttgaaacttactgaacctcctccaggataataaatcccaacaaagtcaccttgtttaactgtcatgggtgtagatagggaaaactggttaagtcccaccacgggagttttcatatcactcttacctactactgaccaagaactaccgtcttttcggtaaataatcagttgtagaggagctgttgtatctgcccaaatttcccagccattaatatcgccattaatattaatgggattgttagtatctactaaataaaagttcgttcttgtatcacaaactccacggcttttcagttcatttccaccagttaaatcagcgacaggtatttcttcttgctcccaaatagcaccatttattgtgccatgattagcgttgctggttttgtcgttagcatctccattcaagggataataacctactaatcctgactcatttcccctcaaacgagagttcatattttgctgaatttcttctggagtgcgggcaatattccacagcctgacttctgttatttgaccttcaaagtaaccatcatttgaccagttactctttgctatatagttcagcttgcggtcaatgttatctggaagatgaaatggtttagtttgcactaattgaccattctgataaagtttagcttccccagatttgctaatagtaacagctatgtgtatccacttaccaatttctaaagcattgggaatttcaataaaatctattcccgcgctggaatacagatgaaatcctagattgttagatgttcctacatgacccaaaacaatgttgttttgtccttgtccattgccaaaatcaataattcttgaccaggattgttgaaagctgctgtactgcacccaagcttccactgtgaatccctgagaataatcattgtttgctgcgggtaaggatacataatcgtctatcccatcaaatgatgccatgacggtaatcccccttatcggttgtattacttgtgctaatgctacacctgaataacatacaatccccaatacagaaccactattagcaatatgttcccaattactggttaaggtctttttggtatatagttgattgttcatgcctataccaactattgtaccgtctgccatgacggtaatacccaatacagaaccactattagcaatatgttcccaattactggttaaggtctttttggtatatagttggttgctcatgcctataccgactattgtaccgtctgccatgacgcttaatcacaagtgttgaatcctgcaataaacctttagaatcttttcgttttacccaggtaaaatccattgtctattgagaatagagtcattaattgctcaaatttggtatcaccaataccaatgcacaacttggacaaaatcctcaaaatcttaacattcaacacttctggtataatgactatatcttttggcaattgataattgagagaggaagaggaattagagcaaattttttatccaattcctcatttctaatctcttttacttgacgatagttatatcttcctgatgatcaactttgttggaatttccatcttgtttcttgtcatcatccagcaattcaatcataaaaggacgtgcaatatccttaacgggacgaactaactgattccaaaattgcttctgatctgtcaataattgaatataagtttctgggctatggggaaaaggaacactaaaggggatactaaaaagtccaccaaaggatatggatccgctttgaccaccaaatccagtgactgtaattgcttcaccaccgttagcaaacttacccaggaacacattaccgacctggaatccttcaggagcgatcgcagaaattgggaaaggtggatctagagggatagtcggaatagcatccaaggtattttcgatgcgatagcttagttctgatccgatttgtttgttgtagaaatcgacaaaatcttgattaccaattttacaagcagcaatggcataaactttgatttgtagtcctccagaagaaacagaaccaaaccagcgtcttaaagcaagaccagcgagttggcacacagatccacctaaactatggcctgttgaccaaatttctataggttcattcaatggtgttagtttagacaaaagctcttcttctagaaaagacaaaactttttgcagttcttcgtcatcatcaatttcaccatcggcaaaaatttgctgaaccaaatcttgagcttgttcctcaaactccgtacccagtcgaattgacccagcatctgccaaagcagtgagacaagcaaattttcgcaggggaggtaaattatagagacggcggaaatcggagggttttaactcgcctcttaaagtcttgaagaagaattgaacctcatcagcaaccgactcaaacgccaaatgaaatccccgtactactttcgcttgtcgggtagccaaattaccataatcaacgagtttccaatctatatcagaaactacgttatccaagttaatggaaccgtcactcatacctgcagaaccccgccaggcaatggcatactgctgattatttgaggattgagtatttttgagcactagtgcgcgaatattagtgtcatcattacgcacacagtgaactagctcccatccttgatttctataaagagccttgtacaccgtcttgatttctacatcatcaacactaccatcatcatactggaaaacatcgtaggcatacttagaaaaatttgtcattaaaatggcttcatcaaaactaaagcctctacgcaacttcatggatgtagtcatggtcaaatctccataattttgtgaacatgaaaatcagctatcaaccagaactgtattagtctattctggtcatatctaactgagactttgtattgggaagacgatccagatatcctctgagaatttctgcgatcgcactggcatggggatgtcgtagtaagttcatatgattaccgggtacagtatgtacatcgacacctccttttgccaactcaccccacccccaagttttatcttcatcaagttggacatgttttgtgatcaaaagaataactttgccgtcataagatgatgccttataccgagataaagcccgaatattatctatccacatctttgctagacgaagtgtgagacgaacttgctcacatttggttattttttggggattttggatagcagaatcatgacccagaaatgacagaatcttcttgattagaccgtcattctgctcatagccattcgattgtgacaacaattttggttccgtaactctgatgagggcaaggtaatcatagacccaaggccacatatctggtatgctgacaaataaaccagctactcttaccatatccctagttttaaaacccttcctcaagtcagcaggagcatccaagagagttaacatttcaacttcttgatttgcttgtttgagacgaatagccatttcataaacaatgtaagctcctagtgaccaacctgccagtaagtaaggaccctcaggctgaattgaacgaatagcttcaatgtaatagtcagccatttcttcaactcgtttcaaagaccatttgtcttcggttagtcctggtgattgtatcccatagacaggttgctctggtccaagttgataggctacagggtaataaggaaaaataacactagccaacgggtgaatccagaagaaaggtctcttgttgccatttggtttgatgggaactatacagggataagatttgagagcttcttcaatatctccgttacgatttcccgctttttctgatgatgaatcgggctgttcaataatttgagctaattctgcaatggtggaagactggaacagcacccataacggcaaatcagacccaaaagtctcttgtatctgagatacaatttgcgctgctagtaccgaatgaccacccagttcaaagaagttatcatggatacctattttctctagactcagaactctttgaaagatttcagttagctgactttccacctgattgcgaggttctgtttgttcagtaactttcaatcctgtgtaagtctgagttaactgtttgatgtcaacttcccctgcatctgttaaaggcatttcatccagctgaacaaaatggcagtgagtcaaagtcccaaatcgatcagctacgccaagctgatgcaattgttcaatggacaattgatcagtgttgctggtaaataaagctgttaattgctgtaaattctggcaatctagcgtaaatctctgaatatggtacttctcaccatccaatcctatgaaaacattgctagaaccatgtgctaaagctactaacaaggaatccatgccttgagatggtgaaatagcacaatagcccctagcttgactaagctctttcatgggatatccacgactcatacccgtttcgtcccacatactccaactcaagcaatagctgttcccataactgtgttgtctttgataagcactaaaagcttcttggaaactgttagctgcggcataagcactcacacctgtacccccaaagaaactattgactgaggagaagtggatgaagaaaccatgattctgatcttgcaataggtgatggagtacccaagttcccatgaccttttgttgcaaccctgcgattaagctttctgggctggcagatgttattaattgttcttgcagaactcctgctaaatgaattaccccatcaaattgagtttgccactcagatgatagcaaatcaagagtctttttcatgtcatccaggttacaaatatcaacatcttgataaataactgaacctggaagttgccttaactcttgataagctcgaattttagcggttaattgatcttcacctgcgttgatatttttcccactgctttcatctggtaaaggagtccgaccaattaacaacaaccgagcttggtaattctctaacagatacttggcaatcttaacaccaattcctcctaatccaccagtaattaagtaaactccaccttctttgaaaggaagttcttgttggggttcgttttcccaatctgccttttgtaaacgaggaactaagcgttgtccgtttctataggccacttctgcttcaggagtcgagacagaaaattctgacaacaaattactcctattaatttccacctcagtaataggtaaatcaatgtggcgacattccaaccaagggatttcctgcggtatggttttcaggaagcctaaaacagttgctttttgatatgcaatcccatcagttggtaaaataaattgactgcaactagctacaaacaacaactgtatccgctcttttgtttctagcacctgctctagtgcttggactaaaaacagtaagctatacagtcctttttgttgactaatctccaaagtttccaagtcggagataccaacattattggtttcataattccagaggtggaaaatatgaccaatggtataattatcagcttttaatgatgtaattaaacgcagataatctgctgcctgagcaggattaattacataatcttctttgctaattgcagcaaaattatttcctgccgcaactgtaatacaaggataattttgcgcttccagtctttgggcaactgattgccctaatcctaaatcatctacaaagataactacagcttgtttgacagtagaactaggattaattcgcgcctgtttctgacaccagactttctgataaaaccaatcaggaattgtattttttcctagttgaatatcaatttcttgaatcagcgttctaaaatcaccagcttctagtttctgtttcagttgagaacgctgaattttaccactagtagttttaggaaattcctgacgttctacaggcaggacataataaggagtaattcctaactgagtggtaacttctcttctgatagcttgaataagttcgccgtcgaattgagaattggttttatctggtgaaaagaaaattgctaatccttctgttcctgtttctgggttggagaatgcacaagcacctgcataggtgggagctacaccatcaatgctattgacaatatcttcaatttcatagcagtaataattagctccgttaatgatgataatttccttctctcttcctgttaaaactagacgaccattgagaataaatcctaagtctccggtattaaaccaaccatcccccacaaaagcttctgcattggctttgggattatttaaataaccaggtgtgactacttttcctttaatctgtaaacgcccaattacaccttctggtaatagggaattttgagcatcggtaatgcgaatttgcacccctggaactggcagcccaagatcagtaaactcaatcacatcaatgttggcatccgtggttaattctaattgaccaccaacagaagatttcttaatccgataaatatcagtttgcttgttaaactgattttgataagtcatgcaagtacaaacttcagccataccaaaagctggttgcataacttgatcagaaatcccaaaagatgccacattagctaaaaattctctgacaactttagccgttacctgttctcctgcattcattaagaatttaactgaggaaagatcccaagtatgaccaggattttttgccagtgcctcactaattaacttaaatccaaagtttggtgtccaactgtgagaaacgcgatattcctccatcaaatctaaccattttaaggggttagctaagatcactgccgttgctacttcgatttgttgacaacccaaatatgtgtctttaaagtggcaggttaatataggtacaacgtgatcaactggcaaccaattcagacaaatatcttgagtttcatatccattaaattgtttagctgcatggatatgagcaatgataccttgatgagtttcctgaatacatttaggaacccctgtgctaccagatgttagctgtaagaaagcaacttcatcagggcgactaggataaaattctgcggttggtgaatagtttcttaactcgcctacagaacaaatttttaactctggtagggataataatgaacgcaaattgcccaaagattcaaccagggaatcactggttaaaatacatggatgtcctaataattcccatgtattgtacaacttattcacaactgcatttttctctgtgtaagtgggagctacggctacggttacaggttgaattcctcccagaacgcacgcccacaaggtgggaaaataatctcgcagagaagcaatttgcaaaataactcgctgtcctgcttgcaaaccttgatttcgcaagccgttgagaatgcatttagcctcatctaatagactagagtatgtttgaaattccctttcaccttttgcagagatataagtaataccttggtttttacatctagtggctgtttgaattaatgcttctgttaaagtttggggggcatcctctggaatgttgagcgtaccaccatcactaattgcaggtgtggtaaattgtggtttttctgtaggaacaagaccaactacggaagcagtttcggcaacgggtagggaaattgctgttttctttgttcctggtggtagtagttttcctaagtgcagtggtgaggatgcaggtgtgtgacgtggacttgtaattaccactgcttgatcaatttcgggatggctgtttaattgttgctgccatttgtctaaaagtttgctatcaatcacttctaaagaagtcaaaatctgctcatcaatttgccctgttgcagttaaaggtaaattagatacttgcagatatgccactggcaacatataaacgggcaatttagcctgtaagtgagcattgagagactcagttgatagggatgtggagctaaccacgtaagcaatgagtttaccctcccgcgccagaacatagcagtcttctacaccagagattgatagtaactcctgttctacggtctggaaattgatccggtgtccaccaatccaggcttgccgctgtattaatcctaatacttctaaagatccatctcggcgcagacgaccccaggttttagttctgaataaagttcccaataaggggtgttctatcacccctgtgacagttttttcttgattatgtaaatcggcatcaccaagatcaccaagataaatttctccttccacaccaaaaggaactaattcttgatgatgatctaatacataaatgggtgaattttctacccattcaggataaataaatctattattttgagctttgatagcagggtcttggcatacctttaatatctgctgtttctcagtttcattgagcagtggcaattgactaattttttgttggggattggagacaattgctgttaataaagtttggaaatgtcctgccatctgggcaattgtctgttcatcaaataaatcagtgttgtatttaaaaatacccactagagatgaaccgctttctgctatcaccaaatctaaatcaaactgaccgtccattaaggacatttcaaaaggtttgagtttaaatccttctttctctatttcacctcctgaaattagtttttgtacctcctgaaattgtgacaaactttgtaaaccttgcaactgaaagttgaatgaggcctgaaaaataggagagcggctaggatcacgccgtggttgcagtcgttctactaataaagcaaagggaaaatcttgatgggctaatgcttctgagactgtgaggcgaatttgagtgagaaattcctgaaaacagggattttctgaaacatttgcccgcatgactactgattctacaaagttcccaacagtgaaagcaaattctgcttgagttctacctgcggtgggaacacccacaataatatctgcctgtcctgtgtaacgatataggagaacgtgaaatgctgccagcagaagcataaattgggttacgctttctttttgcgccagatgtttgagtttttctgtcagttgaggtgatagttgtaaatgataggaagcactgttataggtttggatgagtgggcggggtctgtcggtgggtaaattaagtataggtaactctcctgacaatttttgccgccagtagttccagagtttttctccttgaacactacttaataattctctttgccaacgtacataatctacataggaataatttagcgcaggtaaggatggttgcactcctgattccagtgcgggataaatctcgactagttctttcatcagtaagaaaacggaccaaccatcaactgcaatatggtgtactgtcagcaacaaaatatgttcttgctcagaacaagtaaataaacgcacccgcaagatggatccattttcgatgtcaaaggggtgctgggattcttgatagactttttgataaagttcctgcttattctcagtagaagcattgatctgttgaaagtctattatttgattttgatcaatctgttgaaatgttttattaccttgtttgggaaacttgctccgcaactgtggatggcgttctaatagggtctgaaaggttttttgcaaagttgtcacatttacatgggaacagattcgacaggtaaatggcacgttataaattccactctctggtgctaattgccacagaaaccacatggcttgttgactgtaggagaggggatagatattcaaaatttctggggtatcatgaagtaactgtaaaatttcaattttgtgctgttgtagttgggctatgacatcaggagttaatgtacttttaatacccccaacgcgtaatttttccccttctgtccacaatttcactccttgaaaggacaggtcttgtaaaaattctactaatttcatagttctatctcaatccaattattatctttgacatttgttgctagaaattggtcattaccttctggctcaacagtttgaataacattgagcaaatctagttggtggttgagcttagttgataagtgaacaatacttgctccttccatgaagatggcgataggaatatctaattttaagtcggtttgaatttgatttcgcaactccacaaccatgagggaatccatgcccatttccaagaagttctgctctgtactgggcagttgagagcctttaaagcctaaaatttttccgactagcctttgtagataagctgttaataaaatttggcgatcgctgtctttaactgcctctatttcttggataacagttacattttgcagggaagttgactgttgttgttcttgttgtcttacttgctcaaacctattttgaattcctcctacaatttccctttgtacaatattcaaaatgctctggcgactgatgcgttttccagttactccttcaatttccgcaactacatttccatgttcgtcaaccagtaatacatcaatcattaaagtctctggattactggtttctttgtgggatattcccacttgactccataattgagaactggaactacgatatagttttaaacgctcgatcctgattggtagatatatatcaatcacaccaacttgatcaatattcagtttcagtccatatactgaatgcaagcaggcatccagtagggctggatgtattttgtattgttctgccgctggggaaagctctggtgataattgtataaagcccaaggttttatcctcagtcttccacagactttttactgcttgaaaactcgaaccataaattatgccttgctcttctagttcccggtataaaatttccgtgggaactttttccgtgtattccttttgcaatagaggcaagttaatcacaccaatttctgatgtttctttgtcctgggagattttacccgcaacgtggagtgtgcaagattgattttctaagttttgttctttattgaaactgaaaatttcaaattgataagtattattttctaaattattgacaacgatttggactgttgtatattccgcttctgataaaattaaggcttggtaaagattgacatcttcgagaattaaatgatctgattttaaaagatttgctcctgcggctaaagccatttctaaataggctgtagctggtaatactggctgatcaaaaactcgatggtcgctgagataagcaagttgatttataccgatttcgcattgaaaacgctgttcttttgtccccgctaggcgcattttataaccaagcaaggggtgaagattttcaatggttggcaaatttggcaaatattgtttttggtttgggactgtagttctttcaatccagtatcgctgtctttgaaatgggtaggtaggtaatgcaacttttgtccggtgatcagcacggtcaaatcctacccaatctactttgaatccagctacatacaactgtcctaaactagaaagtatcgcctgcgagtcattttcaccaggacgcaaggaaggcaaccaccaaccttgactatctggtaaacattgacgacccatttccaataatatcggttggggtccaatctctaggaatacttgcgacccaagttgatgtaatgtctgcataccgttagcaaactgcactgttctagatacatgatttacccaatattgggctgttgtcatgtcttgatcagcaactttgccagtgacattagatattaatggaatttgcggttgattataggtgatttgattggcaatggctaaaaattccgcttcaccaccagatgctaactgctgcatcaatcttccctgatggacaatgagtttgagtccatgttctaagctgaaaatccctgctacagttgcggccacatactcgcctacattatgtcccataactgcttttggttgaataccccaagatttccacagttgatacagggcatattcaaaggcaaataaagctggttgggtataggcagtttgctttaataatgaagatgcaatttgttctgctgctggttcaggatatagtatctctaacagtgaatgttgcagataggggcgtaaaatctcctgacactggtcaatagtttggcggaagactggctcagtatcgtagagttgtctgcccatgttgatgtattcagaaccttgtccagtaaataggaaggctattttgggcaactttttaggaacttgactgctgactaatgtagcggtttcctgagctttggtaaaagcagctagttgtgcaattaattgctgtttatcctcaaccacaacagctaggcgatggtctttgaaatgctctcttcctgtattcgctgtataacaaatatctgctaattcttggttgggatgagctgctaggtgattttgatatttactcaccaatgcttgcaaagctggttctgtttttgccgataaagttaacaaatgacaagaacgctcccgcaaattctgatttttagcttgatttttagcttgatttttagcttctggggacgctgcttctaaaatcagatgagcattagtaccaccaaaaccaaaggcactcactcctgccagtctaggttgttcttgggctggccattcctggagttctgtgggaatttgaataggagtgttttgaattttaatgtaaggatgtagttcttttaaatgcagatgtgccggaatctggctattttgcagagacaaaactactttgatcaaccctgcgatccccgccgctgcttctaaatgaccaatattcgttttgactgaaccaatccaacaaggttgatttgcttccctaccttccattaacactgctttgagagagttcacctctatggaatctcccaaaggagttcctgttccttgagtctcaacatagctgatttgtgatggtttcacccctgcattggttaaggcttggcggatcactgcttgttgagcaggtccattgggggctgtcagtccattgctgaaaccatcttggttcacagcagaacctctgataattccctgaatattgtctccatcttttagtgcatcagagagacgtttgaggactactattccacatccttctccccggacataaccatcggcagcagcgtcaaaggttttacaacgaccatctgctgctatcattttcccatgagatagggagattgttgcttcggatgacaaaactaagttaactcccccagctaaacagagattagtctctccactcaacaaactttgacaagcatagtggatggctactagtgatgaagcacaagccgtatctataactaaactaggacctttgagatttaataaataagacaagcgattagcaataatgcctaaacttgtccctactccattgtaagggttaatttgagcattttctctggttaaaattataccataatcataatttgcagcacctaagaaaactcctgtaggagtgccactaatttctgttgatggtactatccctgcattttccaaactttcccaagcgacttctaaaaccaatctttgctggggatctatacgttctgtctctctgggagaaatttgaaaaaaatggggatcaaattggtctacttgttctaaaaagccacctctgatgttgtcagatttgccagtggtaggaactacggaatgttgggacaataagtacctattatcaggtcgtgatgatgatagttcgctaatcgcatcaactttattagatagaagttcccaaaatgaggtgggattgtcagcacctggaaatcggcaaccaactcctataattgctattttttccattttttaaattgttatagaaaacagaatttatgaactttacaaattactcatgaatctgagtttactaataatactttgtttgtggtttttggcaatgattgatttgattttcaatcaagctgtaatttcaagtgtaatttcaggtgtaatttcagggctgttccttggatttgtaagcaagttacaaccctgagaatagatgtgttttaattcccgctgtcggtattttcctttaatgcgtaattgtgagcaaactcattaaaggctttgatattattttggattgattttttaatagaacctcctgaagccatcacactcatattgcggtttacaggccacaagtaatctagctgctttgcaaatttacgcaagtctgataataagtgattgtgtactttgagattaacatggaatccttgatgctcttgacacaggcatttttcaatccactgcattgcttcctgagcagacatatcaaataccggactttgcaaaagtttcatgaggaaaatgattgcatcaccatcactcaaaaagcggttggtggatattccagaaatagcattcaggttttcatgctgtgcctgtaatatagctaagttggcaatccatttttcatatcttgatggctttggtaaatatttatgaaagtctcgacctagaaatagggatgtggttgtatgaaaagcctcatctaaaaaatgatagtgagatatagctgttgggctggcgataaattcattatttttttgcaattttttgtagtaagtatgtaaaccaaattcatgatttttcagtcctagattagccatgtagcgcacagcataaaaattcgcagctaagaagggataacttccccagttatcagagaaaaactgtcttctcggttgagttgattttcccgaaaaaccattgaaaaatccattggtaggaaatgacacttggctcttagcttcttttccatctctgctattttcagtttcagatggcttcttgcttttgagcatgaacatagcgatcaagttggcagcagaggataaataatttgaagattgcacccttttctgctcgcgtacagaaacctcgtcggaaacgggattaatcagggctttcttgcctagtaaagctttagtagttttgtaattcaccagggaaaaagcatgaatgtggtggcgttcttgggaagtttcatgagctaacagttccacaagcattttatattcactattggcagccatgaggcaatctgctgtgatggtattgtaatgaattagctcagtttcactatcagcaactctcttataaaataagacccaatgtaggtgattaagagctaatttttgagaaagagatgcttgttcatatagtggagtaccataaagcagtgaatgttcgggttcactccaataagcattactgttactagtatatttaaagtttctatcgagttcttggattttttccgtgtagtcggagtctaggttatttccatagttcttttccaagagagggataactttattaatttgagatgttggtaaagtttcagtgctagtaatcatgaggatgttgctaccttatgttgtaattgatcatgctgattggatgttcgtcaagtataggaatcctatttgatttttctatttgatttttgttggcgatcgcttgcactcactttgtgattacaaaactccgtacacctaaatcctctacaacctttttgttgtttgcctgactagacaaagacaaatcaatatagctacgccaagtaagctatcatcaaccaaaccgaattcctatatattgttgaacatcaaaactgtcaaaactaggagtttaaaaacagccggaactataattctcaggcggaagcaattacggattcggaaaactgcttaaaggttttgaggttattatggagagctttactaattgaagcttccgaagccataatccccatttcacggtttatcttccattgataatcaagacaaccaaagaatttctgcaacgattccaagaggctttgatgatattttagtcctacatgaaaaccttcgtgttcttgacagaaacacttttccatccaatcgagtgcttcttttgtttccatctcaaatagaggggactttaagagcttgtagataaaaaccattagcaggggatcgtcggcaccacaacgattggggaagactccagaaaaaccatttaagaggttccgctgcatcatgtaaattatcatcccagatacaaatttctcgtaagcagttggcttcgggaaatccttatacatatctttggcgatggtttgagaaattgtggtgtggaaagcctcatccattaagtggtaataggaaacggctgttggggctgggatatattcgccttttcgctctaattctcggaaatacttcacatagctatactcatgatttttcagaaccgcattagccatgtagcgtaaggaatagtactgacaggccataaatggggacataccccagtgaatagtaaaaaactttaaccagtaacgtggtgcgattcttcctcctagaccatctgctggtgcaggaatcggctggccttttgcttctaagtctcgtaaatactgagaataatactgttttttatctctcagcattgttttggcgatcgcgcttaaggtacgatctcgatgtacggaaaatggggaatttccctgaccagagacaaagaactcccgtacagagttaggtattataagtctcaaccaactattattatctttctctgagtttccataggcagaattccccaacgttgtttttccaactatagccatttttgttttgaaaccaatcttttgaaaggtgcgaatatggtagctttcctgttcggtttcaaaatccaattcctgacaaagtgtttcataactaccagtgctacgaaaaactccattcgttactgtgttataaatacttgtatttgcttcactggcagcaatatggttgtagtgtcctacccaaaaaagatggttgagcgatagtttttgtgaggcagaagcagcattataaaggggagttccatacatcacagaaagttccggatcaccccagtaataattgctgttgatttcgtaatcaaactcatttcccaaatctctaattttctcagtgtagtctgattcactgttgttttgataagttttggatatgagttgcagatgttttttctgttgtgcttgtggcaggctcgaagtttggattgtgggatctagagtttcgttactagctaacatgagtttccccaggcaaaatactaatgattttaatttctattgacaccaaagataggtaacatcttaggcattttctaacgcttttgcttggttttattgagctaaatgcgctgctaggtctgcaattgtggggtaatcatagagagctgttggctctagctcttttcctaaccaatctcctaaatctcccgttaaaatcactgcggctgatgaatctaaaccataacgggaaaaattagtctctacatctacttcttcagcttcaatttctagcagatccgcaacataggaaactagccattctctaatttttactgctgtcaattcctgggtctgttgagtagttgtgttatgttcaaaaagttgagtcatttgtaaaccttgattttagctataagtgaaataaattcgcacagattttcagctttttattgtagccattatgggctgattttgatggctatttttggggactgccttagatgttaaaactgcattattttctcaagtctgattttaagtgactattgcagtgcattagcttttacactctcattgattttttctcttttcacatcaggattaacttcttgcacttttattaacagggagttaacatcagttaccaatttttgtagtttcacttgatgctcaaggcttctgtcacagtcttctactacactcaaagttccttctagaaacccacggtgacaagcatggcgctgaatcttaccactggatgtcttgggaatacttccgggtttgatcaaaactgtggcatatagttgtatgccgtggttatctatgactgcttcggtgatatttcccacgacttctttaatatccaactttctcaaataggttcgttcaacctcttgcacaacaactaaccgctgttgccctttttgctctattgtaaaggctgctccactatttaatcgtagtgctggatgactattttgaactgttagttcaatatcttgggggtaatgattttgtcctcgaatgataataacatccttgagtcttcctgtgacaaataattcaccattttgtaagaatcctaagtctcctgtgcgaagaaatggaccttctcctgtgtctgacaggtaagcttgaaaggtttctgcggtttgctctggttttctccaatagccagcagctacagaaggaccggatacccaaatttctcctattcgatcatctggacacaaggttaaggagtcgggatcgacaatggcgattttctcttctaaccaagtgcgaccacagccaactattgtttttgttgtctgatcagatttggctgctatcacccgattttcttctaaggcggttgcttcgactgggtacagaacaggatcagatgttttcaaacctccagaaacgaataaggttgtttctgccatgccgtaacaaggataaaatgcttctttacggaaaccacagggagcgaaatggttggtaaatttttctatggtatctgctcttactggttcggctccgttgaaagctatttcccaactgctcaagtcaagatgagcaagttcttcgggggtgattttgcgagcgcaaaggtcataggcaaaatttggaccgccactagtagttgctttgtaacgagaaattgcttgtaaccaacgcaaaggcttttgtagaaaagccactggtgacatgagaatagaaggtatccctaaatacaagggctgcaagacgttgccaattagtcccatgtcgtgaaataagggcaaccaaccgacgaagatggttttttctgtatgtccaaagccgatctggatggatctttggttggatagcaaattcccatgtgttaccatcactcccttgggtgtgccggtagaaccggaagtgtattggagaaatgccagactattctcatctagttttggttgttgccaatgggaactgagatggttgtcgatgtcatcagtgcttaaccaacgcatatttggcaattctggattttctgcccattggctgaccaagtctgttaaaagggatgaagtagtcaagattaaggttgcttgggcatctttgatgatcgattgcaaccttaagaagttcatgttctttcggggtggatatgctggaactgcaattacacctgcatataaacatcctagaaaagctgtaatgaactctagacctggtggatatagcagcagcgcacgttcgccagttcctcctaaagattgaagacgagatgcgatcgcttttgctttttcctctaattcttgatacgtcaagctaaactcatcagtttctccatctcgcaaaaaagtataagccttttgctgcggctgattttgccctcgatagcttaacaaatctgttattgccgaaaatcccaaacagttttgtaaatccttgacgcaaatattcataagctaatttgtaatcttaagttactggtaagaaaataatgcgattaaaatcaatcgcaaataaaaagctgtagatgctttccagaattatcacatgctagttacgcaatactatcataagcatctatcggaaatcaagttaagttttttatatttttttaatcagtatcagtatctatataagacttacgcattaacttccgttcaataacgaactgcttgcagcagcgcttcgctatcacccaaaaatagttaaaaaatcacgttaaaatacccgaaacccatacctcatatttggttgatcctgtcaattcgtaagtcctaaataactctattgcattaacttttatatacgaaatataaaaaaaagattaacaaagccaagttcctatctaaaatttgataactaatagaaagttgtgatatgctgtccagcaaaagttacaaaatatacgttctgctttaactaagttgaggaaatcaaaagcatgaaatatacaaatgctgggaatgtggacgtaattaagttttccaaggaagaaggttctctacaaaaacccaatcaagaaaagtggatactctacagtacctgtgatgaagattcgtactcggagttaagagctttagatcttacctcaaatgacagggtgcttgctgtgacaggtagcggatgtcggactctgagtctgctggcgtgcaatcctaaatcgttaacatctgtagattattcacctggtcaaaattatttgctagaattgaaactagcagccattcgggctttatcttatgaaaaattgttgcaattttttggtgtagaagactgccagaatcgctgggaaatattctgttctttagaaaatcaaatatccccccaagcatttgcttattttcaagctaatcggtgggcaattgatagcggagtactatttgcagggcgacatgaattattttatgttagatttgttgcaccattaatgcgactagtttatggtagacaaatggagcagattgctcgcgcttctaccatagaagatcaacgtaaaatttacaatcaacacatacttgggcttctgtggaaattgatgattcgtgctgggttttcccccttgtcaatcagtttgattcttaatgatcccaaatatgttgtggaaatgaatgtgaatgttggcgattacttaatagaaagattgcatcacacattcaaccatcatttagtacgggataaccactggactagtttcatgttctatggtaagtatctgggaagacgttgtcttcctcacttcttactggaggaaaactatgatgccatacgtaaagcaacgacaaaaattcaaattgtcacaggcaatttgatagaatatatgaagacaatgccagagcagtcaatagacaagtattcattatctgatgttacaagttgtattgacacaccgacttttaaaaatttaataaacgaagtaatcaggactagcgaaaatcaaggaaagttatgctatcgtaacttcttgaataagcaattaattccatctgatttagaaaatattttccaacgggatcaagagttgagcgatgcgctctatcacgatgatttagcatttgcctatagttttgaaatagcgcagattaacaaaacagaacaagtagttccagaattgagtgctgtagctcagattggttagtagaaattggttagtagaaataactgaggtaatatttagagagtcaggattatgtgcttgaatcgaaacaccagaattcacccaatgcctaatagttggtatcgcgttggctttagtaaagacctgcgtccaggggaagttaaagctctgcgttactttgataaagatttagttctcttccgtacagaaagcggtgaagcctgtatttttgatgctcactgtcgccatttgggagctcatttaggtcacggaggagaagtcaagggtgaaggtatccaatgtccctatcacggctggatttgggaaaaaaatggatcttgcaattatgttccttaccctcacactggttgtaatcccaatgtaaaaattggcaaatggccggtagcagagttgaatgggacaattttcacctactaccacagtgaaggaaaagctcctacttgggaaatgcctcaattccctgaattttatggtggagagtgggtatctgcagtgcaaatgtataaacgcaacgttaaatgttctatacaagaaattgctgaaaataactcagatacggcacattttagccatttacacggggcaagatttggtaaagtcctcagcgaatccttagaactagatggtttgctacgtactcatattgctgcttatgaagttcaggtacctatgatctctaaattattggggatcaatgaatttcataccacatatcaacagtatggattaggttgcaatcgtaatcttgttgctctcaaagccaatggtaaaacagtcctagaatggcgattggtttgtatgcatacgccaattgataaagaaaatgctgaggcgctatgtgtaaccaaactgaaaaaattcataaatgttcccattactcgtttgatcgtagaactactgacgaaaaaagcttgcgaagaagttgataaagatgcaatggtttgggatcacaaaatttttctagagaatccccctctttataaagaagaacatagtatcaaccaattccgcgaatgggtaagacatttttacacagaatcagaagaaccagaacaacaggcaacaatctccagagcctctgctactgccaacaaaaactaaaaactaactaataatgcactttttacagaaagaacgggcgacgcttgaaagatttatccctacccttgatagccaactgcaagcaaaatctctgctagacttggaacgtcaagaaagtcctgcattgcagatttttcgtgagcttggtggtcctggcttattgattcccaaggaatacggtggatctggtgtcacagctttagaactaacccagattcaacgagcgatcgctactcgttcaccttccttggcagttgctgcaaatatgcaccattgcacggtagcagctttactagaaagcattgctgatgaatccgtagccgagtttatccgggctattgcagataacaatctctatttagcttctggctttgctgaaggaaaaacaggaactagtatattgttaccaactatgaagtgccagcgagtggatggtggtttactggttagtggtagcaaaaaaccttgtagtttatccctatcaatgcactttctgacagcaagtgcaattgttcccagcaaagaagatggagatctgttagcattagtgatcatccctgctgattcaccaggaatcgagcgtaaatccttttggaaaacttgggtgcttaaagcagcagagagcgaagaaataattttaaacgatgtatttgtcccagaggaatttgtttactacttaggacaaccagaggacttagaaaacattcttgctaaggcttttatttgggttgaattgttcttatcagcttcctacttaggtacagccagcgccctggttgagcgggtaatagcagaacgcaaaggtagccctggggaacgtgcatctttagccatcgaagttgaaggagcaatggccgccctcgaggctgtagctcattcaattatgtattttggtaatagtgaccatcaagttgcacaatcattgtttgttcgttattccgtacaacgggcaatagaacgagtaactgaaacatccacagagttactaggtggcatagcatttattcgttctgaagaaattgcctacttactagcagcctctagagcgcttgcattccatccaccttcacggctgagtatggcaccttttttagatgaatatttagcaggtggatctttagtgatgccttaattgcacacaaccaaaaaactctggcgttgctgaattatgagatgatttcgcccaatttagaacgaattttcaacggtttcaaacgccaattcatcccgcatttatgcaacgcgaaaactctatatccagtggaacataacaaccatcactttaaacaactgccatgaatcaggttattagaacaattagaacaactacaaatagtaattttataaggagcgatattttctctaatttagtggagctattgcgatctagagctttaaatcaaccaaatcacacagcgtttacatttttacatgataaagaaggactagaatcaactgtaacttatgaacaactagatgctatgtctagagcgatagctgtctatttgcaaaatatatcaactccggaagacagagttttattactctaccctccaggaattgattacatagcagctttttttggatgtctttacgcagatttaattgcgattcctctgtatcagccaaaaaataaccgaaatatgtctcggattcagtcaattatggaggattcccaagcacaaattgcgttaacaaatcatcaaactcttgtcaatgtacaaacattattgaataatgctcctgatctaaaacaactacagtggttagcaactgacacaattgatcaaagtttagctgatcaatgggagctaagatcaattagcagtgatgctattgcctatcttcaatacacatctggttctacttccacacctaaaggtgtgatgattagtcatgagaatgctttatgtaactcagcagaaatagccatttcctggaggacaggatctgatagcattctcgtatcatggttgcctcactttcacgattttggacagatatacggggtaattcaacctatttacagtggattcccatgtatctttatgtcacctgcctcatttactcaaaaaccaattcgctggctaaaagcaatctccgactacaaagctactcacagtggcgcacccaattttgcttatgatttatgcgttgacaaaatcaaaccagaacaaagggcaggtttagacctgagtaattggcaagtgactgtaaatggtgcagaaccagtaagacagcaaactttagaaaaattctatacaacttttgcaccttatggtttccgttggggtactttctacccaggttacggactagcagaagcaacactaaaagtttcatccgcaagacagaaaaactcacccacacttttaactgttcaaacagattcactgtccaaaaatttaattgtagaaacatcacaagatgagccatttgccagaacagtagttggatgtggtaagactgtcttaaacgcaaaagttgtcattgttgatcctgaatctttaactccatctccaaccggtcaagtgggagaaatttgggtatcaggtcctagtgttgctcagggatattggggaagacaggaagaaactcagcggacatttggagcttatctagctgataatggagagggaccattcttacgcacaggtgatttgggttttctcaaagatgacgaattatttatcacaggtcgaattaaggatttgatcgtcatccgaggtagtaatcattatcctcaagacatcgagctaacagtagaacaaagtcatcctagcctccgttcaggatatagcgccgcctttgctattgatgagaacgagcaagaaagattagtgattgtttgtgaaatcgagcgtacttacctgcgtaagtttgatactgatgaagttattagaaccatacgccaagcagtatctaaagaacatgagttagaggtatatgctgtcgtgctgctcagaacaggtagtattcctaaaacctctagtggcaaaattcaacgtcgggcttgtctaattcaatttttaaataacgaattagatgtagtcggagaatggaaagataagtcagacgaacaagtaataaataaagagacttctcctatgcaatataatttatccagcatcatcaaattaggtattcaagattggcttatggcgtggattgccaaagagaaaaaattacatatcagggaaatcgaccccaatcaatctctcacttactacagtcttagttctttagatagtatgaatttacatggagatttagaaacttggctgggctattcaattgttcctgattggttgtgggatgctccatcaattgatgctttagccactcaaatttctcactctcaaaatcctcattttcataataaagttgcctaataaccaactttttcaggggagttttgaacaattattaacgcttctgtaatttaaggaagttatgtaccaggataataacttccttgatactaaaaacagcaaaaaatttggtcttatttctataaaataccatgaaaattgaagcaatcaaggcagctttgccaacaaagaaactgacaaatgatgatgttctggcgttaattgaggaatatagcaaaccagtcttttctggagatttaaaaacggctttaagcaagatcaattttttcctgcgttattcaggttcagatgttcgttactggttagacaaaaatgaaaagccaattgatctagtgaatcgtgcttttcaagaagcacttgcggaagcaaattgtgacaaggatgatatagatttactagtttatacaggtattggtcgaggatttatcgaaccagcggccgcatatcatgttgcagcgtaccttggtttacaacacgcagagtgttttgatatccttgatgcttgcatgagttggactagggtgttaaatatcgtctactctttgtttaaagccggtcgatataaacgagcattaatagttaacgccgagtgcaatatgcactatggtggacctgtttttcctactgttttccaattgcccaatgtggaagcgattgaatggtcttttccggcttatactttaggagaagcggcaactgcaaccattgtttcctacgatcctgatcaagaatgggaatttcactttaaatctcgtcccgacctggctgaactgtgcaatgtacccttaattggatacgaaggttattgcacaccgtctgaacgtattggtttaaatggcattaacaaatttacatcttttggggtagagttgcacgccaacgcctatccagagttcattaatatctttaaccgcttaaaagctcctgtaaaggaaattcgtgcagttttcccccatgcttcttccaagagagagtgggataaagttgctgaagcattaaacatcaaacacttaatgtggcatatttatccaacttgcggaaatgtagtttctgcttctgtacctacaggtattgcttctgctatttccgcaaagcagattcagcgaggagatcgaatagcaatttgggttggtagtgcaggtatgtcttttagctcttgttctttcatctattaatcaatttgcctattcttcttttatttaataaggagtttttatttcatgttttttcaacttttaaaattgactgtagtaagttctacttacctgtgtagctattttatcactactttagggacaaaaaaagaagaactaactttaaaacaagcacggtggatttacaggtatttcctgcaaatgggtccaatatatatcaaaattggacaaattttagcaacccgttctgatttgattccccaaaattgggtgacaatcttaaaagaattgcaagataacgtgccttatatgtctgaggaggatacgcggaaaattctcaaccaggatttacatctgccatttgaagaaattttcagtgaattttcctttcagccattagcgagtggttctatagctcaagtccatagtgctaccttgtttactggacaaaaagtagctgttaaagttgttaagaaaaatgttcgtaatcaactcaaacagaatctggatattttccagtttttagttaatatcttggatctcatagttccatctgttagagaactaggtttaccaaagcggctaaaagaattaaggtctttgctgattattcaagcagacatgaagcaggaagctgaaaaacaggaagcagtttatcttaactttaagaatcatccctacgtcagagttccggctgtgattaaagacctttctacatctaacctattgttcatggaatttgtagaaggaataccaggcaaagaggttcacaaagttgaattaaaacgcaatcttgtggctcaacgtttccaagatactatctatactatgctgtatatgcatggattatgtcatggagacccccatccaggaaatatcttttttacaaaagatggatcaattattctcctagactatgggattacagtgcaactgactgaagatgaaaaatggggtttatcatctttttactacgcttgtactcgcaaggaatgggatatagctgtcgagcgttttaccaatcactttgttacagacaaagcctacataaatcaaaactggaatggttacacagaggaaataaaaactgttttacaatatcattttgatgctaataaaacacaatggtcaacagttagttatttccaagatgtgagtaaggtattgcggaaatatcgcgcacggtacactactaattttaccaaagttgagttagtatttttatcttgtgaaggctttgcaacccaaatcgaccccaatattgatatttgggagaatgcgagtaagtttacagaccgttattctccctacatgagtccacaagtcaaagcaacttttgatgtttattttcaacaaacttctccttcttccttggcaatgcgcgatcgcgccaatggtttcttagttgcacctactcacatcaaccgatactttttccccagcacttatccagtgtttgttaaaaaggctcataacagcaaaattgaagactttgatggtaatgttttcgtagatatatcatgcggttatggtcctcacctcttaggctatgcccatcctgccattaaccaagcaatttctgaagccctggctaatggatttgtcaacgcaattggtagtgaggcagaattaaaattagctgaaatggtggttgatgctttaccaggtgctgaaaaagctatcctctctaactcaggcacagaagcaattttacaagcaattcgtttgtgtcgagcttatagaaagaaagatcggatagcaaaatgtgaaggtcactatcacggattttctgatcaaggaatggtcagttcctggtttcgctttacaggtgaaaagtttgatcctcaacccattgcaggaactcaaggttctgacagtgcgacggtcaaaaatactttggttttgcaatatggtcacattgaaggtttagaaagattgcgtgcagaagcatcagatttagcttgtttgatttgcgaacccatgccttcattactggctaattatgacattgaatttctcacaaaactaagagaaatctgtactgaattagacattcctctcatattcgatgaagttgtttcaggatttcgggtagcctatggtggtgtacaaaacttggcaggaattttccctgatttgacttgcttaggaaaagtaattggtggaggtctaccttgtggtgcagttgtaggtaaacagaaactcattgacattggtaagagttctcaagatcccttttctgattatgaaaagaaagcttttgtcggcgggactatgagtggtaactcattaacttgtgtcgctggaacagctgcattaacttatctccaagaacacccagaaatatatgtccaactggaaaataatacgaattggttagcggaaaaactgctagaaattggtcactctcacggtgtacctattcaagtcaaggccaatcgttccattttttctttgacctttagtcataaacctgctaaatacttccgagaaaagcaagctggtagtaattttaaagtcaatctagctctagcatattatatgcggaaacatgggatttatatgccagaattacatactttaatgttgagcgcagcccatacccaagaagacttagaattaatttctactgcatttgacttaagtttgcaagaaatgatcggtgatggtttctttacactttagttagctagccagtaatctggtataatgaaggcattagtagttactagctcttctttataggacttacgcactgtacaaattcaccatgatgtgtatgaacgaaaatccgtcgtttcaggcttttggcgattaacttccgatcaatagcgatagcccaaaaataattaaaaaatcacgttaaaatgcccgaaacccataccttatatttagttgatcctggcgtaagtcctaatttattggctgtttgttaaaaaatactccttgctgaatttttgaaaacaataaaacaatactgagattattttatgaaaacagtaaaatctgcccaaaactctactcgtaaatgtaaagttgctgtaattggtgctggtgctagtggtattgctacagcaaaatgtctgatggaagatggtcacgaaccaacggtttttgaaagaggtgatcaagttggtggtgtttgggtttttaacaaaactaacggacgagcttttagtacggttcactttcaacattcaaagtatgttagtgttttctcagattatccaatgtcaatggaaacaaatgagtttccacactatacagaagttttacaatatctaaatgattatgttgatcactttgatattagaaaaaatatcaaattcaatacaccagtagataaagttgtaaaaacagatgatggttgggacgttactattagctatcctggtggtcaagctacttttaattttgatgcgatcgctgtttgtagcggtatttataatgatgctagatggccaggatttccaggcgaagagaaatttaaaggcaagataatccactccaaagattataaagatccgtcaatttttacagacaaaaatgttcttattcttggcaacggacctagcggagttgatattgctgtaactgcatcatataactctaataaaaccatttggagttaccgtaaaaatcgctggttactgccaagatactgtgaaagactacctttcgattttatcgttactcgcctgaataaacatattcctttccgtcaccaaatattatctttggttcactttcaaaagttttacccgattatgttggatcacattgcttgtggtgtaaaaccagatgttggtccagagaaatcaggccctgtttttaacgaagatgccttaaaccgcattcgtttgggagcgatcaaaaacaaacccaatatttcacattttcaagaagacaaagttgtctttgaagatggcagtagcgaagcaatagatattgttgtttatgccacaggttatcaagtaaaaattccttttatggatgaatacttaggtgaagaccatcaaaaaaacttaaatctttataagatggtatttcacccagaactaccaaactgtggctttattggctttgtttacggcaacgtcatatttcccacttctgaactacaagcaaggtggttttctaaggtcatttccggtgaactagaattaccatcaaaagtagcaatggaagagcaaattgcagaacatagaaaacatcaagaagaaggctggattgaaagtgcataccgtagcttgcgcgtttccgcttttgactatatggatgatatcgctaaggaaattaacgctctccctaaactgtgggaaaactggaaaattttgaaggaaatttttacaggcccaatgctctctacacaatatagaattgatggaccaaataaatggcaaggtgcaatttcttggattaaacaagtacccaagttagtaaggaagtaaataaacgccatctaaagcatgaaaaaatcaggagttggagatgattaagaacggatctttaagcatatttaaagctatcttgagcttgataatctatggttttttgtcaattggtataccacttttagggtggggtatggatgacttgccagaatttttagcaaatccagccagagttattttcttagttggttcaactttgatggctattatctatgcctggtttatacctcaaaatcttgtgagtgacgctgttaaagataaactcataactcgccaaaacatcactttatggttgagtatggctatttacgtgatcatttttagccttttgccatactgcgatcaccacaacctctggcaaattaaagctgaaaattatttaagatatgttggggtagtaatgtttactattggtctgattttctctacttggggtccactgcaccttggtaaacaatttgttttcaatgtgacaattcaatcaggaaataagttagtcacagatggcccatttagctatgtacgccaccctcgttattttggtttgtttgtttgggttttgggagtttcactcatctatctttcagttatgggactggtaatgagtggagtatatatgttgttgttggcatggcgaatatatgatgaagaaaacttactccagaaggagtttggtcaacaatggaaaaattattgtcagcaaacaaagcggataattcctctgatttattagttgtaattatcaaaaaaaggcttattattaagcctattttatttaccaaaattaagacaaggaaatgataaagtatggacaccttggtgaacgcatttatgaacaaactcatgcagcctttcatgagtgacaataaattaccagacggaccagaagatcctgaattatttcagttaatcaattggctcgttcgacctttggagtatctagaagaatgtgtagagaaatatggtgatatgtttactatgaggccactcggtttccctccattggtatttataggccatcctcaaggaattaaagacatttttagtacctatgctaaatcttttgataccggaactacagatatgaacgctatgctccatgctatatctggtgatcgctccgtagcagtcctggacggctttgagcataaaagagagcgtaaattacttatgcctccttttcatggagatagattaaagctatatgctaataaaatatgtgaaattactgataatgtcacttctaaatgtaaaataaataaaccttttattgctagagatgtcattgaggagattaccctcaagatacttatgcacatagtgtttgggttcagtacaggggaaaaaagtaaacaatttatatcagtcataactgattggatagatcaaattgattctccagtgcaatcgagtttgttgtttttgagatttctgcaagtagacttaggagcctggagtccctggggtaatttcgtcagaagcaaacaatcagttgaccagcttcttcaagctgaaatagaatataggcgaactaacaaagaaaaacttggagatgatatcttcagtttactgctagaagcaacttatgaagatggtcagacaatgagcgatgaccaggtaaaacatgaattgatgagtttgttatatgctggatacgaaactaccgcgactgctttagcctgggctttttactggctcgaacaatatccgcgagtaaaaaggaaactattacaagaaatcgatagtttagggaaaaatcccgacccaattgagatatctcaactgccatatttaacggctgtttgtcaagagacattgcgaatttatcccacattaccatttgcttttggacgtactgctaaacaagatatggaaataatgggtcgtttgtttaaagctgggacaacattttatccctctatttattcagtccatcatcaagaagatttgtatccaaattcaaagcaatttagaccagaaagatttttagaacgtcaatataccccttacgagtttatcccttttggtggtggtccgaggatttgtgtgggttatgctttagctatgttagaaatgaaactagtaatcgcttcaattgtatctaaatacaatttaaaaatagctgatgatcaacctgttaaaccagaacgtcatttcagtagcatcgcaccctccaatggtgtacctttagttctgactggttttcgctaataggatgctggttaattctgtcaccatagccatatctcttcacaacacattcaatattacacatcaaccacaagctcaacattctatctcaaggattaaaacaatgtcagaccaaacaaatagactccgctatttcaatgtttttctggattcaattgagcgacaagatcaggaagtgacagaagctgttgggcatcatgtccattggggttattgggactccaacaatttagcagatggttctgttcaagactttcgacaggcagcagaaaatttatctgtgaaaatgtgtgaagcaggcagaattacagataatcaaaaagttttagacgtaggatgtggatttggaggcactatagccactatcaatcagagatataaaaacatggatttagtcggcgtgaatattgatgagcgccagctagccagagccagaaaaattgttctgcctgctgaaactaacaaaattgaatttgtagaagcagatgcctgtaagctgccctttgagaataattccttcgatgtggttttagctgttgagtgtatctttcactttcccagtcgagagattttctttcaagaagcaaaacgggtactgaaaccaggtggttatctagcgatttgtgacttcactccagcagatatagtaatgccttggatggggatgttagattttgtgtttaaaggcttatttcctgatgtttatgcacaaaataacctgaacctaaataatagcgtcactttacacgattatgaggcactagctaaacggacgggatttcgagttttttatgaacacgacattacggtaaataccttgcctacttaccctatttcttgtgaaatactccgtaaagcctcacccccaggatgggatactgaagttgacatttttctgacccaaactatggaatggttcagccgtcaaggtttatatcgttacataattttctcatttcaagccgtgtcttgatagagattcgtctgttgtcagttttctgccttttcaattttttcttgtaggtaaagcaacctcgcaatcattgccagcaaaccgacacaacccgtagcgaaaactagaaatagccaaggcagtggacgcattcctagagccttggcctgaggtacaacaaagctccatccaatacccacacctagaagcaaatcgaaccaaatctgattaccccaaaaatttctgatatgctcagtccaaaatccatacagaccaccaacagctactgtgtaagccgagaatgttaagaacaacaccgacaataacgcaggaaaaagccatagattttttatatgggcattattttcattattgtctctaacggcgacgtacaacataaatagcacgaaaagaaacaatgcaatttttggtaacagagatgtgattgacatgggtatttatggttctcatcgttgcagatattttagcacacgaaaaacatacagctacaaagatatggacaattttttggatttaggaagattaagtatacattcaagaatgttgatcgcacttcaaagcaaatatgtattcggaggtatagggatgaaacccacaatcataaacaaaaaagttgatagatgtggcctagatttttcttgagcctctcaagactaggaaactgctaaagcaactttgcttggtaaatcagttagtagtaaggatgttagtccttagcttgagggctttagccctgattacgaactctgctatcattcgtcctgtaaatttcgattatttaggttttctcatgtcaaaacttcactctatttcacaacctgactctattcttggtactgatatgaatcaattatttaccccagaaatcagaggtctgcaaggtttcctctccattgtgaacaacggaataaatcttaaagacggctatgcaatgagtccggcgttagcccagcagggactgtatgctgctgaagttaaatatctcaaatctaatcctgacattgctcaactttttgaagaacgatattttgcaccgaatcctgacatagacgaattagccaaactgcctcaagattcgttaggctttgcctatgcctcttacctacgctcaaataactatgtgcaagatttttatccacctatcgaggttgtagatgacgcaagctactattatatgcgtatacaacaaactcatgatatttggcatactgtgaacggatggttggatggtattgggggaattaaactggcagcatttcaggttgcacaaactcgctcttcccttttaaccgtcgtgattaccgcagggatgttaaatgcgatcaagacgaaccaagatataaccgcaattgtaggttttcttcaggagggctacgaagtaggtattcaggcaaaacccttcctggcgcagaagtgggaagagggttgggaaaagccgctatcacagtggagagcagagttaaatatcaaagactcttaaacacttttgtagtgtcaaacagattactcttccgagaaactagtatctttgctgtttccagcaaagcataataatgacctaagttgctacttatcaatattcaagtttaattctggatttgatttccctgaaccaccttatacaaggcgagtaaatcatcaaattccccttttttcagagggatatagggctattcaaaaggctgataattataattagcaacttgggttaacactggtttctagtacgagttttataaccaaaacctaataatataatggcgcggttaacggtggcttaatccccaatgtaaacatctgggtttagtccgtaagcaagaacaatccatatcaaggaaatatagcaatgcaaaccacagaaatattgacaacaatggaaaccaaggaaatatatctgcctgaagttaaaactgaattcttattcacggccagaatacaggtgcaagcagcaatggatgtcggaccaggtcctgatggccatcgcatgatctttatgcaccagtccggttatttcgagggaccgaaactcagaggtgaaattatttcgatgtctggtggtgattgggcaagagtaagggctgacgggtctggtgcaattgacgttcgtgtatgcctcaaaacccatgacggggcaatcattctcatgacttatggtggaaggatgatcacaaccccagaaaactttgcttatgtgatggattatttaaagccagacgatcccaagggagcagaggagcgatactatctccgaactaatcctttatttgagacaggggatcagcggtacgcatggctgaatcatatcgttgcaatcggcaagggacgtactggcgacggtggtgtaattcacgaagtatttgcagtgcattagttatgaccaggggatttttcagcccctactcagggagtaacgcaacaaactaaatcgtagacgtaggcaaaccattctactcaagtcgggcaatcagcctatggggttgtcccacttgagtgcactaccttaccactgcactgtctcaccaacgctctggtttctttttttggttgtgttcactgcctgagaatcaaagatcgcctatttcagatttagttatctttagattttctaaagaattagttacaaaatctaattttaagatcaaaaagtaagctggatattttttcacttatttaggatagccaaatgagtattgacgctcaagaaagtaacatcccagaatataaaactgtcgagctaccacaaggaacacttcactatagtgatcgtggacaaggaccaatattaatttttgttcacgggcttttagttaacggaagactctggcgtaatgttgtacctctgttggaaggcgagtttcgctgcattgtcccagacctaccccttggctctcatatccaaccaatgaagcctgatactgacttgactctacctggtcttgctcgcttagtggcagatcttattacagcccttgatttagatcatgtcaccttagttggcaatgatacaggtggtgctatatgccagtcagtcattagccagtatcctgaaaaaatctcacgactggtgctgactaactgtgatgcttttgaaaactttccaccgccagtttttcttcccctccaatacgcttttttcataccaggctttgctcttacgtatgcaaagttaaccaactcaagtttagttcagaagttcctgtttgcactactcgcaaaccaacccttggaagcagaacaagaggaaggatactttgcacccctaattcgttatcctggtgtgcgtgatgacctcacaaaagctatgtgtggtatttccaatcgttacactcttgaagcagcccgttcttttgccaattttaacaagccagtgttaattgtttggggtgaagacgatccatactttacttttaattttgctgaacgcctcaaaaattctttccctgatgctcgactagagcgtgttgcaaaatcgcgtactttcgtacctgaagatcaacctgaagtattagcgcggttgattaaaagttttgcttttaatgtgactgcatgagtaagaagttagaaaccatttataaactaaaaatttacacaataagaccacacatcataataggagataacaatggcagttcttaaactagaaaatggcactatccacacagatttaatcacaattgctcaggaactagctcctctgaatattgaaattaatcgctggactgttacagataatcctcaactcaaaggattattagcacaggatagcctcaacgaagagcaaaaagaacaagtcctccaaggtttagatagttactttgagcaactaaaacagacagcaggttatcaatctcgtgatttggtggtgcttcatccagggattcctcaccttgatgaattaatcgccaagtttcagcaaattcatacccatgcagatgatgaagtccgctatatcattgatggagaagggatttttggctttgtgcttcctgatgatagtcaagtagaactgacagtcgaaccagaagaatacattaaagttcctgctggaactgaacattggttctatctcaccccaataaaacgggtgaaagctgtacgctatttcacaactacagaaggttggacacccgaatatacagggagaaaaattcgtattggccaacctgtactggtttgacaaggtaacggggcggggagcagggagcaggggaaagaattttagattttagattttggattttagattgaaatccaatccaaacttgaaaatccaaaatccaaaattgaattgtccaatgccccatgccccaaaatttctgaattttgaattgggagggcaataacttgactagtatcacaatagcagattctcgtttgcaactaattgcaaatgcccgttatttttaccaacaaggttggatggtgggaactgccggcaatctttcagcccgtttacctgatggtagcttctggattacagccagtggtaaatcaaagggtgagttattacttagcgattttgtccgcatagcgccagatggcacaatagaagcatcaacttctaactcacaaccttcggctgaaacgtctattcatcagttaatttatcgcctgttcccggaatcacaagcttgttatcacatacactcaattgagggcaatttggtttctcgcctagttacaggagatactttacctttaccaccattagaaatgctcaaaggtttgggagtttggcaggaaaacccccgttgtgtgatgccaatttttacaaatcatttggcagttccccagattgctgctgatattgagaaacgcttcgctatgcatccaccacaaataccagcactactaattcgtgatcatggtgtcacagtttggggtgcttcagcagaatcctgtcgtaattctattgagttattagagtatatctttcgctatatagtggctgctagtaagttagatatcaacagacacagcgaacaatagctgaagctttagggacattgagagagttacgtcctgaaagaaaaatacctgagcaacattgagcatatctgaataatgagtaatataatacttggggatcaattcagtaaaactgatgcctaaatacacatcaccaaaagaaacggcagaacattttggtgtcagtctccatactttaagacgatgggaaaagagtggacagatacaagcaattaggacaccatcaggacagcgaagatatgatatcgcatcgtacacaggactctcaaaagagaaaggaaaacaggcagttccgtcctgcataccaacaaacaagctagatcaaacaagctagatattttttaatttacaggagaagaaaatgagttttgaggcttcaggaaataacaccccagaacgtaaaactgttgatctaccgcaaggaacaattcactatagcgatcacggacaaggaccaatattagtttttgtacatgggcttctggttaacggacaactctggcgtgatgttgtatctctactcaaaggtaagtttcgctgtattgtactagacttgcctcttggctctcatatccaacccatgaacccggataccgacttaactccacctggtctggctcgcttagtagctgattttatcacagccttagaattagatcatgtcaccttggttgggaatgatacaggtggtgctatatgccagttagtgattgaccagtaccccgaaaaaatatctggacttatacttactaactgtgatgcttttgaaaactttttacctctgttgctccgtccccttcagtacgcagcccatataccaggctttatctctgcatttgcccaggtaatgcgctggcgtttagctcgacatatcttatttgccctactggcacacagaccattagaaccagaagcagaagcagcctactttacaccgctaattcgttttgctggtgtacgtcacgatgtcactaaagttgtacgtggtatttccaatcgttacactctggaagcagcacgttcctttcctaattttcacaaaccggttttaattgtttggggcgaaaacgatccattctttccttatcactttgctgaacgcctcaccaaatcctttcctaatgctcgactagagcgtgtggcaaaatcccgtgctttcgtacctgaagatcaacctgaagttctagcgcagttgattacagccatgaaagcagaatccccagcagtcagaatctgaaaatcctaaaattttccggatctaggacttacgccaggatcaaccaaatatgaggtatgggtttcgggcattttaacgtgattttttaattatttttgggcgatagcgaagcgctgctgcaagcagttcgctattgatcggaagttaatcgccaaaagcctgaaacgacggattttcgttcatgcacatcatggtaaatttgtacagtgcgtaagtagggtttgctgaataaacctaaaaccttgatatatcaaaggttagaggctgataaacacagaaattagtgcaagggttttgaagggtataccggaaaaagtgtgcattttttgggatttcaagagatggcaaagaaattttcaaatcttctcctgactcctgactcctgaatcctatgctctcacggaaagactttctcagcaacccctaagtactaggatctatcttgaagcactacgagctaaacccaccacctcacacttggattcagtgttaagagggatggcgggtttttccagagaattcaaggcagtggtactagctacacaacaaaaatcctaaaccttaactggctgtttggtagtttctacagcctgataaggatgagaattgttaataggttgtggtcctaagaaagcttccttacctgtaatcaatcgagaacgacgattacgagtaatataattccatgcccactgaattaccactaccatcttagtatcaaactcaattaagaaatagatgtgaattactagccaaaatacccaagcaataaaacctgtaagtttcagaaaacctaaatctactaccgctaaattttgcccaatcattgctaaactaccaacatcggtgtaatggaatggtggcaaagtatgaccatgaagccgtagtaaaatcaacccagcaacatattctccttgttgtttagctacaggtgcaacaccgggtaaaggtttaccagtttgatgggagaaattagctaaatctccaatcacaaaaatgtttttgtaacctttaacagttaagtctggttctacaactactctaccggagcgatcgcattctacaccagtacgatctgctaaaacttttgccattccagaagcttcaacacctgctgcccataatacagttttggcagtaacttgttgtactttatcatcttgtttgaaagtaacaacgtcattttcaatatttgttaccctggtttgggtttgaaccatcacacccaatttttgtaaagattctgttgctgattgcgataattctggtgaaatatgaggaagaatgcgatcgccaccttgcaataataaaattttcgcttctgaagtgtcgatattgcggaaatcttcttgcagggttttatatgccaactcagcgatcgcacccgctaattctaccccagtaggaccaccacccacaatcacaaaagtcaacaaagcacggcgtttttcaggatcagtttcattttctgctgcttcaaatgcagaaaaaatccgccgacgcatttctatcgcatcttctacagttttcaaaccaggagctaagtctttccaattatctttcccaaaataagaatggttagcacctgtagccacaattaaagtatcataaggtacgattttatcacccacaaataccttttgtgtcttcggatcaatattatttacttctcccagcaaaacttttgtatttttactttttctgagaacagcacgcaaaggagaagaaatatcagctggtgataacgtaccagtggcaacttgatataaaagaggctgaaataagtgaaagttccgtttatcaatgagagtaacctttacatttctattagcaagagattttgccgcatacagtccaccaaaaccaccaccaatgatgacaacctcatgttgtttattcttttcaagtgaaacaaccataagaaaatattcccttttgttaagaagcgtgtaacttttcttaacaaatatgtaacaaagttataagatagtttgccgtttcttagaaaacacttgacaaaataataaaagtagttaaagtaactaaatttgtaataattcagtattcagtattcaggagttttttattttggattttggattttggattttggattgtttttgttcagtccaatctaaaatctaaaatctaaaatctaaaattttcttccccagtccccactccctgccaatacctaactaccaattccttcactgggtggtaatttttccggtggtgcttctgctgggggagcaagtacagcatctggggcgacttcctcaacagaaataggtggtttttcctcggtttcctcttgcgcttgtgcgactaactcaggagtcggaggagttggatgtgtcacttctgaaacagtttcaattttggcttcagttttggtttcagtttgactaacttcctcactgacttctgccgttggtgtagccgtttcagatgcaggaacagttaccacttccattggagatgttgtttggcttggttgttctgcaacaagagtagtctgatcaacaattgtcacaacaggtttttctggaggtgctactggttgtttattccctacttgttgtaccttacctttaacaccactaaaaacattagcaattaacgatgataactgtcccagcttttcctgtaaagaaaacttagatacctgttcttgaatactcactttaactaactcaggactgggaataggcgtttgttgtacctctggtgtaagttgacgacgcagagaaagagtttgccaaccaaaccacaccaaaagcgccacactagctatatgacccagtaataaacccccagtaatgcgtgatgcaaaaatccataacaccaaagcgtaaaataaacccacaccactccagataaaatcattcttgcggtgaatttccgggaaaaagaaagcagctatgtaaatagctacactgccaattcccactactaacgctaggatataggcgagcatttttttaactccttcaaggttatcatgtgccatatttccattttgcgaattttgttattgatttgtcattgaattgttgactcagatacaaatcaaaaccaattcttggtgttagatgtgatttttgccatttacctcaactcttaatgtcttctttaggagtgaagccaaaatctcggattacccttaaagatgaaagcatctgcaagagttagccaaacccaaaaaacatttgaactatgacactacaaagctttggtgtgattggattagccgttatgggcgaaaatatcgctctaaacgttgagcgtaatggcttcccaattgcagtttacaaccgttcccgtgaaaaaaccgatgccttcatggccaaccgcgctggaggacggaatgttaaagcagcttataccctggaagaatttgtcgcttcattagaacgtccccgcaaaatcttagtcatggtgcaagctggtaaacctgttgatgcggtaattcaacagcttaaacccttactgcaagaaggtgacatcattattgatggtggtaactcttggtttgaagataccgaaagacgcactcaagaattagaacccactggtttacgctatatcggtatgggtgtgagtggtggtgaagaaggcgcgttaaatggtccttctctcatgcccggtggtacaaaaagttcctatgagtatctatcccccattttcaacagaatcgctgcacaagttgatgatggtccctgtgtaacctatattggacctggtggatctggtcactatgtaaaaatggttcacaacggcattgagtacggcgatatgcagttaattgcagaagcctacgatttgctgaaaaatgtcggtggtttgaatgctgcacagctacatcaagtatttgcagagtggaataaaaccgacgaactcaattcatttttgattgagattaccgcgaatattttcccctacgttgatccagaaactcacatacccttagttgatttaattgttgacgctgcggggcaaaaaggaaccggtcgttggactgtacaaactgctttggaattaggcgttgctattcctacaattactgctgctgttaattcccggattctctcttctattagagaagaacggattgccgcatctcaacaattaactggtcctgctcccacaatctttaaagatacaagaacttttgtgaacatggtgcgggatgcactttattgttccaaaatctgctcttatgctcaaggtatggcgttaatttctaccgcttctcaagcctataattggggtctgaatttgggtgaaatggctcgaatttggaaaggtggttgtattattcgcgctggtttcttgaataagattaagaaagcatttgacgaaaatccagcattacctaacttattgttagcacctgaatttaagcaaacaattctggatagacaagctgcttggcgggaaataattgttactgctgctaaaatgggaattcctgttcctgcttttagtgcttctctcgattatttcgatagctaccgtcgcgctcgtttacctcaaaacttgactcaagcacaacgggactacttcggcgctcatacttacaaacgtattgataaggaaggaactttccatactgagtgggttcccattgctgaagctaagaagtaagttgtttttagttagttacgattgatgttaggggcggtaaaaccgcccttagttgttagatttgtattgagtatgatgtataataagttaattactgggttattgctactgcaagcgatcgcctttaaataactattttctaatctaatatttagaagttgatacaggtagagaactttatagaacctacaaccaagtattaggcattttggtaactataatcaataatccatctccctggctcataaaacgctaagggaactccaaaaaataaattattcaatatttttttggaatcaaaacgactaccccctgctccctgccttgccataacgacaacttttaacgccgacctacttattattgcctgatggcactgattaaaattcccagaatctttttcacatccttgatataatattcacttaaatcaatggaaactattttatcttctaacttcaaaaactgccaaatagtaccaatagtcacagcaccataaacaattttaatctgattttgtttttgttcgttaaataactgagcagcaaccatttccgctatacattgcgccaaacctgatttcaagttttcatttttagtttctaccaatgtaattacaggtgcgcggacaaaaagctgttctttagaaagactaatcagaaaatcacaaaaaccatttaatccttgttggttatcaacattaaaatctactccagaaaataaactaatttcgtaattcaatttccgtctaacttccagtaaaattggactaattatcatttcagaccgagctttttcagtgttaattgaaacagctaagtcaacattttccttgagaattgttgctagtaaatcactacattcttcctctggtgtctctgcaaataaccctgaagattcatttattgtcaatccaaagttttggataacttcacttaatttaaactcactgtaagacatttttattaccttaactaaataagtaccaaagcaaaattaatttaacatattgattgaaaacaaaaatgcctgtattccttacctcttcccttctgcctcctgccttgaaagagcaggggaagcagggggagaaagacattttcatacttggttgtgaaacttgtttcattgagactgcctcctgcctccttaaaacccttgtagcaaacgttgaatagaaattttaatttctggaaatgctaacggagatatttcacctaaagtcaaagttaattcttgggaataatcaccatttattggttctctaaacacttttacttgttgattatttaaatctactacccaatattcaggaattgatgcagcagagtatgttttgcgttttacatctaaatctttattcagggtcgttttagaatattcgattaaccaaaatatattttcaggataaggatggtgactgcgataaatagcacgctgtggttcaactattgctaaatctggttctggttctgaattactttcaggaatagtaataggttttgcatctcttaccaatgcttttgaaccaagtaattcccgcagatattcagcagagtcagtattaatttgtgcgtgttctggtccttccggtgccatgttgataatttctccatttagtagttcaacctgacgaccagctaaaaggccaatttcaatcatgcgatgatagtcgtctaaactccatttagcagtagtaactgtcatggtgagttttccttgcatctaggctgtgattttcattttaagctcaaaattcaatactcaatacaaagatgagatattctgactcctgaatcttgaattctctttctttgatgaggaatttacgtctaattttcagtttttcaccttttgactgaaccttgattgctgaatgtttacagttacattattataatcaccaaaaatattgttgtttgttatataatagtatcacgtttattttataatattatcacaatcctaaagtttggtgttaacagttatcatggagtacccaaagcactggaaagaattggctaaaaacattaaagaaaaagctaattggcgttgtcaaaaatgcggtcgcgtttgcttacgtcctggtgaaaaacctaatgatattattaacctccgtgcctataatctccaggttcatcactggaatagagacccatctgataacagattagagaacctaatttgtctttgcagtggatgccacattaattatcatcgcggtggaaagggtaatgtttctgttggtcaattatctctatttgatctgtcaaaattttagattttattcattggaaatgtagatattttcttgaggagaaatggaaaaagaaaatacacaattaagctgttgtgcagctaaatcgaataaacagcattacctttatttttaactttgcgctcccatttaataataagacctccttcgtttagcaatttatttaataattcttctaactgttctactgat

SEQ ID NO: 2 - DNA, 160826 bp, Sphaerospermopsis sp. LEGE 00249
  LEGE00249_7
cggctcttgactatttttgataaaatcctctaataattgtatccacatttgtagcccacaccccagttctcaaatttacttttttcttatttccgtattttctcacaaactgctcaggattgctataataaaattgtcaatttgattgatgaagaaaccgacgaaattgaaagaacaaatattttaactgatttagaaaaacgatggaatattattgaaagtttacaatttcctgaagtcaatgcggctgatcaaagacaggatttaagcttactatttcagcgtacaactgattttgcaagatttttggacgatacaacctgcctaattagaggacgaaaagggactggtaaaactgcgttatattggctttttctacaacacaaaagtcttgcccaaaaactagctcctgggcgtttagataatactatatttgtgtcagcacatggtagatttcaaaaaaaccgtccatctcgtgaagaatttcaatttatccatcaaaatttgcaaccaaacagtggaacttgggaagctttttggagagcttatttactgcttagatgtcatcaggaaaacgtattaaagtttcctaaaggtaagaaagctgcaaagttccgtgaattaagagaaattattaatgatttacccaaagagagatggcaatctgaaagcacttcagctttgttagaattatctactaattctaatttaagacttctggtaaaagatgccatagatattcttaatgaagaagctaaaaataattctcaaaaactgtggtttctatacgatgatttagatgaagatttttctgaagcgggacaattaagacagcaagcattaactggactttttcaattagttcaatcttgtgatgcaaatagactaacagaaattagatttaaaattttcttgagagaagatatttggagtcgtttaagttttgataacaaaagtcattttactggacgcgatattattttacagtggactaaaattgactttttacggttagcacttcgtcaagtaatacaatctaaaaatttcaaggatttagttgatagatcctctcctattgctgtggaaagcattgatcaagctagtgaagaagcgattgataaagcattagaattgctttggggaagtcgtcgtagaggaggaaatagagctaaaaatgtatctcgatgggtttatgaaaaattaacagattcaggtggtactacttttcttcggagtttaagtatattcctcaaaggagcaaaagaacaagaattaaactataaaggactatcattaagtaaattgcgtacagaccgtctacttcaaggaaaatctttagaatttggcttgaaaaaagcatctgaaaaacgatgtgaagaaattaaagaggaataccctaatttaactaaattctttgatgctcttaaaggtaaattggcttttttatctaaagaacagttacaagaagtatggcaagattcagcgcgggatatagcaggttttgaagattttgtttcttttttacgtgagattggtattattgaatggcgagaaaaagagaaacgctataaggttgctgacatttatgtttatggttttgagatggttcgtcaaggtgctgtatagaaatattgtgatttatatcaattcacaggcaaacaaaagttaatcaatgggactgtcagaaatatcataaatggtataataataatgatctagcatatttaacaaccatatacttttcaggagatcaaaccatgactcacagtattaaccaacaatccaattatcaaaaattaactgcaattgttaacaacttgattgacaataatcctctttacctagaaaatctaaatagacaggaaatgattgacaatatcaatcacaattttgatcctgcatttgttcctgatgtaaatagcatttctgaagaatcattaattaaacgaattaaaagtattttatccttacatttagtctcaggaatgctaaatgattttactccagaacaaatgcaaatttttgatgaatctgtaaagcgtggtagttaaatgggttatttattagatactaatattgtttctgcatcactcaagcaaaatttacaagtcgcattaaaaattacagaaatgcgtcgccgaggtgaattgattgctataagtggtataacttactatgaagtacaaagaggacttttaagaagcaatgccactaaaaaattagccttgtttgcacaattttgtcaagattatcctgttttatttttagatgatttgaggatatttcagaaagcctcagaaattcatgctgatttaacaaataagggtaaaattattcaggatgcagatattttgatagctgctactgctattgttcataatttaattttagtttctcatgattctgatttaactagggttaatgatttacagttagaaaattggttaatttcttaattaatagatagaaaaaatcttacttattctctgctaagagtgcagtcagattttctaaaatctcattttcttcttttctcacagcttctaatctcatcaacaactttgttatttcctgctttgtatctaaactaatattatcagcaattgcattattcaacatcaaactattatcttctgatttcctaatttttaaaacggaaaataataacttagagatcttcttaaacccaaaagaaaacattgcataaatcaacttgagaggagttttcaaggtaaataacaaaccttgatccaatattttactaaataattgaaagattttccagattatataaatacctaaaaatatcatgaaagcagtaataacaggatgactaactgctaagtttaataatttcatgacccaggaaattgtaggatgattatcaatccaagttgtcatagtatcccattgatgagtgataaaattattaatagcattttccattgctttagaaactgaattagttaaatttcctgcttgtttagcactttcaataaaactatcaacagcgttgttttttacctgattaacattatcaattgcactggatgtagttgtagtgaaattatctttaacttgagttgctgtttccgttattttattaactacttttcctgtagaattactaactgtatttgttgctccttggaaggtttcagttaaagattgactggttttttctgctgtttctgaaaaactattcaatgatttatcggtaacttgtgtcagtgtattgactgttttttctgttgtgtctgtgacgaagttttttgtattttcccaaccgtgggaaactgtatcggtgatagaagataagttgttagtattgatgatgttgaccataatgcagttatcgaatttttttaatggttacaaattacagatattttcaggtaaataaaccacattttgatttaggtttcgcgtcaacagaagcattcggacaattaattatcagtttttacctaagactatcatccgaatgcttcgccctgactgtggtctaaagacatgaaaactactgtaacataagtttaatatgcgacggataaattttgtaaatccgtaaatatatctaaaaaaacttaataattaattatgttttgtataatttagtagtgtaggtagtatctaagttaattagatgcagatccgcgacttctgttatttattgtgtccataaatgataaatttatctcagaagtcggggatcttatcacctgtacctacaataaactagccatgagtggtgtatacatcacactattatcaactctgttcataaattctttagctaattctatcatgacttcatgggcatcaccatatttttgtttgtaggttaattgatgattaaaatccaaaccttcagctatttttgatctttctggtattcttgtggcaaaagttgggggaaagaagggattcacaataataaaattcaagttgtgggtttgggaaacagtgctgttataacgggaaattaaagtaccaataggactaattttatggtcgtaatcttttttaaattgagttatttgttctaacaaaagttctaaaccgtgaattgacattctgctaggtacacaaggaattaaacaaaaatcactagcaaaaaatgcacttttaattacattattaatactaggcggacaatctattaaaatgtaatcgtatttttctaataaaggattgataatgttatgtaaaattgccactgcattggctggtaaatattcctgaacttcaaataatcgcggactgctaggaattaaatgtaaacaattaaaaaagtttttatttctgagattggaaacgttttctttaactatgaacttctcactattacccttttctaaaaagtaatctgcgtttttcaaaagaaaaggtaaagtcaatcctttttgattatattgccattcccaatcttcttctgacatcatggcgctagtgaggttactctggggatctaagtcaatagcgagtacccgtttaccatacatggtatcgccggctaaatattctgctaaggccatgacgatggtagttttgccaactccacctttgaggttgcaaacactgattactttcgctgtcatagtttttggtagatggatacattaggggtatataattatattgttgcctaaaattgtagaaaattaacaagtaaaaattgctctatttataaatgacccctaacacccaaatggataccccaataaataaaagttggcatggtaaacttcatttagtctatgctaaacgccaagattctacacaattaatttacgactacaaccaagcacctttaaaaattcaacgtcctttttatcccgaaggtgaaaaaatatgtcatagtgtgattttacatactgctggaggtgtagtgggaggcgatcgcctatcttcccaaattcacttgcaagaagatacacaagtattaataactactgctactgctgctaaaatatatcgtagtaatgggttacaagcacaacaaactgtaaatattcaagttgatgctggtgcttgtttagaatatttaccccaagaaacaattttatttaatggtgcagtttatcgccaggatttgcgagtaaaattagctacaggaagcagctttttagggtgggaaattacgagatttggtagaagtgcgagaggggaaaaatttgtacagggagagatgcgatcgcacacagaaatatggcaaaataatcaaccattgtggattgatagacaatatttacccggtagggaagaaatatttcacagtccccacggtttagcaggaaaacccgttattggtagttttgtgtgcgttggggttcccatatcacaggaaattattaaacaagcacgttctttaattattcacaactctatcaataactctgatgctggagtaactcgtttagaacatggatttttgtgtcgatatcgtggtaattctacatcggaagcaagaaattggtttacaaatatttggcaaaatttacgaatatcgttgttaaatcgtggtaattgtatacctagagtttggcagatttgaaaaagcattcagccgtcagctatcagttatcagctatcagctattaactaaaggataaaaaataagaataaatatagaggaaaaaacaatgcaacttacaccgcaagaaaaagataaattattaatatttactgctgctttggtagctgaaagaagaaaaaatagaggtttaaaattaaattatcccgaagcggtagcttttatttccgccgcgattttagaaggtgcaagagatggacaaaccgtagcagaattaatgagttatggaacaactttattaacacgagatgatgtgatggaaggtgtaccagaaatgattcatgaagtacaggtagaagcaacttttcctgatggaactaagttagtgacagtgcataatccgattagataattctcacgcaaagacgcaaaggaaataaatctatgatccccggagaaatcattaccccaccaggagaaatcgaactcaacgtaaatcgtcccaccactaaattaatagtagcaaacaccggagacagacccatacaaattggttcacactttcacttttatgaagtcaataacgccctacactttgaccgtgaaaaagcgcgaggaatgagattagacatccccgcaggaacagcagtaagatttgaaccaggagacgaaaaagaaatcacccttattcccctagttggtagtcgtcaaatatacggattcaacaacaaaataaacggaaaactctaaattctctctctgcgcctctgcgcgacggacactttgctcaagtcgggaaacccgcccacacaagtgtcctcctctgcgtgatacaaaaaaggataaaaaaatgccctacaaaatgaaccgccgcgcctacgctgacacctacggaccaacagtaggcgacaaaattagactagcagacaccgaactatttatagaagtagaaagagactttaccacctacggcgacgaagtgaaatttggaggtggtaaagtaattagagatggcatgggacaatctcctatttctaacgccgatggtgctgtagacttagtaattactaatgctttgattctcgattggtggggtattgtaaaagcagatatcggcattaaagatggtaaaatttataaaattggtaaagccggaaatccctatattcaagataatatagatattattattggaccgggaacagaagctttagccggtgaaggaatgatactcaccgcaggaggaatagacactcatattcattttatctgtcctcaacaaatagaagtagcgatcgcctccggtatcactactatgatcggtggaggaacaggaccagctacgggaacaaatgccacaacttgcacaccaggaccatggaatatttaccgaatgctgcaagctgctgacgctttccctgttaacttgggatttttaggcaaaggtaacaccagtcagccccaagcactgagagaacaagtagaagccggggtaataggtttaaaactccatgaagattggggaacaaaccctgcaactattgatacttgtttaaccattgccgatgaatatgatgtacaagtagcaattcacactgatacattaaacgaagccggttttgtggaagataccatcgctgcttttaaacatcgtgctattcacacctaccacaccgaaggcgctgggggaggacacgcaccagacattattaaagtttgtggacaaaccaacgttttaccatcttctactaaccccacccgtccctatacagttaataccttagatgaacacctagatatgttaatggtgtgtcatcatttagatcctagcattcccgaagatgttgcctttgctgaatcccgtattcgtagagaaactatcgctgctgaagatattctgcacgatttaggcgcgtttagtatgattgcttccgattctcaagcaatgggaagagtaggagaggtaataattagaacttggcaaactgcccataaaatgaaagttcaacggggaacactctcccctagccttctaggagaggggttgggcgagaggtcagacaatttccgtgctaaaagatatgttgctaaatacacaattaacccagccattacacatggtattgctgactatgttggttctgtggaagaaggtaaaattgcagatttgtgtttatggcaacctgcgttttttggtgttaaaccagagatagttattaaagggggaatgattgcttggtcacaaatgggtgatgctaatgctagtattcccacacctcaacctgtgcatagtcgcccgatgtttggtagttttgctggtgcgcgtcatgcaacatcattaacgtttgtttctcaagtcggtttagaaagagaaattccgcaaatgttgggtttgaaaaaatcaattgttgcggtttcgggaactcgccaaattactaagcgagatatgaaattcaatgatgctttaccgcaaattgaagtagatccagaaacttatgaagttcgtgcagatggggaattattaacctgtgaacctgcaacagttttaccaatggcacaaagatactttttgttttgactcctgtacgggcgaagtaggggcgaagcattcggaaaataacctgttcagaaaattgataatttgtcgcccgaatgcttcgcccttacaggaaaataggcttggagaaaaatttataattagtcgcccgaatgcttcgcccctaacactcctgactcctgacttttgactcctgacttttgattttctatgcttctaaaatctgaatttcatcaagttgattaattaccacatctgcacctttaacattatctgtattattaatccaagtaataccaatacaacctgcggctttagcatgacgcgccatttgcatatcacccactgaatcgcctaccatcaaagtagctcccggtggtacgcctaaagtttggcaagcctgtaaaaataatattggatctggtttactcggaccttcatcaactcccatttctaattgcaggtaatctctgagatgatgagtaatgacaaatttttgcacttccccagtggttgcggctgaaagaatacccagttttaatcctgctgctgatagtgatcttaaaacatccaagacacctgggaaaagaggtgcgggactttgactcacatattgatcagcttctgctaaagcttgacgagcaatttttaaagactcaaaccaacctcttccagtttcggctatgtatgcagcagcagctacttcggtttctttgcgactagctacagacattaaaccagcaggatctaaaatattgccattaataccaaaagccattaataatggttcgccaataccgggaatttgcgcgtctatgatcctagctgctttttgtccgagcgatcgcaaataggtttctgagtcttccaatgtaccatttttgtcaaataaaatcgcttgaatatcggaaaaggtgatgtctctacatttgatatttatcatattagaaggagatcaaggagtcaggagtcaggaggtaggaagcaggatggggagatgggggaaattatttgtattttcccaatcaccagtcaccaatcaccaatcaccataaataaaaaaagagggatattccctcttgattaatactttgttgcaaataatcacaactacagatatattactcttcaatagctgctggaatttcctcttcaacttcagttgctgctggaatttctgcttcagctacaacttctactccttccactggtgcagcttcagctacttctgctggtgcagcagtgataccttgctgtttagctaacatttgttccctatacttagctgccatttcttccgccttatcatagaccaaatcgcggtttttgatcatatcaccgggttctggttctaactgcttggtagacagcgaaatgcgtcctctttctgcatccaaatcaatgatcatgactttcaattcatcattgacattaaacacgctgtgaggtgtgtcaatatgctcgtgggaaatctcagaaatgtggagtagtccgctaacaccgccgatgtcaataaatgcaccgtagggtttgataccgcgaacagtaccaattactacttcgccaacctctaagcggttcatcttgcgctcaaccagcgcccgacgatgggagagaaccaaacggttacgttcttcatctacttctaggaattttaagggtaattcttcccctaccaattcttcttttggtttgcgggtactaatatgagaaccggggataaaaccacgtagtccctcaatgcgtaccaatgcgcccccacgattagtagcaaacacaccagaacggacagtagcatcttctgcctgtaattgccgtactctttcccatgctctcatgtattcaatacgacgaatggacagggttaactgaccatcttcgttttcatcagtgaggatgaaaaattcccgtgtttcgtttgattgtaagacttcttccggtgcatcaacccggttaatagacatttcctgtataggtatgtatgctgctgttttagcaccaatgtcaatcagagcgccgcgcggctctatactaaacactgtacctggtactatatcaccagggctgaagtgataatcgtacttatcaagtagagcagcgaaatcttcgtgagtaaatccaatttctgtagcggttaaattctgattgaccatgctgttttgttcctggttctagtctccgtaagtttttgtcacaattaatgatgtatatgcgagggcttttaaataagtctacacttacatccttgttaatcctagcgcagaagagctaggttcacacatattatcttccagatatgatattatatcatatcccaaaatttttttcactttttgcaagttaggggtcagtagtcagcagtcagcactatatcaaaatattatccgttgccacataaatatgcagcaacggatttgaatcttacttaaaaaagtgttaagtctgagatagctgaaagctaaccgctgacagtgtttaacttcttagtctttctcttttctctcaaagcggggaggttcgcgaaatgcgatcgcaaaaaagagaacacctattgctagggtcaaaatcaaaatgtatgcaacgctttccatattaggatttcctgcctatccagccagtaattttagtttaccaagcagagtaaaaagcatgaagtcataaaacttcatactttttacttcatgcttgtttaagcttccttacgaacacgagtggtcttgtcacccaatttctggaacagaccccactctacttgttcttctagatccgcttccacacctgcgaatacatcgcggtagatggttctagaaccatgccagaggtgaccaaagaagaacaagagcgcaaagacagcgtgaccaaaggtaaaccaacctctgggagatgtacggaatacaccatcagagtttaaggtttcgcggtcaaattcaaagatttcgccgccttgagccttacgagcatatttcttcacatcggcgggatctgtgaatgttttaccattcaaatcaccaccgtagaagctaacagtaacgcctgtttgctcgaagctgtatttagattctgcccgacggaaaggaatgtcagcgcggacaactccatctttatcggtcaaaattacagggaaggtttcaaagaagttaggtagacgacgtactgtgagttcgcgtccttctgcatctgtgaagactgcgtgaccttgccaagattgggcaataccatcgcctttaaccattggaccggtacggaataaaccacctttagcggggctatttcctacatagtcgtagaaggccaatttttcggggatttgtgaccaagcttcggacaagcttgcaccgttagcaacactattttgcacacggcgctgaatttcttgacggaagtaaccttggtcccactgatagcgggtaggtccaaacagttcgatgggggtggtagcgttaccgtaccacatagtaccagcaactatgaaagcagcgaagaataccgcagcgatactgctggaaagtacggtttcaatgttacccatccgtagggctttgtagagcctttcgggaggacgaactgtgaggtggaataaaccagcaataataccaactacaccagctgcaatgtggtgagctacaacaccaccggggttaaaggggttaaacccggctggtccccattctggtgctactggttggatgctaccagttataccgtaagcatcggaaacccacatcccaggtccaaatagaccggttaagtgaaaagcaccgaaaccaaagcaaagtaaaccagataagaacaggtggatgccaaacatttttggcaagtctaaggcgggttcgcctgtgcggggatctctaaatagttctaaatcccagaaaacccagtgccaaacggctgctaggaataataaaccagaaagaacgatgtgagcagcagcaacgccttcaaatgaccagaagccaggatctactgctgtgccaccggtgacgctccagccgccccaggattcggttacgcctaaacgtgacataaagggaagtacgaacatcccttgtctccacatggggttgagaactggatcactggggtcgtaaacagccagttcgtaaagtgccattgaaccagcccagccagcaactagggctgtgtgcatcaagtgtacagaaatcagtcggcctggatcgttcagaaccactgtatgtactcggtaccagggtagtcccatcgactacgctcctcctcgaagagttagtttgtttacaaagcaattttcttactgaggttctgagggaggtaaactaccacccagaagtctctctgagtttttgttattgccagtcttgagtttaaccacagattactctgtagtttattatcgcttattcgctgtcacaagttaattccctaagttcgtgactttcaggaagtagctgttttggcgatcagcaaaaatgagaatattttaaaaagtgtaactattgatggaactctttgcaagctcctaaatagatgtgattagctagtttttgcatcagatatccctactcatgcccacaatgctactatttatcatctgaggcactggttaagcttaaattattctaaatatacaataaagctgttcgtttggtataaaattaggactatgattcccatggcgatcgcttgttgaaaaacaacataacttatattgacgagatttacacattcctgtccttgattttaatgctgaaatttataggctataattcaaccactattcaacaaataaaggaggataaaatggatgcaattactactcagcaagcaagtcaagacttagataatttagtagatcgggttattgcagatgtagaaccaacaactatttgtaataacaaaggtaacaaggccattttaatttctctagaggaattttcatcatggcaagagacattatatttactgtccaatcctgttaacgccaagcatcttctttcttcaattcaatcagcaaaagcaggtgatattattgagagagacttaatagaagaatgaaactcacatttacagaagctgcatggaatgattatttgtggtttcaagatactgataaaaaactcttaaaaagaattaacactctgattaaagaaattctgcgaactccgtttgagggtatgggtaaaccaaagccattgaaagctaatctatcaggttattggtctaggcgcatcaacaccgaacaccgtctggtttattaagtgttagaagaaaactagaagaaaacataattattgtagcttgtcattttcattatcaggattagatattaagtacgggagaaacagcaatgacagtggcaattgctaaaaagatgacctttgaggaatttctcaactatgacgatggtacggatactttatatgaattggaaaatggaaaattaattcccatgccttcggaaagtgatataaatcaacgaatagctatatttctattgatctatttttctcaattaggtatcccgtcttctcgtttacggatgaaagctgagatagctgtaaatagtagaagtgtaggtgtgcgtatacctgatgtggtagtttattctgaagagttagcggtggcaatggcaggaactactcgttcactggtatatatggatatgccaccaccattattagttgttgaagtggtcagtcctaatcaggctaatcgtgattatcgctacaagagatccgaatatgcggcgcggggtattcctgaatactggattgttgatcccattactcaaaaggtgacagtgttggaatgggtagaaggtttttatgacgagcaggtgtatgaaaatgacagcttgatagtttctcccatatttccagaactcaagttgactgctgctcaagttttacaaggatgaaaatctttgatatgaaaaacagcttataaatataacatatatattaaaatgattaactgctgattttagaaaaattaatgttgataactgggtttttcaggtctataagacggtggggtaaggtaacaaaattcctgtcgttgttctccttgtgtttcttgctggctgtaagctgtactccaagtccccaaccaactacaccacctagtcctggtgcggtgaatactcctgctggtgatggtaggattactatcgggacaacagcaaaaccgagaacccttgatcctgctgatgcttatgagttagcatccttgggtttagtctttaatatgagcgatcgcctatatacttatgaaccaggtagcacagaaattaaaccccaactagccacagctttacctaaagttagtgaagatggtttaacatacaccattcccctacgggaaggagtagtttttcacgatgacacaccttttaacgctaaagcaatggcatttagtatccagcgttttatcgaaaataaaggtaaaccatcttttctactttccgatacaattgaatccgtgaaagctacaggggactatgaacttacaattaaattgaaaaaaccctttgcggcttttcccgcattattagcattttctggagtgtgtccagtttcacctaaagcttatgaacttggtgcggggaaatttcaacctaatacctttgtaggaactggtccttataaattagcccagtatggtacagattctttaagattggatgtttttgataaatattggggagaaaaaccagcaaataaaggaattaacgtacaaattcaaaccagcccagtgaatttatttaatgcttttaaaactggtgcggttgatgttgcttatttatctttacaaccagatcaaattcgcagtttagaagatggtgcgaaaaacggacaatggcaagctatcactgctcaaggtagtgtagttagttatatggtgttgaacagaaatcaacaaccattagataaaccagaagtaagaagtgcgatcgcctcactcgttgatcgtccattattaaatgaacgggtattatatggtcaagcagatccactttatagcatgattcccacaaccttcaatgtttcccaaccattatttaaagagaaatatggtgatggtaaatttgaagaagcgaaaaaattgttaactaccgcaggtttttctaaagaaaaacccgcccaaattcaagtttggtatcctgcaagttcacccacccggagtttagcagcacagacattaaaatccttagctgatactaaaatggacgggatattacaaatagaagttaaaaccgtagaaggtgcaacatttttcaaagaaatttccaaaggttcatatcccatcgctttgctagactggtatccagactttttagatccagataattatgtacaaccatttttatcctgtgaaaaaggttcagaagctaaaggttgtgaaacaggtggaagtcaaactcagggttctttttactatagtgaaacaatgaataaactcattgatcaacaacgtcaagaacaaaacccagaaacgagaaagaaaatctttactgacattcaaaatctagttgtaactgatgttccttacgttcccctatggcaaaacaaagattatgtatttgcccaaaaaggcgtaacagatgtcaaacttgatcctactcaaaacttgatttacagaacaattaagaagtagttcttagtcattagtcattagtcattagtcattagtcattagttatatttatcctgactcctgacttctgtacgggcgaagtaggggcgaagcattcggaaaataacctgtgataaaaattgataattagttgcccgaatgcttcgcccttacaggaaaatagccttggacaaaaatttacaattagtcgcccgaatgcttcgcccctacgactcctgactccttgaactccttgaactcctgaactcctgactcctaataaatatgtcccgttctaaagccttacaatattacatagtttctcggttgctatttgcaccactgcaactattaactattatcaccattgtttttttattattaagagccactcctggagatccagcagatgcaattcttggtggacgtgcgccagaaagtgctaaggaagaactcagaaaacaactaggtttaaatttacctatctggttacaatatctcaattatttgggaaatatactacgttttgatttaggaacttccttaaccagtcgcggtcaaaatgtgtgggaaattatcagccaacattttccagctacagtagaattagccgtttgtagtatgctggtagctttaattgtgggaattttagtaggtacactttccgcctctcgtcccggtacttcttttgatgttggtgggcgtttatttggcattattacctatgcactccccatgttttgggcgggaatgttattacaattaatattctcagttcaattacgttggtttcctaattctaatcgttttcctcctaatatttccccacctccaactcttactggtttatatacaattgatagtttattaagtggaaatgtgagtaattttttcacagctttacatcatttagctttacccagtatcactttaggaattttactcagtggtatttttgaacgtattgtgagagtgaatttaaaacaaacattaaaagctgattatgtagaagcagctagggcgcgaggaatcccggaaaataagattttaatatcccatgctttaaagaatgccttaatacctgtaattacagtcttaggattaacatttgcttccctgttgggaggggcaattttaacagaagtaacattttcttggccagggttagcaaatagattatatcaagctatttctgaacgggattattttacagtgcagggtattttagtattttttggggcaattgttgtgactgcgagtattttgattgatattcttaatgcttatgtagatccgcgaattagatattaacccaatttgctagttatatcatttggtttgtaattctgtttttgatgattttcagtgttgtggggtgggcatcttgcccgcccttttatacttcatccagatgaaatttgttgttgatctttacctacctttgcaaactgcgaggatcaagggcatcccttaacccatcacctaataaattgaatgataaaacagtcagaataatcaaaatagcaggtgataaaactagccaaggttgtaagactaaaattgaagcattactagctaaagaaagcatatttccccaagaaggatcaggttgttgaatacctaaaccaatcagacttaacactgcttctgcaccaataaaactcggaatggtcagagtagcagaaataattacataagtggcagtttggggtaaaatatgacggagaataatataaattggcttacctcccattgccagtgatgcttggacaaattctctttctttaattgataaaacttgaccacgaattactctagctaaacctgcccaactgatcacagaagtaattacaactattaataaaaagcgttgtgtactggttaattgagggctgagaactcctgataatgctgctaacaaataaatgctaggaaaagtcattaacacttctgctaaacgcataatcacactatcaattacacctccaaaataaccagaaataccaccgattattaaacccaaaggataggtaatgatgatgccaaaaatcccaataaataaactaatcctaccaccataaagcagacgactaaattgatcccgtccttgttcatcagtacctaaaatattaaatttggcttcacctgtagaaccaaataaatgcaaatttaggggaataccaggaatgatagtgacttcatcccatttgggaggtaggggtaaactgagttgaaataatctatattctggaccggaaacaaataaagccaaaggtgaaggctgtttaaaatctacaattaacttacgttcccctgtttctagatttgtatctccttgaattgttggataaatatggggtccgataaatttaccctctggagaaacccaataaatgcgggtaggtggcaatagcgaaccatttggctgtgaatcataaggattataaggtgcgataaagtcagccccaatgactgctaaatagaacactaatagtataattgccccaaatcttgctaaggaattttttttgagtttttgcaaccaattcataatttttttgacaaaacttatttacaaaacaatgaatgataattaatagagttagtaattcattcagctaaatttctaatgtatgtaagtttctatttatagatcaggtaaaagttaagagtggctaatttcacaactaccaattacccattaccagcctgaaatagaagctacataaatttagtgatttaaccatttaactgttcagctaaataccttatttcctcattctgtttttcatgttcgaccacaaacacattagcataaagattagctaaaacttgttttccttgttgtgtcagtcctagataacgcaatccttctttgatataaggatagacaccattccagtaaaatttggcgtagtttttgcgtaagtctccaggatttttataacctaaagctttattcactccggtttcttcaaattcataaaataaacttgtaatttttttcaggtaacggggatcacttaattgcccaatcaaatcagcagcacgtactatgccggcaaaatgagtggtatcttgatgatcatcggctctaggaactggaaacctggttagttcaatattgttcttgatcacttccgaatctatcaaaggatgtccaccaaatctttcatcaataaatagtttagcccgatctacatgatagggtgtgagactagcatcagaagcaccaggaggaagagcaaccatgttgccattttgtcctgtagcatataaactttctgcttcttgatcttcgcggcaaactcctttgacataaccaatatcgtgacacaataaggagataatcacgtgcaaccaatcttcgctggaaactcctccttctcggatgtgtctaccacgcaaaatttcttgtccgacgagggtaacgagaacagagtgttccacattgtgatataaagcatcactgttggcgatgttttccaaagccatgttaccagcccaagctatgatgtcttgataatcagtttttaaaccgccgtaggtacgtcgataaccttctcgcagttgatttacaaaagcatcaatgataatttcagtggtattgaacatagaggattagaggattctcagggtatatattttttataatcatgtttatctgttgcaatttcgttcaatgtaaatcctttatcttaccagttaaaggggcgatcgctttctaactctaaaaaagataaaacttttcacgtttattaagcgcatcgaataaataaccaagttactatactcagagactttggtgcttctgactgccattggattaagtgtacattatccatctcaatttttcctcacaaaccaataagttcatttataagttatcatcctttactattaaccgtcttgtctctcctccctcctatttgttctagaaaaatccgttactgattttcgcggaatttatgatataatagcccatagactagatttccatacttgtaatctgcgggtgtaattcagtggtagaatgtctgcctcccatgcagaatgtcgtgggttcgagtcccatcacccgctttccaaatttattgtcctattttcccaaatataataaatttaggagtaaacgctacagttttttatagcagtgaagagggttttactcttgactgctgctatattatgttattgctcagactgccaaatcctgattgtatgatcagcactaccactaattatcttatttccgtcaacattaaaagctacagaacgatatcaaatgtcatataagttatcaggctaagaacaatgaacacttagtcaattttaaccattagacatctccgaaaattacataagcataacctgaaacccattcgtagggacaattcatgaattgtccctacatctttttcggagaagtctattcaattccctgatgtatccggataaaataggttgctttagtattaattatattaataacagaaaaaccactccagaagtacaggcaaggggtaaaggtttaattttaattaatcttctcctggagtgggtttggggttaagttgacctctaaatagggtttgctgaaaaagtctcttcgtgagggcttggaggcaggagcaagaatgaattatgatagtgttccatgcttttttgctgtctacttatcctttttacttcgatttgagagcctttcttgcagaactagcaacttacgttaaatagaataataaagcgggaaagattttgcatctttgggcttgacataaactcgctcttgtggttctaattttaactcatcaaaacgttcccgtgttaaatgagcagtaaaattttgtccatcatccaaggttaattctacttgaatttcccaacccaaatgaatgacacgattaactatagcagatgctgttgtaccattagctactctttctacaatcacgtcttggggacgcaaaaatacttctgggttagctgagtcgaaaccactgctttgaaaaatcttggcagaactcggtaaaacattcacaggaccaatgaaactcattacaaaagcagaagcaggatgatcataaatttctgcgggtgttcctacttgttctacttttcctttgttcataactacgatttcatcagaaacttccatagcttcttcttgatcgtgagttacaaacacggtggtaacgtgaacttcgtcatggagacggcgtaaccaagcacgtaaatctttacgcactttagcatctaacgccccaaatggttcatctagtaataatactttaggttctacggctaaggctctagctaaggctactctttgtctttgtcctcctgaaagttgagaaggatagcgatcgcctaatccacttagctgcactaattctaacagttgttctactttaccgtgtattttctttttcggtgctttgcgaatttctaagccaaaggcgatattttgcctcacggttaagtgcttaaataaggcataatgctgaaatacaaaaccaatatttcgctcttgtacactttgataggtagcatctttcccagtgagaatgattttaccactatccggcatttctaaccccgatattaaccgcagtagtgtagatttaccagatccagaaggtccgagtaatgctaccaatgaaccacttttgatttctagactcacctgatctacagcctggaagctgccaaattgcttagacacattttcaactactatgcccactggttttatacctctgtgactaatctacggtttaggagtagaattactgtagttttatttatatcataaatagggaatagggaatagggaatcatttccggtatcttaccaactacaaccgccacaatctaaagcaccgcaatcaggagtaatattgattaattcaggacaattacaagcggtatcagtacaatagacatctccaaaatagaatgtattaatttgtcataagttttaggggcgaagcttatgggcgataatttaacggaaaaatcagacatatagatattccataagcttcgacctgcccccataaataagttccataatttcttttctgaagatgtctaattaattcctatatccacaacatcaaaaatatcctgacaagatgataggggtgtttttggctgaggtttcctgttttgttgattgtctgtttgtgttggtggttctagtgcctcatctatttcttcagattgcgatcaacacaattgcaatacctgtcgtactggtagttgttttgagcgcgtagggggataattgactatcccttttgagtaagtcttaaagaatctgcgtgtctttagacagcagagtgtcaacaccatacaaaacgcgatgagcgcaagcaaaacctttatggggagaaaggtatttttgatatccgctaattgcagaaacactaatgtttctactcacagcatcccatagagaaatttgcatataaaaatcccgtttttatgtggggagatagtgaagaagcagggtagcagggagcagggggaaattatttgtatttttcccagtcaccagtccccagttcccagtccccagttcccagtccccagtccccagtccccagcctaaaccagaaaaccaacaatttagttaatattagaattttttgtagttatcatttacaaaaatctactcataacccctgattgagtaattttacttgcgtttttatgacgaaatgttaaggaatattgcaattctgtcaaaacattaagcttgagcgtcatatcagccgaaactccatgataggatgctttcggtaaatgtgaagattgggagtaaacctttgacattacgggttgctgttgtgggttcgggcccagccggttcatgcgctgctgagacattagcaaaagctggcattgaaacatatttatttgagcgcaagctagataacgctaaaccttgcgggggtgctattcccctgtgtatggtgagtgaatttgatctacctccagaaatcattgaccgtcaagtgcggaaaatgaaaatgatttctccctctaatcgtgaggtagatatcaatctggtaaatgaagaagaatatataggaatgtgccgtcgtgaggttctggatggttttctccgtaaccgtgcggctaaattaggcgcaaacttaattaacggtacagttcaaaaactggatatacccaccaataacaatgatccctatacaattcattattttgatcatgccgtaggtggtgataggggagaacctaaaaccctaaaggtagatttgattattggtgctgatggtgctaactcccgcattgctaaggaaatggatgcaggggattacaattatgcgatcgccttccaagaaagaattcgcattcctgaagacaaaatggcctactaccatgacttagcggaaatgtatgtaggtgacgatgtttctactgacttctacgcttgggtatttcccaaatacgatcacgtagcagttggtactggcacaatgcacgttaaccaacgagacatcaagaaattacaagctggtattcgcgcccgtgctgccgaaaaattagctggtggtaaaatcatcaaggtagaagctcaccccattcctgaacatccccgtcctcgtcgtgtagttggccggatcgctttggttggtgatgctgcgggttatgttaccaagtcttctggtgaaggtatttattttgcagcgaagtctgggcggatgtgtgcagaaaccattgttgaggtttctaacaatggtgcgcgtattccttctgagaaagagttgaaactttacatcaaacgttgggataagaaatacggactcacttacaaagtgttggatattctgcaaaccgtgttctaccgttccgatgctacccgggaagcgtttgtagaaatgtgtgatgatttggatgtacaaaagctaacttttgatagctatttgtataaaactgtagttccagctaaccccattacacaattgaaaattacagcgaaaaccataggtagcttgttacgtggtaacgcacttgctccttaattttaggtgacaggtgacaggtgacaggtgacagagaatgaatatagatttttgttctcattcctggatatcttgattgctgtaggggtttagcaaaagctgatttttctcaacttgaggttaaaaccatcaccggactgggaatttattcccagtctcatagtaacaagcatttgggtgataatttgacggaaaaatcagacatctagatatcccaaatgcttcgccctgccccgataaataggttccataatttcttttctggagaagtctattgataaaatattggattaagctgttgtgcatttattctctaaaaatacttaacgccaattgtaaatgtttttctgcttcttgatattgattcatccgcattaaagttttaccaatattacaaatcccccacgcttcttgagttctataccctattttttgggcaacttctaaaccttgtttattgtaatctaatgctttgacataatcctccatacaaatatacaccagtcctaaatttgttaatactatagattcttgttcaggatcaccaatttctctcacatttactaattcattctgataacattccaaagctttagaatattgtcctaaatatatataagctaaacctaacctggtatttaaaatgttttgtagatggcgatttttaagctcaagagcaatagttaacccttgttcataaaaatcaatggcagtatcataattactctgcattaaatacacactacccaaattatttaaaagttgagattgcatagatttatcatctagttctatagctatttctaatcctttttgataacattgaaaacactcagaatatttgctaatactgtagtaaacattgcctaaaccacacaagtaagttagttcagttacaggttctaaattacccagaagatgtttatataattgaattagttctgaataacatccccaaatacccaattgttgatgaaattgttgttgactgggtggagttaaagacatagataatatatcactagctggtttccaagcttgagcatcacaaagatgataaagtgcttgtaaataaccttctaatttttgccgatgagtagcattaatattagtttggtaatctgttaaccagttgatgacggcaatataatgatctaattgttgtagggaaacttgttgtaaaagattagatggttgaatgcctatattttctagtacgatagatcctggtagtaaggaaatttccatattatgcttttttatcctttttgtgttaataatttttcataatgagctatagcaacacttctgactaaattgtgcattcctatcagcatcgtttcattatttgcaagaaatgaaatttctactaaataacgatcttgtaaagtttgtagtgcaaattgttgctgttcattagtatatcctctatattctaaatgccttaaccaccaactttgttgtactggaacacgatatactgaacctatgcaaagtaaaatataggcatgatgggcattatctgataatcttttgaaagtttgctctagtctactttggacttttacccgtagctggatagaataccgatctaatttccattgatcatttgttgattctattataccttgactagcttctgctaaagctttttctacttcttcaatttccggtccatattgttgccaataagcggaaacttgagaggcaaaatcattaataatttctccagcaatggttcttaatgctaaaggatgtcctttgtatgctttgcctattcttaacagtagtttcatttctacagatggcaaattagcacctaaaccaactttatgaaataaagtgaattgttccgtttccgtcagtccatccactcgctgacagtaccagaaattaggatagcgcgatgctgctgctactagttgatgtggtaactcttgagaagtaataataaaacgactttgacaagtttctgctgataataaactagcgaaaaactgacaccaccattcatcaataaaatcactccatccagtattttcatctcccagtagcactaattctaaagaatcaattaagattaactggggatgatgacaaaaatatgtaactaaacgtagtagtaaagactgtggttgttttttttcttctgatgaaacttgttcccctgcattttctaaccatttgacagcaacacttacaaagtctgaaggggtgcttttatcatcaaaattttttcgatacaatttttctggatcatgatcaaatttactacttaactcaatagttaaacgttctgctaatgcagttttaccaattcctgttagtccaactaataaaagtaaacgacaagaactttgtaaaagttgagtgagattgataattaaatcatctcttccagtccacccactatcataaacaaaaaattcagttattaaactggggagattggatggttctgatttatttgcgggtatattttgggaaattaattctggtttgtatttatgaaataagctgatcagttctgtgcgtttggaaaaacgctctccatcgaggttttttaagccaaaagctttacatatagattcaatatgtttgcgaactgttgttctagttatgtaaagagactccgcaatttgttggtctttttcaccacataggaatttatctaatactcgtcgctgcttaggggttagtccgtcgagtgcttgatggaacttatcaatatccactgtactgtttgggtaatgttttgattgggtatgttgtcaggttaatcaatattatacacagttgtgaatttttctacacagttgaaaaaaatcagaaattacttagttagggtgcatcagatgttaccaatgatttatttgtaggatttattgagtttgaaacgctctacaaggaaaagtagcatcccaattttgtaaaaacacaccttggctattaagctgttgtgtatttaatttgcataagtttaacaggcaagacttgtactgagcggttagtgagcgcagtcgaactatgtcgaagtatgcctgttccacaagagctaagaatattaggattataaaatttagctgcgtaacagcttagaaattgcggctatacaaaacaaaccaatttcgcctacactgactaacaactcaattagataactttggactgtgtagtattgcatttcagtagttttaataccaaaaactactttgatctcgttatttcatcccaaaaagtacgtggattgataacaggaatattttcaattggatgtaagatcagcaaatcagcatctccagtaataagatgtgaagcatcaccatttaaagccaattcgataaatttatcatccttggtatctcgacataatttcacctgctttaaaatttccacaggaaaccatgtagttttaatacggatagacaacccatcaatgtcatcagaatcaatatatttagcaaatttcgatcgtctcagaacagacaaaagttctgttaaagtagcggcagaatataaaataattccattgtcttctccccagtttaaaacctgtgccgaaacagacttaggaaacaaaatagcagtaactaaaacgttagtatcaaggactagacgcataaatctactaatcttcagttaaaagcttctttaatttatcctcagttaaaccacgttcttgagctttacgtccgatattttctctaaattgttgaaattcttgaatattaatccgagttatgcgttgatattcttcaatagacataataaccgcaacatcacgattttgctgacggatagttacaggttcatgttgcactttatcaatgactgcggcaaaagcttgattaacttctatatctgaaacaaattgcataatttcacctcatttgtttttattatagacaaattttctatcacatcttacctgagtcagtatctatcgcatttattgagtaattatttttcatatatattttatgaattagtccgtattatacacagttgtgaatttttctacacagttgcaaaaaatcataaattacttagtatgctgtatgagtaggtaatatttatcaatgtcgtatttattacatgaagtaatatgaactaattgtagtatgatgtatggtggggtgttattaaagagcaatagtaaagcactgctgcaagcagttcgctcctagttcaatttattgaagttaatgttttttgtataaaaatcatagatttaaacaatctatgaatctaatataagcccatatttgctaaatttgactgaaataaataacttgctgttatttgttagtgaaataatgtggtgcgatcgctttatttggctttacttagttctacttaggagatactgaataaacctaaaacccatatgaatcaaagattagaggtatttaaaaaaaatttcctcactatttgcaacacagggtgaatctaatccgtatataaattgtaggcgatatcaaaagtctctgtttagttcaatgcattgtcacttataaaacattactttccactgcctaacagtatgtcaaattccataccgccagaaaatcaaaatcctgatgaactaactgatagagatgattttgattctacctcagtagttaattctcttacatcccaatccaaaaacccacagttagtagtagaaacaggtaaaactgctgttttagatgtttggagtgcgttaaaactaatttggaatgatccaaataacggactgcaaacggcaattaacagtttaggagatagtagaattttatatgcgggaattgcactttgtattctatttgttttagctgcttggatggcagtatcaaaaaccatagaatcccttgcaccattgttttctttcgggggtttatttggtacaagttataagaccgagttaagtttttcagaacacttgcgagttattttagctgccacaattcccgtgttagggatgatagcagttttgtggatcacccgcaaaatatttaaaggatctggtaattatcaacaattcatatttgttacaggttgttgttttgcccctattaccttttttctgttcatgttgtggttattaggtagtaatgcagcagaattaatggctttaatttcggtattttgctggactacatttgttttatttttgaatacagcactcataggggtactgggtttatcttctcgcaatgcactattgctagtaccgatagttttagtgtctgattttttcatcactagagttggtttagatattttgtattgaaaccagttcgagaataattagcaaactgtttcagtttgttgttatcaatattttcatcaggagtttatcatgggtcagacatttgtttttctattagcaatactgggactattgggatattttgtatccaaaatttacaatcaaatcaacagacttaattccagagttgagagaaacttttctggaatagatacacaattatccagaagacacggtgttattaaaaagttggttagtagtgttaatgcagaacaaaaaagcattattaatcagtttgaagcattgactaatttagtagaaaaagctaatttacaacggggaaatcaacaggcttttcttgatacagaaaaccagatatcaagaatgtggaatcaaatattgaacttaccacaactccaaagcatacgcgggtttcaagactttaataaacaaattgctgaactagaagaagaaattgcagcagctagaagaacatataacgatagtgttgaaagatttaatacttatttagtgagttttcccactggatttattgcacaacttcttttcaaacaatttcaacaaaaggcttatttccaagcaactgctgacgaaagacaagattctgatgtaaattttaatgtttagtttgttgtatagggaatgaagttgaggtagataggatatgagtgaaaaactgagtcaaaaacatagttatgcagttgagagcttatttactggtaatgattttaataccagactgatggaagttgaaaaagctagacaggaaaagattaaaaatcagctaatttttgggggattaattttaactgcacggattgtcattggtattttgggttgcagtattttgactttcataatcctcttttttgtagattcaggattttcttatattctagcttctctaataagttcaggtgttatttatgggctaatgcttggtattaatttggctaaaaatcgcattgatttttttatcagaaaatataacaatctattgttttatcttcgtaaagatgcaattgaaggctttgtaaaaatcatttttcctgatgcagaacagataatatttgaacctcaaatttcatctaagaatcagatgcaaccaatattagctaatttgttttacaataaactttataaatacacggaaaaaaatacccttgcctttacaattgataaaagacctttttacatagcagatgtagaacctgtatatatacttaattcccagaaagaggctacagagattgataaatttgttgatagatatgataggagaattgtttgttatttcaaaggtattgtttatcaaatggaatatgaaaaggaaaatcttaatagtgactttttaacagttatgattcctaaaaaagctgcacctagtcccaccaaaaaaatcagagaagacaggaaaacaatgacagttagtaaagattatcctagactagaacttttgagtagggataaacgcagtccagaaagatttatgcagcgaggttgtgaggaatacagtgtagaaaatatggaaatagaagacaaattttatgtttttacaaataatgaaaatgcttccagaaaattactatcctatcggtttatggaaaaaattgtagaaatgatatcacccaaaaaagaagaaatatctcaaccaaaagtagtacaatttcttttaggtaatcaggaaaatactcctaatttttggatgcaatttatcaatattactcgtcaaaataataaaccattacagaaacttgcagttgtaactacaaataagaatttgactttttttgaagttacaggagaaaaatcttgcaaattagataactttttacataactttcaagaactggaaaacatattaagttcaataattacagcattaaatgtagtaccaactgctggaaattgatatggagttataactatggatttgaatcttcaaaatattaatctctatatctcagaatctgacgtggtaagaattatcatgaatcagcgtcttcagcaattaaaattgcaagaacccgaattaaaattagtctttccccgtggaacaatcgcttttatttggttgtttatgattctagcatcgtttactatgttgggaatttccgtaattagtttttatctcaatttaatagtgatatcaaaagtatattatgattttggtgtttttatagtatgtttagtattgatacctttaataaattcctggaggaaatatgtacaaaacacaaagaaacataaaaattatttgcatttttcaaaaacagaagctattaatatagtagaaatagaaaactatttttccgatcagaaaaacaattttatcaaaacatatcaggagtatgtaaactatgtgcatcaaaagatagagaatgtacgaaaaagtcagcatcttagttcaacaacagtagatgaagttggaagtttacaaaatcgaatttctcaagctgttgatagactagaaacactaaaaaatgattactttgcacggttagataatgtagaattagaattaaaaaataagctgattgaccatataagtgatccggaaatggaggtagtaatagagtcgcaaattttagtagaaagattagaggaggaggtagaggctattaattattatttacaagctgtggatgaaatggcttggaaataatattataatattgctgctagagtttatctgaatttagtaacaaaaaatgaggtaaaaaattatgggttgtttggcaattttcttgaatttattatttcctggtctgggaactctgttgtttactaacaagagagttgaaggatttattcagttggttttagctattattaacgacctgctgattttggtaacgctaggattttggcttgttattggtttgttaattcatatcggactttttgcctgggccttagcatctaccattagttttatgagtgaacgagcagcgaaaaaagcgattcaagaagaacgggaacgtgaaggttaatttatcggaattttaccccatcgcattctaatctagcaagaatttaatatcacctttggcatttacaaacaacaaaaggcagattaattattgaaatattttgatatttttgtgctattgcctgtcgtcataagattataaaaaggagaaaataatgaagaaattgactggatacttcctcatactatcattgttagctagttgtggaaaaagcccagaacaagcaagaaaagacctatttgcaatgggtttacaatttgataaaaatgttttttaccaagtcacatataaatgcgatatcctaccgattgatgactttctgataggaggaatggaaccaggatatggtttattgggagcatctgaaggaggttgtgttcaaattgttaagaagttagttagcaaaactaaagataaatattacttagcccatgctcttcatgctactgtagatcaagagcctcaacctcaatacacagaaattattaagattttacttaatgcaggagtagaccctaacattagtattgaaaataaacaatcttatcttactgttgcagcagagcgaaataatctggaagtagtggaattattaattaataaaggagctaatcctcaagatattgatggtataaactcctcagctttagttgctgctacttataagagcgaagaaatcacaaaaattttactcgataaaggtgcaaaccctagttctgtgggatgtggtgacaaccattgcacagctttatcgcaagctgttttatcaggaaatcaagcgactgtgaagttgttattagataagggagcagtggctaaagatggtaaagatgggaactctctgtcattagaacaagcagtatatatatctaatccagacctgatcaaattattagtcaatgcaggggctgatcccaatcaaaaaggttcttggaatcattctttacttgtcggtgtggtcaaaagatatgacatgaatctaccaactctcaaagctcttttggaagcaggagcaaaacctaatgagggagatggtaattctttggctttgtctgaggtagtacgatataagcaaaatgctgaagcagcagaacttttattaaaacatggtgctaatccgaatacaatttcatcggtttttatcaatacacctagaactgtattggatgaggcttcaagtgaaatggctgtaattttaaagaagtatggagcagtttctggtaatcagcttaatacatcaaaaccacaaaattagcttggttacaattttagcagaagtgtagaatgctcaaaaaaaccatagaaattgccaaattttcaaattatccaaatagtcaatacaaaggctagtatatgcggcttaatcaaataattgctaccgggttaatttttaccaatattatgctcttgttttcatcatcagcacaagcacaaaatagaaaaccatctgttgaatgtaatactgctttacaacgcgcaaaaaaacaaattcaaaaaaatagaaaggtcaaagttgtttatacaagtcaagaaaatatttctcaacattacaaacatgacaaaaactatcctaaaaatcgtccattttcctatggttttggtttaagaggtcctgctacacaatctgtcttaaattctgataagttcttaactagaattgccaaagacattatagataattgctcatcaattagtatagttgactttggagaatatcaaactgatcatgttgaaagttacggcttattagaaaataatgacgttgggcgctttaaatgtattttagagagtgacccaagagcaagaaaaaaacttgattggggatacgtggtttgcatttagataacagataatagctaacaaaaattattggagaaaaaatgaaaaacttgtttattagtttcacaatcacaactgcattaattacatcaatatcacccttagcatttgcatcacccaaaccagaatctaaacttccttcaggtgcttattatacacaaggaactatgtttaataactctaggagagagattttaaatcgtaatggaaaaatttgcatcaaaatagttgacggaccacctaataactatcgtggacgagaagaaattatgattagtagcgtatcaaatcgaggaggtcaactttacattgatgggaacaatcaggaaatccaggtaatgaatgttagagaattaccagagtatgaatttttaagcaaatattctactgttttagctgcatttagtgataatactggtgcttccagtggttggggattattagcaggaaataactctgattctcgcactactccagcccaaaataagagaatgcaggaatgtataaatactaaaggtaattatgtccgtaaaatcaaaggtagaatgctgcaaggacaattttagataattactttggattaccagcgtttttggctcgacctgtacaggagtcaggaggaagttgtcacaatcttgaaatttttttacctttttgcaacaccgagtgaatctggttcgtatatagattgtaaacagtatttagtatttacatctagttcagcaatttactttatcactcatcaaacattcatttcacaagaattggaaattatgcttaatacagtgaaaattgattgatttttcaagattacaaccagggttttacaactgacctgactattgctctatattcgcttaacaaggataaatagatgaatcaaattcgttgctgtagaaatacgactttagtgtttagcttatatttgcccgtgattacctcatgtttaattctcagttcaggaatttttgagggtaaacaggctaatgcaaatgaaataccaaaaattgcccaaagtaataattcctcaagaaactttagattggcaagtaaagaaaaagtgagaattgccgttcttgattttgatttcagcagtgttagcaaccctaatctgttatctattttacaaggaggaagcaagggtgtaagtgatatcctagtcaacagattagtcaaagatggtaatttttctgtcattgaacgcagtcaaatagacgcaattttgagggaacaaaatttcggtgattctggacgagttgatgctggtactgcggctcaaattggtaagattttaggtgtagaagcagttataattggctcagtaactcaatttgaccttcagcaacggcagtctggaggaggatttttaggattcggagcagcatctactgatacagatgcttacgtcaaattgaatatccgggtagtgaatactactacatcagaaatattatttgttgccgaaggtaatggtaatgatagtcagtcagatactcaagttagagttggtccatttggtggaggttcagtaacagttaatgaaagtaagttattaacaaaggcaacagagaaagccatcgatcaagtcgttacggaattaaataataaatcaacagatttagcatctttgccaaaatctttaccaagtgtcaccgctaccgtagctgatgccacaggaaatactgtgattttaaacaaaggcaaatcagatggttatcgagtgggaatgaagttatcaattgaaagggtaacaaaacaagttaaagaccccactacaggtaaagttattcgcaatgttactcaaccaattggcataattgaattagttgaggtagatggtacatctagtgttggcaaaattattggtggtggaaaatttaaagtcggagatattgctaaaccgactcaataaatatctgaaggacggaacatcgttacgtattgatgactacctcagtgaatagacaggatcagactccaaattagtttgtaggggtaattcatgtagcttgcttcccgaagggtattacccctactttcggtctttttcgcgtaggtcctgaataatgttgaaaatgcgatgatagtaatgtataagaggcgatcgctttttggttggttgaatcaacaaaacccaatatcaatccagattattatttagggagattattcattcataattgtttccaaaatttctggtgtcaagtctctagaaactgctctatcgctaatttcatccatcaatttaccaagaaaatcaacttcctcattcagatcctctcgtaaaaataaactaaccagcgttaccaaagattgctttttccgttctgttgctttttgataagcttgagcaacgttaggactcactttgattgtaatttattcactaatctgcataatcaagacttgttgatagtatttaggacttacgcaagattggactaaaaacctgattctcgtctaggggtaattcatgaatcacccctacttttggtctgtttggcgtaagttctatttatactattatatcggatcagcgcgatcgccctccaaaaaaccataaaaaccataaataaatataaacaaatatttgcaacaggagttaactattcttcgtataaataatagtagagattattctatacttaatgatgctcttactaaaatgtcataagtatatggatgatctaaacctccacctgcaaatcctcgtcaaggaagcttgcaagtattccaaagacacccgccagcaccgtcaagcaatcaacggtttactgcgatcgcttctcaaatcaggacgtatttggaggccatcagcagggaatgacaacaacgaggatatttatgaagaagcattacaaaaaactctggttgatttatctagtaaaacattatgtgagaagtatgatccagatcggggattatttctacactggtttaacaggtgtctaataaataagtacagagatgaaataagaacagtcaacggttataaaaatcgcatacagtctgtcttacaaaatgatgaaatatctattgatccattagagcaaagagtttctcccatagatgcgactttactcattgcaacttgggaatcatttaagcaatggattatagaagatcctgataatgttcttaaagattgtcacatcagagataacccaaaagctaactgtcaattatttgctgaactgaaccgtatccaaggaaaaaaatggcaagaaatagctgatgaagttggatcaccgcagggttcgctgagatcccattggaatagaaaatgtgaaccattactgcaaaaatggttagcagaaaatcaaaaattatttggagaagaaaacaatgaatgataaactaaataaactaaatgtattacatgatttagctattacctttcccattactgcatcctttcgccaccaagctagaacttatgcagcacaatattttacaccaaatatacaacaaagaatttatttgaataccttggctgtatttgttgctgatgcttattttcagatacttggttttaagactaatctgaatcggacagaaagatgggatgtcattcaacgtttatggagtgaagctaatgaattagaattattaggattaggtaatttagaatgttgtgtcattaaaaaagaacaaaaagaaataattttaccatctgatattgttagtaatattgttaggcataacatcggctatttatttatagaaattgctgattcagaaaaagaagccgtattgctgggttttttacctggttttgatactaaacatgaagaattacaaataacagatttacaatctatggatgctctgattgattatttatctgagaaagaaacatctttactagtggaaacagcagaaaatgatgagatatccctagaatttacagaaaaaaaaattacttatttaagaaattggttgaataatatttatgagggagattggcaacctgcaacgcggaatctgagaaatgctatctgcaataaaaatatctccctagcaggacaaatatttaaaatgcagctttccgtttcccaacccagtgaggaattagttaatgttatagtcactattcaaagtgaaaatacttttttacctatgggtatgcaagtgagtgtaccagatgaatcacatacacatacagaaacagtaaataaatctggtgatttgatatctatacccctagaattatctccaggtgaagaattttgggtagaattgcggataggagaaagttttattagagaatatttcattgcttaaaaaggagtgtttatgacttggaaaatctcctttaaaattggtggtagggtgcaaatcaataattctgaagttttacctgtcactcttgctatttatgatcaatatggacaaatagaagaactggtttcttttctttctcctctcccaaaatctttatcaaataagtttaaagattggcaagattatattggtttacaaggcgatcgcaaagttgttaaaaaccaggaaaatcgcacttttggggtcattaatctcacagaattagctaattctttgaaagcagaattaaaccaatggttaggtagggatggttgggttgatgaaaatggacaaccagatcctcgtgtaagtttggttttggaacaatttagggagaaaataagtcaaaaagatgaagttcaaattattgttcaaacagaagatagacaattacggggacttccttggcaagaatgggacactttagcagggtatactagcaatggggtagaagttgccattagtgcgactaattttaaacggttgacacaaaaacaaacagcacaattaaaagcaactgctcggatattggtagtatttggtgatgaaaaacttaattttgcagaagaaatcagttttattaaaagtttgcggcgacatggtggcgatcctcatatcctcagacaacctacacgcaaacagttagaagagaatttacaagatagtcaaggttggcacattttcttttttgctggccatagtgaaagcgatcgcaatggacgtattggtaggattcaaattaatcccgccgatggggaagaaggcattattgaaattgccaagttaagagatttgttaacaggtgcaattcagaaaaaattacaaatagctatctttaattcctgcgatggtttgggattagcaaatcaattaactgagctatctttgccttattgtattgtcatgcgcgaaagagttgaatctgccgtagctagagaattattaaggtattttttagaggcatttgtacaagatcgctctttatttgcggcaatgaattatgcccgtcaacagttacaaaaaaaatttgaacctggtaaaagttggctacctgtaattgttgctaaccccttagctaaagaagtaacttggaatcgtttattttctgaaagaaggttatcttggcaatgggaaatggttttggcaataatagcgatcgctatgctaatttgtctacctgtgggcatattcaccgagtttaatggacgggaaactttaacactttacgctcaactttacccccatattatcatttatccttccctgtttctttggatgtctttatttgcagcttatagagtgcattgtatgattcgggtacaaactcgctcttttttaattttaacattggtgacaatttttattactttgggggcattgtttttcgagattaatagcgatcgcatgatgtttttagaatttaattcccaagcgatgacaacaattaaatctgagaaactaaaaacactgtatttagattgggaaacttcagaatcacagatcaaaagtattccccaaaacctttttaatattaatcaagcttttgacaaacaaggcaatttaattatcaaaaaatccgcattagaatcagccattaaacgactaaaaaaaagtaataataaaaaaggatttcaaggacttttaagaattgccacatcctatcaagtttggcaacaaaatcatcaatatttttccctaagtagatcgttttacattctcaattttctcagtattgttgcttgtggtgttcaacttgtagcactggtgtcaaatattctttttgctccagattccatctttaataaaaataaatacctcacttatctgattatttgtgagttaggtattctcctatggttgccttttcaaagctatagtatagaacataccaaaagtctcttattttcctctgatttccgaggtactctagctggaattaatgtgattacttatgcgattattgccattttatttttcactactattagcagtatatacaaaagtgctacccaaaaatatcagcctattttattgtcatttttattaggtagtttaggttttactgtattaagtagtatttttggtgtttctattattgatcacttgtttgggatgaatagcaccaatcctttaactccttggtttgcaagtatcgtgttttttgctcctttatttttcttgcttgtaagttggattgatttgcgagtaggtgatgattaaatatcagatccctgacttcttttatttattgtgtccaaaaattataaattgctatcagaagtcggggatctgggtatgaacaagtgctatagctgaatacttactgatgtggtgattaaatatggaaaatcagcaactttatcaagaacgacaaaaagtaattttgattgtatttttgacatacattctgccagttttacttgtatttttagaagtaattcctttttcctggcggttttatgtgctaatttttgccgctatagtcgtagtagcgatcgcctatttataccaattttctcctgtagaattaggatttacaaatcataacttaaaaaaatctttgacagcgatctctttaccaacattaatcttgactgggttcatgtttatttattatttaactcatggatcacggttagataactcagcatatcaatggctattttaccttttctttgtgggtgtatcttctcccatccaagagtttttatatcgggggtttttatttgctatttttaagagagaaaaatttgcaacttgggtacaaattgtattctctaccttactttacagttttatacatctgatttataaagatataccgacgctggtatttacattaattataggtataatttggggctggaactacgcaaagtttcgtaatttatatagtatcattattagtcattctttactgggagcgatcgctattctgctgggtttagtataggtgaggacttacgcaaaacagaacgaaagtaagcgtgccaaaatttcataaggactttcaactctgttccctgctattataaaaataagatttatgaacgtccttagatcactttctctcaatcacctgcgaaaataaatccaggataaaaaataaagtaaggattcaggtgaggtgataagatccccgacttctaagatagatttatcccttcggaatacaatcaatcacagaagtcggggatctgggtaaatatgccttatgtgcattggaaattttggcggttttgataatattagagacaataattatattgaagtaaaaaaatatggcacaaagttcatcagagagaattgttagacgtggaagagtgtttcctgaaattcaatggacagaagaacaaaaagcccaagatagagcgagaagaaaggcattttcagatcgttgttgggtaatttttgagcgtttaaaaccagaaatactcgataaatactatggttggtacattgctattgaaccagatagcggtgattatttcattgatcaggatcaagagatagctagtaaaatggctagggaaaagtatcctcatttaattcatcatatttacggcattaatgaaacgggagttagtggcagaatatgattgagggaagatttggagataagggtcaaatttatttggacattgatttaattgatggggatatcagttttcctatagaaacaatgttagatacaggttttactgaatatttagctatgaataaacaagatgtccaaagtcttgattggccttttttaaggcaaaataaattaagaactgctcagggtgaaactgaatttgatgtttataatggtagggtaattatagatggtcaaaagtttgaaattcctgtattcgctggagatgaaatacaggagattttaatgggttctcgatggttgaagttatttattttggttgctaattatggtgaaaatacagttaaactagagttgattaatcaaattataaattaacaaaaatatttaaatttatcacaagtaaaaccaatagtataaacctatttaagtacctagtcaaaattaattgcacattgatacttctcctttaagcgagtaattattgttacaaatatttgataaattagtccatattatacacagttgtgaatatttctacacagttaaagaaaacataaattatgtgctattctctgtattggtactagtgatacctgattggggtttgctgaataaacctaaaaccttgatatatcaaaggttagaggctgataaacacagaaattagtgcaagggttttgaagggtataccggaaaaagtgtgcatttttggggatttcaagagatggcaaagaaattttcaaatctcctcctgactcctgactcctgactcctgactcctgactcctgactcctgactcctatgccctcaccgaaagactttctcagcaacccctatttaatctgagtgagatacacatacagcacattctatctacatgaggtacaccatgatcaggcaagatgcctgcgctataagggttttatcactataataacggaaactgctgtattacactaccaccatcactgttagctaaactctccacagtagaaagaagctcatgctctaaataaggcttagtaaaataagcagttgcacctaattcttgcgctaactgacgatgtttttccgaactccgagaagtcaaaatcatcactggtttttgagaccattctggatgttggcgaatatgacttaataattcaaatccattcatccgtggcatttccaaatcagaaatgatcacttcaatttctgaatgtctctccaactgttccaaagcttctacaccattttgggctgaaacaacttgataaccatacttttgtaaagtcaaagccaaagtttgccggacactaatagcatcatctataattaacactacctttgctaattttggtattattcctgaagaattttctggcaatttccgatcatccacagatacagatgcacttaataatggtgtagatgatggtgtagatgatgatatggatttctgttcatctgacattagcaaagcttgtttgtgagattcagaatttgttggtaaagtcctaacatccagtgtggcctgcatctgttgagcatctatcaacatagtgccatcaatgactaaaatcaaattaccattcgctaaactactacaaccataaatatattttggtggagtaatcacactgcctaaaggtctaattactaattcttgttcgccgataatttgatcaacttctaaacccaaaaatccttgattgcgtctgagtagcagcacaggatttttcattatttctgtatcagcagttctgggtatattatttaaataattgctgcccacaagtgaaccattataatatactaaactttcaagtttaacgaggttaacaactatttcttcttcaccggcttgccaatataaaatttgtttaccttcaaattcttggatttgctgttccgagggaattattattttctcaatactatctagtagtaaagcataaacaatacccccagattggactagcattaatttatctgtggtcatagaaaaggggatttttagtataaatattgttccttgattcggcgatgattgcacggaaatcgcgccattaagtgattgtaactgagtacggacaatatctaaccccataccccgtccagaaatttcactcaccttagcagctgtagaaaatccaggtgaaaacatcagatcaatcagttctgattcagtttgatgatgataatattgagggttgtcatcatctgggatcagatttagatcaatagctctttttctaatactttctaaatttaaaccttgaccatcatctctaacttcaataatagtttgatttcctttatgataggcgcatatttctattacaccttgttcgtttttaccacgttcacggcgtttttctggtgattcaatcccatgatcaaaagcgttacgaactaattgcaataaaggatcatagagtttttcggcaatggctttatctatgagaacttctgtgccagtaagttttaattttacactttttgcataaacatttgctagattgctgaccatttgcggaaagcgatttaatatgattcctaaaggtagcattcttgcttctgctaggttctctataatgctcagagttaaattatattttttctcactaatttgagcagattgtctagttagtaattctagagaatctgcggtttcttgtagttgcagcgtttcctctagtgcttcatgtaatgtcaaattaaattctgtataaacatccatttctaaagcatcaaattgtacagcagaaactttttggctagttgctatagaaaaattatttccctgcaaaggcaaatcacgtaattgttgtaaagttgcttgatgctggctgatttttctacttaattgctcaattaattctataatttgttcatcatataaagtgcgtcgtttttggtaaatcagcaattcccctgttaagtaattgagacgttctaatccctctacgtctacacgcacaaatgaagattgtcgggtatttttattaggggatgctggggatttatcttctagttctctattttttgtttctgtatcatcagtaatcacttcataatctgaatctgaatcatttgtaaatacctgattactcacaactgatgatgttacactttctaaataattatcatttttaattgcttcggcggtatggtttaccaaagattcttcagatgtttcttgtataggttctcctccccatatttcctctacgagattatagtcagtgttattaaccacaggggcggatattgctttaataactaataattcttgtaacttaggacgatcaagccattttttttcttcctctgtgacggcaggatattttttatattcttttcctagttgacggatttgtttcttgagtgagttaataattgacatagcatgatcatcttgtttaactgaatactcaaattcagcaacagtaaggataattattaatatcacaccgcgacgataaagacaaaggttctcttgatcctgttcctccctaatagaatctaaaaattgatttatccaatttttcacatattctcttgaatcatcttgatatttttgataaattaataagtctaaactcagttctgattctggtatttgtctttggtgattaaaccagccaaaaatatagcgaattacttttaagtaaaatttggcatttgctggttttaacggctcatgcgctctgtcaccagatgtaattaaaaattgataaaattctctagtaatgtggaaaaatatgtcagcgaaagagttattattatggctaattcctgactcatttttggggactgtagctaaggaactattaatgggtgtaacaggtgattgttttttttctacctctggttcttcttctttttctgctgttgttagtgcttttaaagcagcagaaggtgaacccccggatgtgcgatcgccttctaaaactgctttttgtgccgcttgtaaatcagctaaggcaatttccgctacttcatgtacttcctgcggatgagctactaatgcagcgataattgtctgagataattctttgaaaccaggtaaatttaaagattcagctaaccctataaatacctcaagttgagagtttaaaaactctgctaattcctgattattgagtgaatgattaatagcttcagctatactttctaagcgttgagtaacgcctacttcaaaaatagattgaacaatatcaaatcccaattcttcagaagtaggaatatgatcttcagccccaaaagcatcacctaattttgtttgtaattgtgcaaatgctgaactagccctttgtataattccttcactatcaatattatttgatgtcaattctgcggtgacagccaactgaagacattcgtaagcttctagtaggagggtttgcaattcagtatctataactacatcaggattatataaagctttaaagatatcttctaaagaatgggcgatcatcttgattgtatctagcccaaccgtagctgctcctcctttaattgtatgagtcgcccgcattaagttatgcacttttttggtgctatggtcttctaaaaagctaaataaatcctgttcaattgcttgtaataattctggtgcttcggctaaaaagtaagcatagccttgtttacgaatttcagtgtctgtaatcataagagtcaggagttcaggaggcaggagtcaggaggcagtaggggcaaaccccccgtggttgccccaggaggcaggagtcaggaggcaggagtttttttattttggattttggattttggattttggattttgttaactccaatctaaaatctaaaatctaaaattttcttccccagtccccaatcacttatttaactttaaacttaccagcggttgttaagagagcttgagccatttctgataagttttggaacacagaagcaatttcttgagattcgccaaaggtcttattagcaatagaggctacatcattcatagatgttgttactgttactgattgttccatttgtttttgagtggcttcagtaatgcgctcaatcagttgactaatttccgcagtcgcggaaacaatggcgttcaagttttggcgggtttcactcaccaagtttgtcccttccacaacttgctggatacccgtttccattgccaaagcaacttccccagtttctgcttgaatttcttggactaatttttcaatttcgatggtagctgctgccgactgacgagacaaagaacgaacttcatcggctacgacggcaaagcctttaccatattcaccagcgcgagtagcttcaatggcagcattcaaagccagtacgttggtttgtgaggcaaagttgctgatcaaattgactaccttggagattttttgtgatgattcactcaggcgtttaatctttttgctagtttgggcgacggtttcccgaatggcctgaatagcatttactgtttggttcatggctgtatcaccggaatctacagttttgttggcctgttgtactgctatttgtactaattgggcgttggctacgacggcttgggtagcatctaccatctgttgcaaatcccgtaatgcttggctaatttcgtcggactgttcttttgctaaatcagttaatcctactagggaagaactgctattgatagaggtttgggcaacttgttgggaagatgtttgtacctgaataacgatttgctgtaatgcttgcagagtgccattataagcatccgcaattgtgcctaattcgtcttctgtgatgggggcgcggactgttaaatcaccgctgagggcgggactgatggctctgagtagttgaattgacctttgttgcagtaattctttggcggctttttctcgttgggcggcttctgatagttgggctgatttcgtttgcagttgtttcaagtattctgtttgttgtaaagccagtcctaactggtcgccaatacgtgacaacaagttaatttctgattcttcccattcacggggggcggagttttgataagctgccagtaatccccagagtttatcgccaaataagatgggagtaatgatatatcctctggcttcatatttttcgatgatttctatgtagcaaggatcaagggtagctttataaatgtcgttgactactaaagcatcaccttttttatagcgtccaccttcgttgtcttgtaagcaagggtcgtttaaggtggttttaagaccaggtcctacaagttttacccaaccactagctactgattcggctacaaattcaccgccccaatcagatgtaaattgataaactacggcgcgatcgcattttagtagttgtctgacttcttgggtggtggttttgaagatttcttctacatctgaagattgacggatgcggttaactatcttactaaaggctttttcttgttcggcgatctgcgctagtttctctgatttagattttacttgttctagataatctatctgtgatttcgctaaactaatttgcaagccaatctgttctaaaaagttgacttctcggcgttgccattcacgggtgctactgttttgataagctgccaataatccccacaatttttctccataaaagatcggaactattatgtaagctttggcttctatctgttctaaaatctccaagtgacattgagcgtgaccagcttgatagatgttattaactgccaaggattcacctttggcatacctaccaccttgggtttcttgcaagtggctatcttcccataccattttaaagtcagcggtggcaacttttatccagccactagctactgattcagctataaattgtccgctccaatctggatggaattgataaacagcgacgcgatcgcaacgtaaagcctgacgaacttcttgagtagctgctttgaagatgtcttctaaatcaaaggattggcgaatacggttaactattttgttgagggttttctcttgttcggcaatctgactaatttcttgagattgcgattgtacttgatctatataatctatctgggatttcgctaaactaaattgcaagccaatctgctctaaaaatttgacttctctggtttgccattcacgggtgctactgttttgataagctgccaataatccccacaatttttctccataaaagatcggaactattatgtaagctttggcttctatctgttctaaaatttccaggtgacattgagcgtgaccggcttgatagatattattaactgccaaggattcgcctttggcatatctaccaccttgggtttcttgcaagtggctatcttcccataccattttaaagtcagcggtggcaacttttatccagccactagctactgactcggctataaattttccgctccaatctggatggaattgataaacagcgacgcgatcgcaacgtaaagcctgacggacttcttgagtggtagtgacgaatatttcatctacatctctcgcttgacgaatgcggttgactatcttgttgatgcttttttcttgttcagctatttttgctagttcttcattttttaatctgactgtttctaaatagtctatttgtgattttgctaagttgaactgcaaagctatttgagtcaagaagttgacttctgaggtttgccattcacgggtttcggaattttgataagctgccaacaatccccacaattgatcgccaaagaagatgggaacattaacataagctttggcttcaaatgtttctaatagttctaggtaacagggggtaatattttcctgatagatatcatttacccataggttttcacctttagcaaatctcgcgcctttggtttcttggaaataagtatcttcaaccaaggtattgatatcactaccaacaagttttacccatcctgttgctactgattcagcgataaaattaccactccaatctggattgaagcgataaatagcaacgcgatcgcatttgagtgcctgacgtgcttcctgtgtggtggttttgaagatttcttctaaatcggaggattgacgaatccggttgactatcttggttaaggctttttcttgtttagcaatctgcgctagttgatcagattgtttttgtactttttctaagtattccccttgggaaatagctacaccaaattgcaagccaatctgatttaaaaagctcacttcccaatcttgccattcccgtggccctgtattttgataagctgctagtaaaccccataatttttctccagagaagatgggagcaattatataagctttagcttcaaattgttctaagatgtcaatatggcactgagctagaccgattttataggtgtcattgacaacaaatgtttcaccttgagcatatcttcctcctttggtttcttgtaggtgggtatcttcccacaccattttataatcaggggtgacgacttttgtccagttgttgcctactgactcagaaacaaatttaccactccaatcttgctcaaaacgatacacacccacgcgatcgcattttagtaattgtctgacttcttgagtggtggtttgaaagattttatctacatctggctgttgtaaaatcttgctgataactttagctgctgattttttggctagtcctgactgttgcagttctttttgtaatttaaaactctgcaatctgtaggtaatttctgtgcttatttgcgacagtagtgtaatttctgcctcttgccattggcgctctgatccacaactatggagtaccaacaagccccatacttgattatttcttgaaatcggtagacttaaactagctttaacttgaaatttatctagtagttgtttttgatagggagtagcttgaatttgattaatatcgtctatggttactggttctatgtaatcttgacttgtatataaaccaaacaaaattgctggcagattttcgcctaaagatggtgtccaacctgtggttcttgattctactaaaactgtaccagtatccgagttagtaaattgataaatcaaggcgcgatcgccaccaatcttatccctaacttgcgctacagttacctttagtaaagaatctaggtcttgtgctttccccatctgggaagttatgtattgaaagcgttgccgccaagctttaaattcctgggcaatagtattagttttagccccatcattgcgagcaaacttttctaatgtactgccattttgtttatccgatttttctatctcaccaaagagatttcctctgtcttcattactttgatataatgttgtcatttacctatcctcaatacttttttagctactaaataactggaaattttgaacaaaaaaattacttaaatactaagatgccaattacctgaattatcacttttattacttgttacaaaaacatttgttagttatgactcccccacattggcgattgtataattgctaaagcatctaaattgaaaatcatctgctctgaaccgttagtaaagtatccctgtaaaaagggtgacattgctggataaaatagctcaggagagggaattttcatttgttgtgtatccatccactcaatatctgttaattggcgcaccaacagccccaaatatttaccgtctttttctagcacaattgccatgatttttgtcagtaaatttgaaccttgtaaaagcggtggataacctaacatttcctctagatcaaccatccacagcatttccccacgccaactataaatacctaaaacacaatttggcatctgtggaactacgcaaatttccgtaagggatatacgtaatacctctgaaatatgttgtaaatcaattacagcttgatctcgtgatcccaaattaaaacttaagaatttttgtttggtttccaaagccaatttcctttttatttagatagggttttcgccactatttaatgatttaaactcaatgataaatagtgactatttcgtttggaatcaattaaatacagcagattacagattaattaggtacagactttaaattgaaacctatacaccaagctagttttactcctgactccttaaatattttttttacttgttggttaatgttttcaaagttttttctaattcttccttatctattggtttggataggtaagctttagcgcccaacatattaccccaaatcttatctacttcactatttttagtagaacaaaaaaccacaggtatttggctagtattagggttattttgtagttctcgacaaatttcaaaaccgcttttacctggtaaaattacatccaatagaataacatcaggtttatttgtatcaagtttttgttgtgcctcttcactgctgacggcagaaatgacagaataacctgcttgtcgtaagtaaccgctgataatttccatatccgtcaaaccatcttcaaccactaaaacagtactcatggtaactacctattaaattatatttttcaacttggaaacaaagacttagagggagcaattcagacagatgaaaataacactagcctgtattgttattataacttcaatcattgtatagatatttccattaggaaacttacgtattaaacataagtttacaaccatttaagttcatgatttaactttattttaaaactcctgaaaacgtctaattaaggacaaaaacaactaggctgtaatttttttggtatcataagtatattttatcaaacaagagatacttgtaaagtaaacatcaccctatccagaagcttctaaattagctatatttttaaccgttgagttagcttgtaaaggtaaatatttacgtattacacctatgactcgttcagccacgattggtttggagataaaatctgttgaaccaactaccttagcacgcactcgatccaaaagaccatcattgccagttaagataattactggtgtattagcaaaagcaggtatgcgccgtaactgagtgcaaatttcgtaaccactggcgactggcataatcaaatccaagaaaattaaatctggcttctcttgaatcagaacaggtaaagcttggatagcatcttgaaccttggtaaatctaaatccattggaggtgataatatcctctagagttttacacaccaaaggactatcatcaacacaagctatcagtggtgcaattcgattcatccgacttctagaatgtccagaggtaggatggtcgccatctacaacttgcagaggtaggtcaggtacttcgactaactcaataatgcctttgaggatatagggaagcaaggaacgagcaacaggcatcacatcctgcttcattttgatggcgagttctcgcagagtgtatttgccattaattaaattgacaaagtttttgaacacagatggactcacaatctgttcgagttgctctggccgccgtaggacgggtgatgagttgggagaaacattggctaaaccgacttgtgaccaaattgcccatgagtcttgcatctgtttgattgacatatctgcacttgtgaaactcataggcatatctaaaattacatcatggctgaaatgactagttacagcatgaaaatcaacctcctgggctaaatcaaaaaatagttctgcaattgtgccttcgacaatagcttgaatttgttctctttggattttttgccttttgtataagatatccaagagatgataatcccagtaatctatagcaaaatcctcagagcgacagcgaatcttgtctaagtcaatctcaggacagtgttgagccatttgtctgcgccagcgtctgaagggatgagtcccaccagttgcccaaactatccgtccgagacgatagtaaaaagcccattgacggcctttggagcttttaatatttaatttcccgttgtactgaaactgagtacaggttttaaactcattcagtaagttatgagattccacgagttctgagttggtcatactttgttccttgtaatcagtaagtcagcctctagagaatctaatattagccacacaggagttagcaagcaccaggaaattgacaaaaatatatgtggctttaacgttataaatattaccttttctttctctatactagttttgttcagcacttgcttagtcttgtttaaaagtagttttaaatttgaattaggagaggatttatttaatactttacaccctgttgatatatttgaagatagttgttttatgaatttgatgacctcaggaaattcccaatagaaaaatatattacaacctctcagagagcaggtagcacagggcagaagcctcattttgagttgagaaattggatcatttgtttttggagttccttaaacacaatctttaggtatttcaactggaaatacacttatattctattttacgcaatatttcttgatacgttatccgtaaaatttctgaatttatatttactaaagatagtgtgaattttggtgagtttttataggatgttgggaatttttatcccatgaatcataagtggaaaaaattgtttaactatgctgaattaatgtaaatactatatattgagtaattattattacaaatatttgataaattagtgcgtattatacacacttgtgaatatttctgcacagttaaagaaaacataaattacgtgctattctctgtattggtactagtgatacctgattgtattcaggttttactattactaaagtgcgatcgctctccttagacatcgctattctcgtagatttagtatagctgaggacttacgcaaaacatcacaaaagtagagataattcatgaattaccctacccaagaatacagtagcgcaagcatcttgcttgcattcattatccaaataaaaagcaaaatagctgacctcattacaacatcagtttgttctattttagtaagttttactcaaagtgcgatcgcttctttacaagagactaggttaagagtatcctatagacagcatttgcgaatttaccaaatttatcaatattgcctaaaataaaaacaacggcaacgaatagtaaaagttattaataataattgctggaggaaaaatgagtttagtaatttctgaagaaattgtgaaagcaagtggtttatcagaggacgaatttttacagcaaattgtcattatgttatttcaacaagacaaaatcagttatccagaactaatgcgtttttaagcactcgtcgccaattgaatatctttttcaatactacgaataacaaaattagataagtttctatgtcgaggaactggagtaggtttgtttaatttaggatgctgccaaacctcatgattaccaccttctctaaccttgtaaaatccaatatcaaccatttttctgataattttattttttgattcatctgaaaattcaataattgatttggtatcaatgatatttttaacagtatcttcaaaattcaatatagcatcattaaattcatctttatatgcctcacctatctcctctaaaatacgggctatacttttagttgctctaaatgtttgtattgactttatttttctaggataattttttatgtggtgtgattcgtttaatttacttttaatcctttctaataatttatctatgggtatatttttcccatttttaactaaatcttgagtagccatagtgattgaccaataaagtgatttaacatattcagtgatattttcatcagacgaatttggcattattttaattaaagtttgactatctaaattagaccaaactaatataaccggaaatcggtctgaaggaatttgaaaacaagacgctgcaatttctgccgctcgatggtgatgatgtccaagactaaagagtacagataaccattcgtcactatctatcatatattcttcaacatcatcaactcctaattccacaagaaagttatgtattctatttttggctggctcaactatatccataatatgtttactattaagaattaaaaaattatggttgggagcatagggaaaataaatattatgtatttttccacttttttcatgcaaccaagttattaaataagcatcttcctgtcttaatactaaatcccattgatcattatttttattatgcaaaattagtgatgaatacatattaggataactcctcatttgaggaataaaacccggtactgcaaaatacgaaaaatctggaataggaaacataagataccccaatataagtttattaatctcccaataataccttaatcgcttttaacgcctgactatgcttcccgttactaatcttagcaaaccaataatgggattcctcataactcatagcttttattccttgggcaatattagcaattctttctggtttagaaagtggttgaatcgtctgaaataacaaagctaaatttatgcctgtttcctcagttaaaacataaggactttgacgattatgacttaatgtttttggatcataattatttgcttttaaacaatcataagctgttgtgcatttaatttgtataagtggaacaggcatcttgcctgttgcacaagagttcataatattatgattatacaacctagctgtgtaacagcttattcaagtgtaatttttattacaacacaactttgctgcaattggagtattgcaacaattctaaaaaaagtccgcaggtgcggactatggacattggataaggttaagttgtcaccaagagagcctacaagatgttagacttactttgtatttttgctgcaaaaatatgaaaaatcaatactctaactgtaaatcttgagacataatagcagtaattatgtctgagaaataacacattttctagtttatgtagttgctaagaatttaatcttgacataagagtgcatttaaatatcaaaaacttgagacaaaattacaggaattttgtctgtaattgtgtggtcattcaggagtgaagatagaggagtaaagatgttgaaaatattggttaagttaaaaagctgactgctgagtagtaagataataaaaaccccataagtcatgacttatgaggtctaaagatttttaggcacagttgagggcaataccaggatgatcatcagtgagagtaggtcatgtctctgctgataaaaccgtggcaaagtttgctcgtgtctgcaacttgtaacctaaaagcccacaggtcaattactggaatactctaccaaacataatcaaagatatgtagccaaattggcttttttttaacctgtgggtgctaataattatgaggaagactcaactatttggggtataccaactaactggtacagcttatcttcaaatttttggctacatactgaccaatcaaactctaagatagaaggacgagcttgtgcggataattgggctttgagttcaggattttgcagtattgcaattatcttctctgcgaaatcttgggcgttgttgggttgagctagaaaaccattataaccaactgttacttgttcagtggttgagggagccatagctgcgactacaggagttcctgatgctaaagcttcgttatttgtagtgcagaagttttccgttactgaagggttaataaaaacatctgctctagcaaaccatcctaaaagttcagtaccgtgggactcaccccaaagcgttacaccgtgggggaatttttgagcgcgacgacgaatttcttgatctaatggaccgctaccaatgatgactaaatgaacatcaggaatttgagcagctatcaagggataagcatctaaaagttgtgtgacatttttctcggcagtgatgcgtcctacaaataaaattgtaggtcttttatcgttaggaattggatcataacagatgttgcggggatggaatttttcacagttaattccttgataggggacgtattcaccgcgtagacattctagtttttggtacttggaaagttgttccctagaagaaaatatattgagggtgtaagcattactaaattgcttaactaataatggaattatgggacgcatcaatccgaataggaaatcacctaaataatatcggatataggcaacgatatcggtatgaaaaacggagatgatgggtgttttagtacgtttcgcataatcaactcctacaggtctgccataaccttgcagaaaaactgaatatagccctctcatttgggctgcttcttcaactacaatgatatcaggttgaaacttttctagtaattgagtatcgctccaatgacgatagtttagaggttggggcagagatttatagaatattagcggttctgtgggaaaagcataggaggaaaagttggcaaaagagtctagttcttctagtcctgccattggacgtttcccaacttgtttactgaacttattattgatttgtgggtgaataagaaaaacttcgtgtccttgttcaagtaaccaatggacgcgctgatgtacagcaacggatactcctgttaagaaaggagaatataagccagtaaataaggcaatgcggagggtttgttttgtcatttttgtttcaattattttagtgctggtttcaggatttacgcagcaactatcatgaaacttttggtttttgcgctgataattaataaaattcccaattataattcccaatcaaattacagacaagcttctgaatttctatcaagagtatgactagagagaaattttcggatcaattggttgatctaaccattgataaggatgatattcaactaagcgaatatgccagggactttgaattttataggtaagtcctcgccatgtcactgttgacatccccagagaagataacattgctaaaccataaacccattgtgttaaaggaatagcaatgaacattttgaggatgttggtgagtgaaatttctggaattggttgtccttgagagcgaattatttcttgtactcctagttccataactagcattaacaagagtaatccaattgtgtagatgctataggatttaaataaggaaaatgctgtattccattctgtggctaaaaacaatcctaaagctaagaaaatggtgagggtaggaaagagaatactggaaactgcatcactgactaatgctaaccaattggggtgataaagtcgagaacaaagtattaagcgttggagagatggaaataaagtagataaattgctttcttctcggtttaccattaacaaagaagggacaaatttaattttccatccgtgttttttgatgactttgtgtagtagcatatcgtcaccaaatgcttctccccatttttccagtatttctgtttgttggaggaggtgttttttaattgctaaactcccaccccaaggaacttgaaagaggaacatttgcacgacagtagaaacgttaccagcgtagcgtattaaagaaccccaatattttcctgtgggtatataccaacggtttcctgttgttattcccactttttcatcggtgaggggactaactaattctcttaaccaatttttgtggacgatggtatcagcatctactaatgcaattacttggtaagagtcatctaaatcggaaactgcttgtactaaggaactgcatttgagactacaattatgacgtactgttctgagggtgctaatttggaaattagtggctttagtttcagcgatgacttctttggcaattttaaaagctggatcttctggactatcaatgatcagctttaaatcgtactctgggtagttttgatttaagagtgatcgcacacaattaggtaaaaatggatcagcacctcgtaaacaaagaattactgccgtttttggtagttggttatctgataaaaatggttgtttataggttcgcaaataccataaaaatattagcattaaacatacctgaattaccagccaacctatcaaagaattagacagaaatgcggtcaaatctttcattagtcattagtcatggggaatagggaatagggaataggtaatagggaataggtaatagggaataggtaataggtaatggggaagtaaataacccaatcaccagtcaccagtcactagtcaccagtcacaaatcaccaattacttatggatcaagggaatatttaatgttgatgttaatggtggtatttttagtcattttaaaactggcttgtttaaattttggtgtaccagtttggatagagacaatgggatttctggaaatgccaaaaccttctgtgggaataccaaaaaagtctttattgagtttgcgatcgccattttgatcatcaactactgctactgcataagttcctggttttaaaccagaaaatacttttttcacagaactaccagtaattttagtgcagccactttgaacttcactagaactactcataggaaagcctttttcagagttataaattcggaaacaaatttcacctgttttgttacttattccattcacgactacagttaatgccgtggtagtttgtgcatgggcagtgttagcacaactgaaacttaaaacagtcgccagcaatagataagaaaggcgagatattttcaacataagctgtgagatatagcttgtggattaattgcttaaatattcattggacaaacttaaattactgttagttttggttttgtggaaacgcaaaattttagcagccatccacaaatctttaagtaataaagattctgttccagatagctttttaacaataatcaaataacacaatatttgctcatataaattcagtgaactttgactgactgaaagtaaatattctttgagaatgcgccaatggggaaataaaagtttgcctttgttacctgaatcaaaccaaattgaatactcatagaaatctggtaacatatctaatgaatattgaggatctttctgagtaaaagacaggtaacttggaaaaaacatactcaaagattgttggggatgaatcctggcaaaaaataagtattcgggaatttcataaaactggccaactgtaccaagtcttaataataaaattccatctgcattgccataaccacccataggagtgattttttgtaaggaacttttgcgaatgactccatacatttgataacagagatgtttagtgagtaattcttcaaatctgatctgtgttttttctgagttagtattgagtttaatgtcatagttttggaaaaaattaccctgttcatcaatcagatatgtgtgggaatggcataagatataatgtggattttcttcaagtacctgtatacatttactgagaaaatcaggagcgtgtaaatcgtcgtaagctgcccatttaaagtattcactattcgataattcaaaaacgcggttaaaattacaagcgcaaccgatattagtaggattacgatagtaacgaatgcgatgatcttgtgcagcgtaatttctacaaatttcttcagtattatctgtggaagcgttatctgaaataattaactcaaaatcactaaatgtctgatttagcagagaatctagagactgttttataaatttttcgccgttgtatacaggtaatccaatacttaattttgcttgaggtttatacatacgccattcccgacaaaaatatattactgagtaagcattcagccgtcagttatcagctatgtaaatgaaagattgaaataaaaagaatcaaaagaaatagatgtagataacattcctgaactaaaaacgcctgaatcctggctatgggctgattattgatagctgaatacttacattactgattacttatttcatcaatttttggatgtcggttttttgtaaccattgatgagtacgtttcatgccttcttctaaatcaactttgggtttatagtttaataaacttgtagctttagcaatagaataagcataaggacgactcataaagtctactgactctggcaggatatcagcttttttgcgaaatagtttttgtccttggttacgcactttaagaaacaatttcatttcttccttaggcaaggacatgggagcaggtaaaccttccattgctgcgaggtgaataaaatattctttccaagaagttttttcaccatctgtaatattaaatatttcgccataagcttctttttctattgctaaaaagatggcatcaattaagttatcaacataaagatgattcatcacacctttaccatcattggcataggcaaataatttttgacgcatcattaatactgggcgcactatccaaggaatactacccggaccataaacatctccagcgcgaattattatgactccaaaatcaggagatgagttaagttttaaaacttctgtttctgcttcaattttagtttgacaataggggttattatcactagataatgttcctatttcggcaatattatcgctatagttaaagccataaactaagacagtggaaagatgaacaaatgttttcacaccagcttgtttagcagctttagctatgttgacagtacctcctacatttatttcttgaaaacttttaatgtctcctgcttcttctgctagttgggcagtgtgtaaaataatgtctactccctgacaagctttttgggctattttatcgtcagtgatgctaccaacaataatttctactcctaagttttggaggtttttatcctgtacttgagaagtttgtaaacctttgactttcatgccttgagatattgctaattctgctgcacgagagccaataaattcgtcagtgccggtaatgagaatggttttgtttttgatgtccatagtattgattagtgaatattctgagttaatttcttgacgatttagaaaatatctgctggatctgcggagcgcagtttattaattgctaatgcgccggaagtgatgcaaatcaaaactgtagaggtaagaacaagtatggcattattagaagtcatcacgatgggtaatttagttgcttccatagcaaaatcatataaagcaactgaaataataaatcctgggaaataagctagtaaagctagaatgagtgcctgttgaaaaactacatttaataaatagccattggcataaccgatagcttttaaggtggcgtaggcaataaattgggtagcaatattgctataaagaatttgataaacaatgactacgccaacgacagaagccattgtcaacattaagtttaaaataaagccaatgggtgttctagaagcccaatattctttttcaaaatcaatgaattgttgacgggtgaaaatttgtacatcattaggtatattgtcccgcaagttttttaacacttcctggggatcaacacctggtttcagtttaacaatacctacatctattttttctgatggacgtacaaggggattgatttttacaaaagttgagtcactgacaattaaattgccatcgacaccaaaggagggacccaaactaaataaaccccctactctgactcgataaccttgcaaggcatcaaatgcgaaaatttctattttttgttctgtatttcctctctcaaaatttttggctatgggaccaaattcagggcgtgaggatctgtcaaataacatgacatcaggaattttgagtttatctaaattctgctccacttcgggaatattcatcactggtctacctgggtcaaaaccaatgacataaatagaatatttctcgccagtttctggattttttagctttgcaaattgcaaatacatcgggctaactgattctacaccattaaaacctaatgcttgatataaacgattgcgagaaaaactttgatttgaggtcaaagatttgtattgagaactaactaaaaataagtctcctttgagattttgatgtactgctgtagcactagaataaagtgcatcttggaaaccaagttgaataaacatcagcagcacaataaaggctattccggctacagcgacaacaaaacggagtttttgctgggctaactgtagccatgctaaaggtattttgatggtcatatattttgtttttagttattagtcattagtcattagttaattctacccaatcaccaatcaccagtcaccagtcaccaatcacctactaatgactaaatctgaatagcaacgtctacctgcaagttagttaaacgagatactttttggctgtctgctggtttatcaatggcgatttttacttcgacaattctgcgatctgtatctgagttggggttaagactaaagatgctttgtttgtcaatttgccagccaatttctttgactgttccctgtagttttcctgaaaatgcagcactggtaagattagctttttgtccaactctcactttttgaatatctgtttgataaacttcagcaatgacattcatttctgaggttttaccaagttctgcaaaaccagaagttgctattacttcgccatttttggcatgaatttttaatactctgccatctatgggggatttgatataagttaattcgtggtctgctttggcttgttgaacggcagtttctgcacttttaacttcaccttctgctaatgccacatctacactacgtacttctttgatgctgttgagtttggcagttgcttcttgaatttgatcttgtaaggtgtttttggttctttgcagtgtcgcttttgcttctattaattgttgttgggctgtttttagttgtaaagttttggcatcagcaatggaagcagaaattgcgccatctttgtataatttatgatagcgatcgctctctttttgagcattttctacttcagcttgaatgcggttaattgtcgcgttttgtgctgcaatttcaccttttaattgtgattctaaccgggtaattgttgctttttgagcgttaatatctccgggttttgctccagcttttacctgtgctagtttagctttagcaactaataatttattaaaagcttgtttgattgcagcttttgaacgttcatagttttctaaataagctaatgtttgtcctgctgttacttcatccccttctgctactaatagtttttctacacgcacaccgttgatggaattaggagcagataaataagtaatttccccttggggttgtagtcttcctaaagcagtgactgcaaattttacaggagtgggttgaggggatgggttttcagtagcgggaagtggagagttagattttccctttaattgagaaaaactgtagaaagatcctaaaccagcagttaaagcaattgcaacggctaaaataattttccactgcttggtagctttttttaatagttggctttctttatttactgccatatttttattcccgttatttttgctcaggtatagttttaatagcgcaaattacctaaaataacctatcctttatcatctgacgtttagctaatggataagtcgcattacttgtgtgtatgaagtgttgtgatagtttattgcaatctttacaggtaacaagatgaacaggaaaatcaacagtgattgaactcggtgatttagcttgcaagtatcatcagttttatctttaattagcctttgataaagtagcgagaaatacaagatagctaactaataattttgtgtttccgatagaacgattttccagagaagtgaatcgaaaaatctgtaaaagttcaatctaattctgccaaaaaaaatgaattttgtcaacaaagtaaatggacttatttgttattgttactgaaaataactcaaataatatattttcttgaaaacatgacataagaggttcatgaatcaactttgatatctgtatttttgtgatcaaataacgattgatgttgtcaaaatataaagattccatcacaagttgctcctgtggtcttaatacaattaattacagctactaaattaagatttgctttataaataaccaatttgagtaacaaactgagttatcttataaattcatcaaataccacagcctaattatcatgtttctctgagaaaaaaacatttatgttcaaatcaacaatgtgtgtatttaatgatttgttgcttacaagacagttgctctaaaactcttgataatgcaagcgcaaatgacaataacacacctaaaacaaaacttttattgtccaaattcgagtaaagggatataccatgatcctgatagaatattgaaaactgagttcatgagccaaaaatatttttcaaaacttactgtctgtgaactattctattttttcaaattgtgctattctttgtattaattcaataatgaaaagcagcaagtcaattattcaatgaattgcaagtaaaaaggaaaaaataccataaaccaaccctgttattatctcgataaaaccgtttaagtattttttcacattgcatgaatttagattcaaggtgatgttatttctgtaacgagtttggcagcttttattggttgaatgtcataaaatatattaacttgttttcctaatcactggtaatttaatgctcacacaaatgctgacatcatatctaccgtgatcagacaactaaccaatttactaaccaattagtaaccaaacaagttcagaaaattttaccagtttctacaatatcctaagttctttggatggagttttctaaatcctgctgtcttttctcacacacgcgagtttttactgataatgtctctaaacaaacaagaaaaggaaagacaacattgtatagtatcgtttcaggtttacagtgttagccaattacatcaaaacaccaaagaatttaattattaaaagggaaatcaaggcagtatttaccgtgtggtgttaatggatgaaaatgcctgatttcttacacagctaaattaactaatactggtaagaacaaatggcttaattatttatgtgtaagccacagaaatttaagtaagttctgtagctcaacaattaacaatcctcaaaattactctatgccatgatgtctgctgattcaattaatactgccttggcagagttagagagccttattaacagttgtgaaaaggatttgattaggtttatagaggaaagaaaaatgaagtcagaaaatcaaatgtcaactcacaaaattaacagacaactgcaacaaaatcctatcgctattgtggggatggcttctctattgccacaagctagaaacctaagacaatactggtcaaatattgttaataaagctgactgtattactgatgttcctgaaacccattggagcgtcaaagattactacgatcctaaccccagaactccagacgataaaacctattgtaaacgtggtggttttcttcctgaagttgattttaacccgatggaatttgggattcctcccagcattttagaagttactgatgtctcgcaactattaagtttagtagttgctaaagaagcaatggaagatgctggttatggtgaatctcgtgattttaaccgggagaatgtgggggttattttaggtgtggcaatggctaaacaattgggtatgccattatcagccagattagaatatcctgtgtgggaaaaagttcttaaaagtagcggtttatctgacgaagatactcagaaaatagtcgaaaaaattaagagtgcttacgttaaatgggatgaaaacgcattccctggaatgttagcaaatgttgtggctggacgtattgccaaccgtctcaattttggcggtatgaattgtgtagttgatgctgcttgtgctagttcctttggtgctttaaaaatgtccattagtgaactggtagaacatcgcagcgatatgatgttaactggtggtgtggataccgataacaccatcatggcttacatttcttttagcaaaactccggcggtttctcctagcgaaaatgtcaaaccttttgatgcaaaatcagatgggatgatgttaggtgaaggtatcgctatgttagttctcaaacgcttagaagatgcccaaagagatggcgataaaatctatgctgtaattaaaggtattggtacttctagcgatggtcgctacaagagtatttatgcaccacgaaaagaaggacaagttaaagccttagaacgtgcttataatgatgctggtttttcgccggcaactgtgggtttaatggaagctcacggtacgggaacaatggcgggagatcctacagaatttgcttctttacacagtttctttagtcaatatgataacaagaaacagcatattgctttgggtagtgtaaaatcccaaattggacatacaaaagccgccgccggtgcagcaagtttagtgaaaactgccctagctttacaccacaagattttaccaccaactatcaatattactgaaccaaatccgaagcttgatattgaaaattcttcattttatttaaacactgaaactagaccttggatacgtgcagcaggtgaagatccaagacgtgcgggtgtcagttcctttggttttggtggcactaattatcacgtagtgttggaagaatatcaaggggagcaacaagaggcttatcgtttacataatgtggcaagtgaaatgttattatttgctaccaatcctagtgaattaatcaataagttagaagcaacttttaataacttgcaatctagcgatggtgatagatattattcacaattggttctcgaatctcaatctctaagtattcctaaaactgcggcgagaattggttttatatctgagaataaagcagatgcttgtaagttactaaaggttagtattgacttactgaaaaataaacaatctgcaaattcttgggaacatccacagggtatttattaccgtgcttctgggatagaattagctggaaaagttgtggctttattctctggtcaaggttctcaatacttagaaatgggtagagaggtggtgatgaatttcccaactttaagaaggttgtatgggttgatggatgggttgttaaataaagataatttgcagcctatttcggaagttgttttccctcatccaacttttaatgaagcggagaaaaacgagcaaatttcagctttacaaagaacagaatatgcacagccggcaattggtgtttttagtgctggtttgtattctattttccaacaagctgggtttcaatctgattttaccgccggtcatagttttggtgaattaaccgctttgtgggctgcgggagtgttgagtgaagaagattatttgtacttggttaagtctagaggtcaagcgatggctgcaccgaaagatcctgatcatgatgcaggtagtatgttagcggtgaaagaagatatcagcaaaattgaagcagtgctgaagaacttcccgaaaattgcgatcgctaatttcaattctcccactcaaattgttttagctggtcctactgcggaaattcagaaaattcaccagaagtttcaagagttaggatatggtgttgttcctttgccagtatccgccgctttccacacacctttaattgcctttgctcaaaaatcctttgccattgcaacaaaatctgtatccttccaaaatcccaaagttcctgttttcagtaacgttactggtaaacaatatcctcaagaaccatccgccattcaaagagtattagaaagtcatctttctagctcagttcacttcaaacaagagatagaaaatatctatgctgctggtggttattgcttcgtagaatttggaccaaaacgcattcttaccaacttggtaaaagatattttgggtgagcgtccacatattactatatctctcaatcctagcacccagaaaaatagcgatcgctctctcagagaagcagcagtacaactgcgtgtaattggtatggctttaggtaatcttgacccctaccaactaccagaaacattacccaccaaagaaaccaaaaaagccttaaacgttaaattaagaggcattaactacgtttccgataaaaccaaaaatgcctttaccgaagcacttaatgatggtttcaaaattcaaggagtgcaagaaattaaagaatctcggaatttagaagaatctaagattttagaagttaaaaattctgcaacttctataactcctgtaacttctttcagcaacggaaacggaaatggtaacggtaacggtaacggcaacaagaaaacaccagtaattacttctttgcaaacagtttctcagatgaatcctgctacacctgtaaatttaaatccagccaccaaagaacaattatctaaagtgccttatgcgctggcagagagtctaggagggaatatggaaacaccagataaaaacaccaactttcaacaggttttggaaagtttagaaaacctcctcaaccagtttcaaaataatcaaagtgataacttagaaattcacggcacatatttaaatcatcaaatggaatatgcgaaaacatttttccaattgatgcagcaacaaaacgccctgttaatgaacagtcaagctgccgaaactgcccaaattaaacaatcaatcatggaaagtttcgagcgcagcatgatccaatttcacaaccaacaagccgaaactctccgcatccatgaacaatatttacgggaacaagtagaatacaccaaaaacttcttccaactcattcaacaagaatattcattactaattgacggtacagaaaccacacccgtcattcccccacaatttaccgaaacacacacccaaagtttacgggaatttatcccccaaaacccagaaccaacaattacagaaacagttgcttctactgttaataaaatagtagaaactcctgaaccagtgatagaaattgtaactcaaactgcaccagtaattgaacaagtctcgatcacaaaaattgctgaacctgtaatagaaaataaacccgaaccagttgcacccgtagcattaatttctgagccaacaaaacccgcagttaatattgatgaactaggtaaaaatctcctagcaattactagcgaaaaaacaggttatcccatcgaaatgttagaatttgacatggacatggaagccgacctgggaattgactccatcaaacgggtagaaatcttaggaggattgcaagaattatatcctgatttacccaaaccaaacttagaagaactggcagaaaaacgcaccatcgggcaaatagttgaatatctaggaaaacaggttgcggttaacagtttagaagttaaaaatgaggtgaaaggtgacagtttacaggtgacagaagaggtgacagaagaggtgacaggttacaggttacaggtgacagaaatagaagaagtaaaacaagatttagtcattattccccagtccccagtccccagtaccaaacacccggatatagccgaaaccctgttaagaattaccagtgaaaaaacaggctatccagtagaaatgttagaactagacatggacatggaagccgacctgggaattgactccatcaaacgggtagaaatattaggaggaatgcaagaagcgtaccccgatttacccaaaccaaacatcgaagaattaggcgacctgcgaacaattggacagatagttaactacctccaaaaactggtggcaggtgaaaaaaaaaagcttgattcttaccagatagaaacacaaacagaaacaataaaaaaagtggtggacttaaccccaccactaccagcagacccaaatttacctcgtcgtctagccaaactcaaaacattacccagacctgatttttgggaatataaactcccagaaggacacattggattaatcacagatgacggttctttaactacaacaaaattagcccacgcgctaatagaaaaaggttggaaagtagtagttttgagtttcccccaatcaatagttccagaacagtcaccattaccagtaggagttacccacctcaccttagcaaacatgagtgaagaacacctacaactactactgcaaagtataactattcaacatggaaagattggggcatttattcacctacatccacaattcacaaccacaaatctcggctattcagaaacagaaaaagcgattgtcaaacacatctttttaatggcgaaacatctcaaacaatcgctgaccacagccgccgaattagaaggaagagttagcttttgtacagttgcccatcttgacggtgcatttggattagactacacagaaaacttcggaattatcggcgcaggattatttggattaaccaaaagcttgagatgggaatggccaaaagtcttcttgagagcaattgatttacatcccaacttagacccacaccaatcagcagaatatattgtggcagaattgcacgattctaaccgatatattggcgaagttggttatagctcaaagggacgagtaacactcatagctgaagcagaataatttgtaaggtgggcaatgcccaccacaaagaaattgtgtttcgcgcaatctccgtcaggagatcccgcagggtaggcacaaaggagcaaagacgcaaaggtaaatattacttatgtcctaagtaactctattcttcaattcttctattttcttcttctcttcttctccttcttttcttcttccttcgtgtccttcgctccttcgtggttcaataaatcttctctttgcgtctttgcgtctttgcgtgagaaaaaaataaatttattcatcaacacagaatcaattataaagttgaattatgacagcaacacttcaagttaatccatcatctgtatttgttgttagtggtggagcaaagggaatcactgcacaatgcacaattaaattagcccaaaatcaaccatgtaaattcattcttttaggtcgttcagaaattacagaagaaccagattatacccgtgattgtttagaagaaccagctttgaaaaaacgcatcatggaaaatttgatttctcaaggtgagaaaccaacgcccatgatggtacaaaagatatttaatcaaattacttccagcagagaaattaaaaagactttagccgcaattgaagcagcagggggaaaggctgaatatatcagtgttgatgtcaccgatacagtagcattacaagaaaaactcaatactgttgctcaaaagtttgggcaaattacaggtattattcacggtgctggaaatttagcagataagttaattgaaaagaaaacatctgaggattttgaaaaagtttatactgccaaagttcaaggtttacaaaatttactcaattgcattcatcctgaacaattacagcatttagttttgttttcttccgtgactggtttttatgggaatattggtcaaagtgattatgctatagctaacgaaattctcaacaaatcagcccaccaatttaaaaaacattatccccaaactcatgtagtcgcaattaactggggtggttgggatagtgggatggtgacaccacaattgaaaaaagcatttgctgaacgtggaattgatattattcccgtagaaatcggtacacaaatgttagttaatgaactccatcctgcctttcaaaatcaatcccaggtggtgattggtagtcccatgaatttaccacccacacccctagaaagcgaactaaaaagttatcgtctccgcagacggatgacattagcagaaaatccctttttatatgatcataccattgccggggtgcaagtattaccagctacctgtgccatgtcttggatgattcatgcttgtgaagaaatttatccaggttatcgctacttaaattgcaaagaatttaaagtcttaaagggaatatcctttaattccaccctcgcagatgaatacattttagaaattcaagaactatcaaaagctgatggtgaatttatagaatttcaaaccaaaatattgagtaaaaatgctcaagttaaaacccattttcatttctctgctatcatcagagtagtgggtaaaatgccagaagcgccaatctatgaagccatgaatctcacagaagataacatcattaccactataggtaaagaattttatcaaaatggcgattcatccttatttcatggaccagctttccaggaaattaccagggtattaaatgttaaccctaataaaattaccgtcgagtgttgctggcaagaaatatctgaacaagcacaaggacaatttccggttaaatggcataatccctataccacagatatcagtacccaatcactttggatatggttaaaccactttcatcaagaagtatgtttaccaggacaattaacgtattcagaacaatttttagcagtaccttgtaatttaccattttatgtttcctgcgaagtagaaaataaaacagatacaggagtaacagccaactttatcttacacagtcgagaaggaaaaatatactcccgcattttaggagcaaaagcagtcatttggccgatgaaaatgttaagtaagaaatagatagataaagaaattgtaggttgggttaagcgacagcgcaacccaacaaaatcaacaaaatgttggtttttctcatcttgggtttccttacgtcaacccaacctacaattaaaactttgaaccacgtttgggggaatcgcgtaaatccttagaaacttgggaaaagaagtaaaaatctctctctctgcgcctctgcgcctctgcgtgagaaacttacttctttccctcctaccccaacgaggatttcaacagtggaaaaaatagccattatcggattatcatgcctctttccagacgcaaacaatcctgagcaattttggcagaatctcagcgcagaaaaagactcaacttctgatattagcgtaaccgaattaggtttagatcctagcatattctacgatacaaccaaaggcaaaccggaaaaattctactttttaaaaggtggatttatccgtaactttgactttaaccccaacgaatataatttacctggggaatttgtccaaagtctggacaatacttttaaatggtcactgtatgcagctaaacaagcaattattaacagtggctattggggaaatcaatctgcactctctgaatgtggcgtaattttaggaactctcgctttaccaactaaagcatcaaatcaattgtttgcccctatttatcagcaaacaatagaacctgcaattagtgaacttctacaggaaaaagatttccgtttaggtggtacattaaccgcagctaaagcatcaccatataatgcaatggtttccggtttacctgctgccataatttcccgcgcttttaatctttctggaactcatttctgtatagatgctgcctgttcatcatcattttatgccattaaattagcatcccattatctgcaatcaggtaaagcagatttaatgttagctggtgctattagttgttcagatccgttgtttttaagaatgttattttccgggattcaaggatatccagaaaatggcattagtcgccctcttgataaaacatcacggggtttaattacctccgaaggcattgggatgttaatgttaaaaagatatggtgatgctgtcagagatggggacaaaattttagcaacaatctgcggtaatggtttatctaatgatggcaaaggtaaacatcttttaagtcctaatgctcaagggcaaatgattgcctatcaaagagcttatgacgaagcaaaacttaacccccaagaaatagattatttagagtgtcatgcaaccggcactctcttaggagataccaccgaatctaactctattgaaggattttttggcgcgaaaaatgccaaacccttagtaggttcaactaaaaataatatcggtcatttactcgttgctgccggcatggtggggattacaaaaacgattttaggaatgtctaataatgtcatccctgcaactattaatgtcagtgagccgatgggttctgaaaataatgtgatatcgcctcaaaacattgtcagaactgccacaccgtggccgagtaaagaaactaagcgtgtagctttgagtgcatttggatttggtggaacaaactctcatttaattcttgaacataattcttgagtaggggcaagtcagataatgaataatcaggaaagaatgaacgcgcaaatggctgcaaaaatggcgattgtgggcatggatgccttttttggggaatgtgatggtttagatgcctttgagggcggtatttacgacggaaaacaacattttattcccttacctgaaaaaagatggcatgggattaatgaacaagaaaaattattgcaaggttacggtttagaagcaggaacagtacccaacggtgcatacattaaagattttgaaattgacaccttagcttacaaaattccgcccaacgaagttgaaaaactcaacccgcagcaaactttactattaaaagtgtgcgatcgcgccctcaaagatggtaatattcaacctaatagtaatgtcgctgtcattatcgccgccgatacagaattatctgtacaccaattacaacaacggtggaattcttcttggcaattaaaagatggtttgaatgctgcggaaattgccttaccaccagaaaaaatcacccaactagaaaacatagtaaaagatagcattcaccatcaagttgatattggcgaatatctcagttatgtcggcaatatcatggccagtcgagtttcttctttgtggaatttctctggtccatccttcactattaacgccgtagaaactgccacttttaaagctttagaattagcagaaatgctattagcaactcacgaagttgaagcagtagttgtaggtgctgttgacttagctgggggtgtagaaaatgtcttcctgagaagtcaatttggtaaactaaatacaggcataaataccctcagttttgaccaaaatgcagacggttggaatgtgggagaaggtgcaggtgcggtagttttgcagagacatgataccgcattgcaaaacaatcaacgcatctatgcagtcattgatggtttaagtattggtcaatctcctgcaatggcgataaatgcagataccatcaatcaagtatgcaaacaggcatttaaacaagctggcattcaaccccaagaggtcaattacttagaagtctgcggtagtggcataccccaagaggacgaagcagaaattcagggtatgctgcaagcttatccttcggtgggagatggtttacactgtgccattggtagcgtcaaagctaatattggtcatactttcgtggcttctggtattgccagtttaatcaaaactgccctgagtctgtactataaatatataccagcaacccccaactggtcaggtgtgaaaacaccgcaagtatgggaaggaagccccttttatgttgctaccgagtctcgaccttggtttttacaaaaagaggtcaaatgtcgaatttctgctattaacagtattggttgtgacggttcttttgctcacgttattttatcagaagaaacccaacaggaagaacgcaatagcagatatttagaatcacgcccctatcatctttttcctatcaatggaaatgatgaaactagcttattaactgcgttaaataacctggaaaaaaccattgaaactgctgaatgtttgaaaaccacagccagtcaaacatttatcaattttcaacaacaacctaacgccaattataccttatctatcaccggacgcaaccacaaagaactcctcaaagaaatcaattctgccaaaaaaggtgtaaccaatgcctttgtaaatggcaaagattgggtgacacccattggtagttattttacacccaaaccattaggaaaaaatggcgaaattgcctttgtttatcctgcagctgttaacacttatgtaggaattggacggacattattccgactatttcctaaagcatttgatgacgtaattgttaaaagtttgtacaaacgagcagccgatgttgaaaaattagtatttcccagaagtctaaaaaaactaactaccagagaactagaaacactagaaaagaaattgttagatgattctctggctatgtttgaagcagaaatgctctttacgagattcatcaccacaattattagcgatgacttccaaattaaacccaaatatatctttggttatagcttaggtgaaaccagtatgatggttgcccaaggagtttggagcaacttctatcaaggaagtaacaccttcaactcatcatcattatttggtgatagattatcaggacaaaaaaatgcagtcagagagtattggggactaccaaaaaattctgcaaatcatgataataatttgtggagtaactacgttttaatgtccacccctgaccaagttagagaagttttaaaaggtgaaaatcgtgtctacctcacccaaattaatacaccagaagaagtattaattgccggtgaaccagcagcgtgtgaaagagtgatcaaaaaattaggatgtaacgcttttcctgcaccttttgaccacgttattcacgctccagcgatgcagtcagaatacccagaactattccgactcaacaacttaccagcacaaaaaatttccggagttacctgttattctgcggcagaatatcaaccaattaccttagaaagtgaagtaattgcccataatatcgccaaaggattatgtcaggaattagactttcctcgcttagtcaatcgagtttatcaagacggtgcaaaagtatttattgaagctggtgctggtggtatttgttcacggtggatagataaaattctcagcaaccaagaacacattaacgtatccttaaatcgtcgtggcttagatgaccatacatcaatagttaaggcattagcaaaactgctcagtcatggagttaaattagatatttctcctctgtataacctctccttagcaaccacgaaaaccaacaaatcaacctggagaaaagtaaccctgggtggtcactccatcactgccgaaattttaaaagcagaaaaccgccaactgttccaaaaagatacccatcaaaatccagaaccaaacactaattaccgagagtataaaatcattaactctctcaaaccctcttaccaaattcaaccccaagacatttacccacaaccagaaaaaacggttataaaaccgctcatagataaccgtttccaaccccaagaagaattaaaatcttctgaactaaccagcactcaaaaacccaaacctaaaaaattacttcgtaaaattcacatgaacgatttaaaaatagctcagtatcaaaaactgaccaacaacaactccaaattaacaaaagcacacaccagctttttagaagctagaaaagacttcagccaacaaatgagcgaaatcatcaaactgcaattagcttgcgctcaaaacttactgcaacaggaaaaataatgaataaaactaaccacaaagaacgcaaaaaacacaaagcaatagaaccacaaaaaacccttgacatctcttcctttcttacctttgcgaactttgcgaactttgcggtttataaactataaatatagctacaaaacttgataacttgaggaaataactaccgtgacaacatttaatacggtactcaacaaacccaacaacggacttaccttctcccacatttcccaacatcaaacccaagcttggagaggttcattagattatattgcctttgaacaaaacgccatcaaacaaaaactactcaccctagaaaaaccctgtcatatagtcaaaatagcaggtaacattggcgtaaccaacgacggatatttaacacctgctaacaacggtgcatccgaacaagcagaactattaatatcattaccagcattagaactgcaacaatttggcgatcgctctttcctctccacctataatgtaaaatatgcctacatgactggtgcaatggctgggggaatagcatccgaagaaatggtcattgcactaggaaaacaacaacttttaggttcatttggtgcaggtggtttacctccagaacgcctagaaacagccattcacaacatccaaactgccctacccaatggaccttatgcttttaatttaattcacagtcccaacgaaccagcaatagaacgtcgcgccgtagaattatacttaaaatatggcgttaccactgtcgaagcatcggcatttttagacttaactcctaacattgtttattatcgcattgccggattaagtttaaattctaatcatcaaattgaaatcaaaaataaagtcattgccaaaatttctcggcgtgaagttgctaccaaatttatgcagccacccccagaaaaaatggttaaagaattacttgcccaaggattaattaccgaactgcaagcaaatttagccagcaaagtttcaatggctgatgatattaccgtagaagctgattctggcggtcatacagataatcgtcccctcgtatgtttactaccttcaattattagtttgcgggacgaaattcaaggtaaatataattacgaaaaacccattagagtgggagtagcaggaggcattggtacaccagaatccgccctagctgcatttatgatgggtgcggcttatatagtcagtggttctatcaatcaatcttgcatagaatcgggagcttgtgaatacaccaaaaagttattagcacaagcagaaatggcagatatgatgatggctcctgctgctgatatgtttgaaatgggagtcaaattacaggtcttaaaacggggaacaatgtttcccatgcgggcgcaaaaattatatgaattatatcgcgcttatgactcaattgaagagattccccaagcagaaagagagaagttagaaaaacaaatcttccgtaaacctatcgccgaagtttgggaaggaacagccgcttatttatcacagaaaaaccctgaaaaattaggtaaggctgtgaataatcctaaattaaaaatggctttaattttccgttggtatttaggtttatcttctcggtggtctagtagcggtgaaaaaggtcgagaagtagattatcaaatttggtgcggtcctgcaatgggcagttttaacgactgggtaaaaggttcttatttagcagcacctcaaaaccgtcatgttgttgatgtcgccaatcacattatgttaggaactgcctttttatatcgtattcaaaacctaaaattccaaggtttgcaacttcctagtttttacagtcaatatcaacccgttaactctacattggagatgtaaaaatgagtttaacaactacttataatgctgctcaaattcaagattttatggtgtctaacttagcagaagtgctaggaacaacaccagaagaaattgacgttcaagaacatttagaaaattatggtttggattctgcccaagctatgattattattagtaaattagaaaatttactaggttttaaaccctctccggttttattgtggcattatcccaccatcgctgcgctttctcaacgtttatcagaagaaaatcacgaaaattcccagttagaaaactccagcaatggtactgttaataatgtcaatattcctgtaccatttttagatttaggtgcggaagtggtgctagatcccactattcaactggtgggtaataatgcgatcgctgttaccaatcctaaaaacatctttttaacaggggggactggttatttaggggcgtttattattaaggaacttctaacagaaaccccagcaactatttattgtttggtacgtgctgctgatgttgccgaagctaagagcaaattaatcaaaaatctccaacagtatgctatttgggatgatcaatatagtgatcgtttaatacctattgttggtgatttatcgttaccacttttaggcattagtgcagaacaatttgaaaatttagctgccaatattgacaccatttatcatagtggtgctttgctgaattatgtttatccttattcggcattaaaagcagcaaacgtattaggaactcaggaagttttaaggttagcttgcaaaaccaaagttaaacctgtacattacgtttctagcgttgctgtttttgaatctaccgcttacgctggtaaggtagttaaagaacaagatagctttgatgattggcaaggtattttcttaggttattctcaaacaaaatgggtagctgagaagttagttaaaattgctggtgacagaggattaccgattacaatctacagaccacctttaattgctggagatagccaaactgggatttgtaacacccatgattttatcaatttaatgattaaagggtgtctacaaatgggatgttttcccgatgtagattatatgttggatatgtcccctgtagactatgtaagtaaagcagtagtttacttatctagacaggaaaaatccattggtcaagctttccatttgcaacatccccaacccgcttctttaaaatcattggtggaatggatacacacctttggctttaaattagaaatgattccctacgaacaatggcaaaatgaattaatcaataatgtcactgaccaagagaatccattatacaccctgaaaccctttttattagagcgttggtctgatgaacaaatcaccattcctgatttgtatttgcaagcaagaagaccaattattagctgtgaagaaaccctggaagcattgaaaggaagttctattgtttgtccgcaaattgactcacaattattaatcacttacacttcctatttaatgcaaacaggtttcctgactctcgcataattatagtcttaaaaaagtagggtgggcattccccatcttacaatctaataattttaggtgaataacaccagtttataatatgaacatcaaaggtcaattacagtgtaaagaaactgctcttattactggagcagcaagtggaattggctaccaattagcctgtatatttgcctccgagaattacaatctagtcctagtagatagaaacgaaatcaaacttttagaaatcgctattgatttcaaggagaaatttaatattcttgtcaaaactattgttaaagatttatctatacatacttctcccaacgaaatttttacagaattgcaacaagataatattcaagttgatgtacttgtgaataatgccggatttggtacttatggtttttttaatgaaaccagcttgaatcatgaattagaaatgttgcaggttaacttagtttgtttgactcatttaactaagttatttctcaaaaatatggttaagcaaggtagggggaaaatattaaatgttgcttctgctgctgcttttcaacctggtcctttaatggcggtttattttgccactaaagcttatgttttatccttttctgaagctattgctaatgagttagaaggtacaggtgtaacagtaactgttttgtgtccaggttcaactgtatctgcatttcatgaacgcacaggaatggcagattctaaattgttgaaaggtcaaaaaatgatggatgctcaaactgtggctttgatgggatatgatgccttaatgcgcggtcaaactatagttattcccggacttttaaatcaaattctggcgaaaagtgtcagattttttcctcgaaagatggtgacaaaaattgttagaagtatgcaagaaaataactaatattcagttcgattaaatacttcaggacttacgcaaaacagaacgaaagtcatgggtagggaacagggggaagatggggaggtaaataaccctatcaccaataaccagtcaccaatcacctaaaattaccacagactttgattgctgtgatattataggagactgctgcatacatttagcgaaaatcgaagtttaatcaatcatggctctcacgcaacagcgcaaacaagaaattctctctggcttccaagtacacgaaaccgataccggatctgcggatgtccaaatcgctatgttgactgatcgtattaaccgcctcagccaacacctgcaagctaacaaaaaagatcactcctcccgccgaggactcttaaagatgatcggacagcgcaagcgtcttttagcttatgttctcaaaaacgaccgggaaaagtatcaggctttgatttctcgcctgggcattcgtggttaggaattattgcttatgtctgctgaaggatcagaacgcagtaatttaccttttgagccaaataaaaagcgtcaaaaacctgtaaaaactaaaactcaaccgatagtaaaaacacaggaatctaatcaaaagtcgccacagcaaccaccttacacgaaagaggaaatggcgattcctgaagtggtcagccagcggatgatccgcagagtcgctgcattttgtgggatacctacggctttaggtattactactctggtggtcagctatttgttggtcagttacgctcatgtccaattacctcccatcgcagtattattggtgaatatgggattatttgggttaggggttttaggcataacctacggtgtactttccgcctcttgggatgtagaaagacctggtactttactaggttttggtgaatttagtaccaattggggcagaatggtcgaaggttggcgagaaacacgcaaaaagaacgactgatcaacggcgctcaggtatcttgagataactgccatattgggtaaattagggaatgaattttatctgatttatacccaatatgcagacaaagtacctggcgctacattttttgtttatttttttgtttaatgattaacatattagggaacagggaacagggaacagggaacagggaacggtaaaaagactgttaactgataactgaaaatactttgttaataaggggatttaaagatgattgttgtaatgaaagtcggctccccacagtcagaaatagatcgtttaactcaagaattagctgactggggtttaacaccagaaaaaattattggcaaacataaagtagtaataggtttagtaggtgaaacggcggatttagatcccctgcaaattcaagaactcagtcaatggatcgaacaagttttacgggtggaagtaccctataaacgcgctagtcgtcagttccgccacggtgaagcttctgaggtggtggtaaatactcccgatggtcctgtaatttttggtgaacatcatcctttagttgtggttgctggaccatgttcggtggaaaatgaaaccatgattgtggaaactgcacagcgggttaaggctgctggtgctaagttcctgcgtggtggtgcatacaaaccccgaacttcaccctatgctttccaaggtcacggtgaaagtgctttggagttgttagcaaaggcgcgggaagtcagtggactgggaatcattactgaggtgatggacgctggtgatttggaaaaaatcgccgaagttgctgatgtgattcaggtaggggcgagaaatatgcaaaatttctctctgttaaaacaagtaggggcgcaatctaagccagtgcttttaaaacggggaatggcagcaactattgaagattggttaatggctgctgagtatattttggctgctggtaatccgaatgtgattttgtgtgaacggggaattagaacttttgaccgtcagtatacgcgcaatactttagatttgtctgttgtacctgtattaagaaaactgactcacctaccgattatgattgatcctagtcatggtgtgggttgggctgagtttgtacctgcaatggcaatggcagcgatcgccgctggtacagattctttaatgattgaagttcaccccaacccagccaaagctttatccgatggaccccaatctttaacaccagacagctttgatcaactcatgtcagaattagcagttattggtaaagccgtcggtcgttggccacaacctgcattggcaattgtgtaatataacaggtgacaggtgataggtgacaggtgacaggtgacagtagagatgaggagatgaggagatgaggagatggagagatggggagatgggaagatgggaagaaatatttaccttctgcctcctgcctcctgcctcctgcctcctgcctcctgcctcctgcctcctgcctcctgccttctatttatcttcttctgctaccaaaaccagaagaacgacggactgaagaacggctgccactaccaaaactactgccagaattacgacgggtagaactagattttccagaagaacggagattactgctaccaaaacctgaaccagtagccctaccgctagtgttggtgcgatttgttgtggttgtagaacttccagaggatctaattgaacctgtagtgcggaaagctgtacgatttcttacagatgcgggtggttcattatatcgagaacgatagctggaaactgctgcatcatagctagaaccatatccaccataacctgtcataattccaccgggctgataaacgggaggtacataatattgaggtctaaataacagactaccaatagcttgacctgctatgttaccagctaaagctccagcaaaaggtgtccagaagttagattcttgacgtacaattacggtttcttgttgtccggtttggggattggttttggtttcggtgacgttgtgaacgtactcaattttaaagtcttctgtcagatataaggctggctgaccattttctactttgagataggtttttttgccctctttgatttcttcctctgtcagccttgccatttgtaatttttctgtagcaaaggttggcggctgactacccagtaagaacagggtatactccccattggcatcattataagtggcttgttgtacttgatactgtccatcattcagcttggtgggggttgcactttggctggtactttggctaccactttgaggagaagaggtagtttggtttcctcccccacaggcgacacttgtcaagcacaaacttagtgctaaacaaaaaattgttagtttacgcattatagtcctgatcattagataattgtccttatgtgttagttatcattgccgattttaggtgtgataactaaagagtaacaacaagttacaatgggatcaattctggaaaatactgcaacaattgatcgtttgtgagttcttctcccaacttggctggtgaaaaatgcacttggatagcgcggaatttaagtttttgctgtaagttgattaatgattttaacccttcttgtaaggctgcaatgttggaaaggtctgtttctaattctggtacttctccttcataagccactgttagcataatcacaatgttgcgcgttacaggaatagataaaggttgatcgaaaccagaggaagaactaatatcaaattcagcgccgtatctttgggcgcagtcggtaaataattcattgacataatctcccgcttctccttcattccaaaaaacatctccttcattagctgctgaaagccagtattcatcatatctgagcaaagtttcacaaatttctactaatccttcgcccaaaacttctaaatcgccctcagcgtcaatcgcttctctggcggcgcggtttaaaactcctaaaattggtgctacttcactgccggctaaatgcacaaataaacgacaaactacatagcgagttctacccatcattttattaaaaaaattgctcatttttcttctccatataattttcttagttatagcaagagtcagaaatacagataatatttcaaagtttagttgttaaaggcaaaaatgaaaattggtattttaggactgggactgatagggggttcattaggttttgatttacgttcccaaggacattatgttttaggagttagccgtcgtgaatcaacctgtcaaaaagctgttgagattggcagtgtcgatcaagcatcaattgatttgagtttgttagctagtgctgaagttgtgtttatttgtactcctataggactgattgtgcctcaagttgaacagttggttgctcatttgcctgagactactattgtaactgatgtaggttcagtaaaagcacctatagtcaatgcaatttctcctctatggaagaattttattggcggtcatcctatggcgggaaatacagatgtgggtatagaggccgcacagcgcaatttatttgtgaatcgaccttatgtactcacaccaatagaaacaaccccaactactgccattactgttttagaggaaattgtgcgatcgcttggttctattatctatcattgtcagccagaaaaacacgaccgggctgtgagttggatttcccatttacctgtgatggttagcgcctctttgatggctgcttgtttgggtgaaaccgatccagaaatttttcaattagcccaaaaccttgctagttcaggatttcgagataccagccgcgttggtgctggcaatccagaattaggggtgatgatggcgcaatataatcgtcaagcattaatcaattcactacatcaatatcgtcaaaacctcgacatatttattaacgtgattgaacaggaaaactgggaagttttagagcaaaagctcaagttaaatcaacaaaatcgtcctaaatttctggaatagataatatcctgaattatgtacgggtttagcattactaaacccctactgactcctgattactttacgggttttttaaagttagctcaaagtaaaggtggtagtatatcactcactgatgcagtgattgaacttgctcaacctacttcagaagtgcgctcaattttagaaactatttgtactgatggactcatggaaattaccaacgataaatccacaggagcaataatttacaaattactataagtatagtagggtgggttaatgagggcgtaacccacaacagtaaattcttaaatcctggatatcctgattcagacaaaatactagatcccggacttcttaaagaagtcagggatctggcctatctgggtattaatcaatccttaaatcctgtaaatcctgattctgacacaatacaataaactaacctacgtaggttcggggttctaaatccgttataatcaaaaaagcaaattgatagcttctaaaccattatggaaaacatcaccattcaagttgacccagaaattgctcaagcataccgagaagcagaaccagaaaaacagcaaaaaatccaaatgtttttgaaagtaatgctgcaaaaagtagtcagtcaaaaatcactcttagatattatggaagaagcgagtcaacaagcaattgctaacggaatgaccccagaaattttagaatcaattctcaatgatgacaactaaccgattcgtaatttatacaaatgtaattgttagtgcattaatattctctaaatctaccacaatgcaagcttttagagcagcaaaacaaaacggattaattttaatttcagcagaaattttagcagaattaattgatgtactcagtcgtcaaaaattcgaccgctatctatccagagaaattcgtgaagactttttagcaagtttagctacagaaacagaattaattacaattaatgaaacaattgatatttgtcgagatcctaaagataataaattcttagaattagccatttctggaaatgccactcatattatcacaggagataaagatttattagaactgcatccttttcaagatatattgattgttacaccgagtcaatttttagatagtatatcttcaaattaattaagcagtatttgttaaaataacacatcccgtaaatccttaaatcctggacattatctcgacttacttcgactgcgctcagtacaggtcgctcgataaccacctgattctgacaatctgcgtttatctgcgtttatctgcgtttatctgcgttcttatcctgaaaatcctaattcaaacaattatttttcaaacacccttcaccctaatcaaaccccgatcaaaaacacgattattagtaccaataccactcacctcaattctatccgcatacacatcataagcagcaaaacttaaattactggtagaatattcagtccactcagaacgatccacagaacgatttcctgcacccgcaccacaaattaaataagtactaccattaatagagcgagtgcgttcataatgatgttcatgaccattaatataaagctgcacaccatactttttaaataaaggagtaaacactttgataaaattagcattactcccataaacaccagaagcataaatcggatgatgaccaaatacaatcttccaagcagctttactcaaactcaattctttctctaaccaaattagctgatttttccaatcagcgttcccattagtatctaaagcaaaaaactgtacattatccctaagaaatgtatagtaccttccctgcatattgaaaccaggataatttacctgtggatcaccattatcagttctaatatcgtgattacctaaacaagcataaaatttcacaccttttttcaacaaaggttgataaggacgttcaaaaactgcccctattttctcaatttccccattgttataaatattatcaccagctaaaataactaaattatagggatttttttgatgataaaaattcatcgctctagcaacagcgtactgtcctttagcacctgttcccgtatccgcaaccgacacaaaacgcaataataaatcttttgggtgagaatttacagctatagcagtttctaaaaaagaatttttactattttcaccaacaaacttaccagcaaacaaacccgaaaacaacccactcagaccacctaaaactaaaaattctcgacgtttcatattcataaatcaataaatcaacatcaattatatgtcacaagatagaagaccccaacccagaaaacaacaaaaaactctacctgctccacaactttaccaagaaaatcaacctatttggaaaatagcaataattcaatttcttcgaggaacaataggaattttagaaaatacagtagtcaaactagaaacagaaccacctccaacaactgaaaaaaaacctaatcttttagcacgggttttcttagcatgggataaatttttacaaacattccgcttgtttttaccatccaaggttgctaataatgtatcagattttaccttaaacgcaatttttgctatttttgcagtggtgatagtcggggttacagcagctttcttgactcccaaacctactcaagtagcaaccattcccccagatattcctttagttgcagaagttcccacacccaaacctatcccagaacctacaccagaacctatcccagaacctacacccgaacctacccccgaacctacccccgaacctacaccagaacctacaccagaacctacaccagaacctacaccagaaccagaagcagtacaattaacaccagaacaagctttaatagcagcaatagaacagcaacttgcggaaattaccgttatctccgtacaaaccaaagaagatgaaaatattgctattaatctgataaaatcaatccaagctaattttcgcaccagcgacttaaccataacaattagtgatgattggtacaccttagaaccatcacaacagcaacaattagcagcggatatattaaaacgctctcaagaactagattttacacatttacaacttgttgatgctgaaaataaattaattgcacgtagtcccgttgtgggtaatgaaatgatcatctttagtaaatattcatgaatcaaaattcataaatagcaaaatttgtagtcaaaagtaaccattgtgaaatttacatcttatgagataaaataagtaatttatcagttgaaagactcctcttttaaatatgaccaaaacttacgccgtcgaaattaaccaccaaggcacaatttataatttgcaagttcctgaaaatgaaactatcttagctattgcagaaacaaaaggtttagatttaccagcttcctgtcatgctggagtttgtacaacttgtgctgctttgataactcaaggaagggtagatcaatctgagggaatgggtgtaagtccagaattgcaaaaacaaggttatgctttactttgtgtagctaaacctctttctgatttaaaaatcgaaacagacaaagaagaagtagtttatcagaagcaatttggtaaaagttagtcaaccgattaatgggtgatgagtgataggataagtaataaatgtttaccaatcaccaatcaccaattacccaaaaatagctgtattctataaataaccaaaaccctatattttaccatcatgaccactcattttattactgccgaaatagacctgcaagaaacacccacagaattacaaaaagccattgaagcggaactaaaaaaacaaggtgaacccctgcgctgggcggttacttccgtagatacagaacaggaaaaagccacagtagaagcagttgtcaccacagcaaaccctgaataattaagattaaggcgttgctgaatgagcatgaaaaaactgagaaatttacaactagcaactttgcgcctttgctcctttgtgcctaccctgcgggatctcctgacggagattgcgcggaaacataattcataataccatcatgcaacgcccatatacagcaattttaattatacctactggcataggagcgtccataggtggttatgcaggtgacgcattaccagtagctagagttatatcacaggtgtgcgatcgcctgattactcatcccaacgtcctaaatggtgcaagtttatactggaatattcccaacgccttctatgtagaaggatatggtttagataaatttgccgctggagaatggggtttaagacccgtgcatagtaaccgagttggtttacttttagaccaaggaatagaaccagaattaatgctgcgacacctacaaacggcagacgcagccagagccacactaggattaaacattacaaatcatgtaattacagatgccccattaaacgtagaattacgcatatcttcatctggtgtaagttggggaacaatcggcaacccagaaagtttattgcgggcagcagaaaaattgattaaaaaagagaaagcagaggcgatcgcagtagtagcccggtttcccgatcatatagatgaacaagcaacgcaaaattaccgtcatggaaaaggcgtagaccccctagcaggtgcagaagcagtaattagccatttattagtgcgaacctttaaaataccttgcgcccatgcaccagccctagcaccagcacccccagatcccgatttatctccccgttccgcagccgaagaaataggttatacttttttatcatgcgtgctggtcggtttaagtcgcgccccccaatttatcctcaacagagaatttatcaattctttaccagcagacatttgggcagatcaagtagatgccgttatagtaccagcaaacgcctgtgggagtagtaccttactaagtttaagccagaaacaatgccaaataataactgttacagaaaataaaactttaatacaagttcctgccccagcgttaggaataaaatctataaaggtaaactcatatttagaagcagtcggtgtcttagtcgcccacaaagcaggtattaatccttggtcattagtcattagtcattagtcattagttattctccgcctgctcccagtccccagtccccagtccccagtccagtcctcattatttaaacgcctgtggtagaacaacaaaagcaagaaccagaaattcctgaactctcacgcacccaagtcctggtagctatgggcgcaacagcgattattttatggatagccgccaaattgtggctgcgctttggtaacgttgccctatttaagttgtactgggaaccccaggatttatttttgggtttggggttgggtttagtcatcactgtttttagtggtttagcttatcgcttctctcctccctatcgcaaaagcgcagattattacctagaaatggtaattaaaccgttagctttaccagacttgctctggctggggctgttaccgggtttaagtgaagaattattatttcgcggtgtcatgttacccgctttgggcgctgatcatgtagccgtcatggtctccagtctttgttttggagtattacatctcagtggtgctgaacaatggccttatgtaatttgggcaactattatcggtatcatcttggcatatagcgccttattgagtggcaacttgttagtaccaataatggctcatatcatgacaaattggctatctagctatctgtggaaaattcggaaattatagcaggggaatggtgactggtgactggtgactggggaaacaggaaatatttagggtttgctgatagcgtagcgtggcgttagccatataaatccgaaaactttacaggtaaagggttttagctattttgacttgtactgagcgacttgtactgagcctgtcctgagcctgtactgagcggtgtcgaagggctgtgtcgaagggcgcagtcgaagtaagccgaagtgctttcaaaaagtgccagcttttatgaggtggcaactgaaaaaccttgcacttaattcctacttaaagaaaaaatcgttcctatccaactcttgaaactgtcaccgtggcgtagcacctgtcacctgtcacctagctttcacagataactttttcagcaaaccctatttatctttctcctgcctcctgcctcctaaaaaagattacacccagaaaatccgaaaaaattctgggtgtcactagtaaacttctcacacttcccgatctatcttgtaaaaacgcttattcaataatgaatggacaattaacaatgaactattgagaactacctctcccttgaagggagaggagcaaaaaagcggaatttttttctttttttccctttgaaaggggaggttttaaaccgttcggctgaagctcacggcgaaagccttgagtgaaacaattgtcaattatcaattatcaattatcaattgctaactggctttttccttagaaatcatcaaccaaagaactcaggcgactgattacagggtcgacctcttggggagtaggatcgggagtagaagcagtttcattaactacttctaccgttgctatagatgaatttgcgggttgaaaagatgctgcttgattgaccatgattgccaattgtgcaacttgttgactaagttgtaatatctggctttccatcacctgcaaacgattggattccttagcaaaaaaacgttcctcaagtccagctatctgacgttgcaactcaccgagttgttgttccatcggtagtgctgctgtattcggagaaggtcgtgcagagtccggtacacataaagcttgccaaagagcctctttacagaggtcactgaaagtcttttcaggctgttcctccaagtaactttctacctgtgctaacaagctttcatcaccaatttctggattgaaagtgacggatttaactaccttttttgaccattggaacatcagttttattacctagcagcgcgaacagcagacaattgcgcctctccgtaaagatactgccctaaagcgttagcttggcgggagggtgcagccagatgagcattaatcttagcttctttgagcagacgttgtacatcttcccagaagaactcaccaccaccaccagtgataattacatctgtaacacgttctggtaaccaagccaacacacgagcgcaaatttcgcgtgaaaactgctctgtgaggttcggcagaaaatcatctaggttagtgggtttgcttgcacctttaggacgataaaaacgctcacctttaggcttattaaccgcagaaatcagtgctagagattgactatcagcccctcctatttcattagctaccagttcataaaacttgctcatgccaaagtcttcactttgagaaagacctctagcaaagcggaaattatccaccatgatacaatcaatggtttgatgtccgatatcgacaattcccactgatattttggtaaaatcaggggatgagggggttttattaggttgagcttcagaccacagcagactgccgtaaccttctggcatcacccaaactttagttatatttaacgacaaagattccccacggaagttgaagacatggggacctgttacttggctgattaaagcggttttttccttttcaaactgttccaaggacaggaaaggcagacctaagacaacggaaatttcgtctttgagtttaaagtagccagcagttgccaatactttgaccagtgcatcttctaccttagattgtccaactcctaaacctgcaccaaagtctgctgctaactgccctacagcatagcccttgccttgatattccatccacaaatccattaaaggatcagttgccttagattcaaacaccccaccacgtatttgttcaattgacatttgcttgacattggcagggatgaaggcaacattgccaggttcgcggctgacacaagttttggtagatgttctacctaaatcaacgctgagaatgtttttacccgaaattgaggctggcttattaacattgttgtttataggggctgatgctactcgattcatgggtatagcagcagcattcatcggattagctacgggtggttgatctgtcatgaaagctcctatgtggtgacttaactgtaaaaagttatcatgcccatcttacaaaaatacaagatcaaaaaaattttcagatgggtcaagtgtagctagaaatacgtcaaaatttattgtaggcgattggaaatgtaacattattttggatttattgtacaggcaaaattttcacatatagccagtggaaagtggagatatttccgttactagccgccgaaacctctctacagcagccatatattgaaaactgaactatattcatctgcgagtttctcgactttggcgcttgagtacccaaagtaagaataaccaatagacctcccaggacaattttagatacaggggcaaggtatttcttcacaagttcatactggattcataaccagtatccggaatatgtgagcaaagccacccaggcagcactacccaaagttgtgtaaaataagaaaggcaacaagggcatattgctcatacctgcgggaacagaaatcaaagtacgaattcctggcacaatacgaccaattaatactgcttttcccccatgtctgttaaaacatcctttagcgctatcaatatcttcgctagatatagtcaaccatctaccgtacttgttagctaattgttttaagcgtcgttcccccaaaaacttaccaggatcttaccagatcagtgcgcccgcgacagaacccaaaagtccggataaaaacacacctattatattcagctttgctcctcctggttgatatggactggacgtaaatcctgccaatggcataatcaattcagaaggtatggggggaaaaaggttttctaggaacatcagcagggtgattcctaaatatcccaaagagctaatggtcttggttatccattcgagcatactggtgattggtaattggtaattggtaattaggaaattaatccttaaaaatctgtatctactaaagaaataaatcttcccagtcaccagtccccagtcaccattcaccagtccccagtccccagtcacctattctaaacagttggcgttaatgattgtactatcgatccggattcccattctaatgggttccaatcccgctcttctacagccatttgctcaattaaactggctaacctcagagctttaagggcttgttcaccacccacagaaggctgattacctccatgtacacagttaacaaaatgctctaactctgcgcttaaaggttgaacgttactagtatagactttttctatcaaaccatcttgcctatacagaatctgccgatggtcgttatgcggattggtattttggcgatgaatcaaaatttcatttttgaggaaatcggcttcagtaaatgaatttttgcaatgggcgacgatgcggcgaattttacggtgagtgactttactggcggtgagagtggcgacaatgccattggcaaagcctaatgtggcagtcacataatctaaataaccagagtctagggaacgagtgccattcgctgttaatttgactacgggtgaaccagctaattctaaaagtaggtcaatgtcatggatcattaaatccagcacgactgaaacatcattcgccctggctgaataaggactcatccgatgcgcttctaaggccaagacttcctctgttttcaggacttgactcagttctctaaaggctggattaaaacgctcaatgtgtcctacctgcaaaatacattgagactcagcggcggcgttgacgagtgattctgcttcggaaatactggcagcaattggcttttcaatcaaaacatgaattcctgctaacaaacagttgatgcctacggcataatgtaagcgagtgggtacagcaatacacactgcatctacatggggtagcagatcacagtagtcttcaaaaaaacggactttgtatttgctggcagtttctaagcctcgttcaacgttgatatcagaaacgcctatcagttcaacatctttcattgaactgagtacgcgggtgtgatgttgtcccatgttacccacaccaatcacgcctatgcggattgcacgtggctggttgcgctgtgaatatagatttggttctgccactgatatgctattttgcactattattttctcctcaaccaccaaatttaaaaacgctacggtcgttggcatttatactgaactgccaagtgtgatccgtctaaaaccatccagatggtaacatagtggttctatttatgaagaatttcaaagtttatgttcagttcccactatcttgctaacttttggatcgttagttattaattttcctatgggttataattaacacaaaagaatatgtgtttttttattgactgaccatctcaaaaatacttacgtagtagctttcggatggcagttaggtaattaataactcagataactacttccttggctgctggataaatttatgacattctaatttccgtaaaattatcagtgactgtaattggctgcaaggttgtctgtaaaaattttgccaacgatactgtaaattgttttttgcattttgatttgcattttgaatttaattttttgtttgttgcattttgttgattgtctcaccttttgggtgagattgatgttagggattttttgagattttttttgcatgatgaaagctgtaattctattgtctggcggattggattcttctacggttctctatcaagctagggctgatggttgtgaatgttacgccatttcttttgattaccagcagcgacaccgccgagagttacaatcagctatgtttgtagcgcagtctgtaggggttgttcaacatcagatagttaattttgatttacgcttatggggtggttctgctttgacggatgaggcgatcgctctccctcaagcacgttccctggatgaaatgtcacaaagtattcctgtcacttatgttcctgcccggaatactatctttttaagttttgctttgggttatgctgagactatcggcgcacaacgtgtatacattggtgttaatgctttagattactctggttatcctgattgtcgtcctgattatatccaagcgatgcaagaagtgttccgtttgggaactaaacaaggtcgggaaggacaacctattgatattattgcaccgctaattaatttgaaaaaaacggaaattatccaacttggtaatcagttagatgtaccttgggagttaacttggtcttgttatgctggtggtgatcaagcttgtggggtttgtgattcttgtcggttgcggttagctgcttttgcacagttgggtttacaagatcctgttgattatctgtagcaggaagcaggagctaagttagtagtggatttaaatccaccactatagcaggagtcagtaggggcgaagcattcggacaaaaatattggggaaaaatcgagaattgatcacctgaatgcttcgcccgtacaggagtcaggagtcagaagtaaaaccctcttgtattgggcgtttcatgaatgaatggctactttaatacttagcaataaccaatcaattcgccatcatcccattctaatgtatcgccaatggtatcaccgttatgataggcagccagtaaaacttcactggttttaccataggatattgccccagtagcatcaagagcgatcgcacccaaatcccgttcatttttactagcttcggtaaatgagcgcaacatcgcctcttttaaagacattccatcactaacccggatgacaattttagcggctaaacactcatcaatgatatcttccccaataccagtacaacttactcctgcatattgagtagcataattacctgctggcatagcagaatcactgactcgcccaatgcgctcaaagcctttaccacctgtggaagtaccagcggctaattgaccatagccatctaaggcgactacaccaattgtaccccgtcctgcattagacatttctgccatttccggttcagcgacaactccagccattgtccttttaaagttatcttcccgttcttgcatccactcgttaagacgcaaatcagttaaggcattataggtgggaatttgtaactctcgtgctaactcagaggaaccgtaatcagacaatacccgatctggggaattttgcagaaatagcgccatttcaatcgggttttttacccgtgcaacattaattacaccactaaaccgccctgatgtaccatccatcagagaagcactcatgcggatttgaccatcagattgtaatacagaaccagtacctgcattaaagcgggggtcatcttccaatatttgacaaccccggactacagcatcagaagcagttgcgcctgtgatcaatagtgagtatacttcctgtattacaggatgcagcgatcgcctgacagatgccaatcctccctttccttggagagaactaccagccccaccatgaataattaatttaggttgtacttgtaaagtcatttatttgtttctgtgtagttttaacagttattagttatcagttatcaattgtcaattgtcaattgtcaattatttatcgtctttagcctgagaacggcgacgacgacaacgttctgagcaatatttaacttcatcccaacaatcttgccatttttttcgccaagtgaagggacgttgacatactggacagattttttcaggcaggtcagatttagaacgagtacgtcccatgttgattttagattttagattttagactggtgataattcatagttgatagttgattgggaaaaataaaattgattacccagtcaatggtccccagttcctgtctctaatgtcacctgtcaccatatactaacgtaagttgctaatgatgcaagaaaggctctcaaatcgaaggaacaaggataagtagatagcaaaaaagcagggaacaccatcataattcattctttctcctgactcctaactgctattactaactagcaacttgggttaatattattgaagatgcctgaaaaaaattcagattaatcctggatttggcatctgatcatagttgttgtaataattggtagatattaactcagattggatatttataaagcagtaattcgtccttttttatttactctggtaaaagcagatccagagtggttacaccaacaggcaattagtagtttgaatttgctgtcagaagccagctatcatcagtgtgctagatggttgaactctctgctacaaaagtctttgtgcctctatgatacacggctagaacaaaatctattcgggttaaattttcctaacccattaggtttggctgcgggatttgataaagatggagtaggtgctaatttttggtctagttttggttttggttgtgctgaattgggtactgttacttatcatgcacaaccaggcaatcctcctccccgtttgtttcgcttaactttagatcaagcagccctcaatcgaatgggttttaataatgctggtgctgctgcaatggcaatgagattaaaaatgcttgatccgcaacaatctcggttaatacccataggcataaatttgggtaagtctaaaattacaccattggaaacggcagcagcagattatttagaaagctttcgcttgctgaaaaatctaggtgattattttgtggttaatgtttcttctcctaatacaccaggattgcgatcgctccaagatgcagcaatgctcagtcaaattttggaggttctgcaaacagaaaacatggcacaaaaacccttatttgtcaagatagcaccggatttagaatgggaagccatcgctgacattattgatctcgccaaaacctataaactagcgggaataattgccaccaacaccaccatcagccgtgagggactaaaaacccaaatcattgaaaaaaccggtaaaacacctcaagaagaagccggaggcattagcggagcgccattacgccaacgttctacggaagtcatacggtttatttatcaaaaaacccaaggacagatacccatcattggcgttggtggcattttcacagatgaggatgcttgggaaaaaattacagcaggtgctagtctcatccaagtttatacaggtttgatttatgaaggaccaatgatggtgcgccgcactcttgccggtttgttaaccaaactagaagaaaacggcttaaattctatcagtgaagcagtgggaatagggaatagggaatagggaatagggaatagggaatagggaataggtgataggtaataggtaatgggtaattgggttattcatcctcccagtcaccagtcaccagtcaccagtcaccagtcaccagtcaccagtcaccagtcaccagtcaccagtcaccagtcaccagtcaccagtccccaatcaccaatcaccagtcaccaatcaccagtcaccagtccctaattttccaaagggaaaaactccctagacttacgagaataagaccaagcaataccatctggatcacggctgcgactccattcaggaaaatctgggtcattccttcgtttataaactgtactggaataaacacccaaccgcttggctagttcagattgaatcaaagaaccaaaaactaactgttcttccagaggtttttgtacctcctgatgagttgctacatctgtggcttcaggtaataattctggttgtaattcttcctgctgttgcttttgctgttcttcttcctgtggaatgggaggaggtggagctaagagagatcgcgcctctttcgtcacagaccgaggaggaagtttttccactgattcactactatcaaatatgtcacccaaaatactggcagttataaagtagtaggaaggactctcactttctgagtccactacactagcgccaaattcctttgctttaccctccaagtagcgttttgcctgattcccagaaaaattacctttgagagctaaatcaacaggtgtgatctttccctggttttcccgaatcaactgataaaaaagagggttaacttgctcaccccacttttcccatctgtattgatgccaaaggttgaaaaccatcagcagcaacaagcctatcagcaaaaacctccaagtattgacgaccaaaacaatcaaaaacgatatcggcaaaatgagaacgagaaaacttttcccgtaattttctatggttttttcactcatgctgatttttgccaagtgaacttttgcaaaataatattatttattatcttggcaaaaattgggacattttttgtatcccttggcaaaataacagcaaattatttggcaaaagctactgaaataaggaataggtgacagttgacaggttacttatgagagtgaagaaggggaaaatgattataaatgcaaaaattttctctccaggctcttaacaactgaaaatacatacactacgttttactaatatgcttaaattaatacaaaactagcattggtgaatttgccactacgcatgcattatacaaatacagtctagcctggtgtttgactaaattcccatcaatgattgttgcactggactatgaactaaaactgttgcacctttgcaatcggttaagctgagattatatcctatccataaatttcactaaatcaaaagggaagcattagagaaaaattttatctgcctgtcagtaaaagttctaaattttcttgacatagtttatacaataacagataatattcaaggagatttttcccatcaaaagtaatatttataggatttaagcaagattggactaaaaacctgattcttgcctaggggtaattcatgaattacccctgctttggttctgttttgcgtaagtcatcatttatacttaccagtaaaaaaccctgatgttgatgaaaaaatctataaatggacatctgtctaaatcctaactaaagccccataccatacctctttaggagtaaacttgactgatatacagatcaaaatgccattactgggtcatttttattggtagattttgattacaggctgtatttgcaagaatcggaggtgaaacaggttcagttcccaggactcaaatttaatgtgcgagcaatgtttcaggcaattttatgctttgccagaggtaagataaaagctatacatgataactaccattatagatattagcgagcttgtcaattaagaattgctataatctattgttcaatcttacattcttatctattatttaggtgtaaatttctatggttttgccaatgaatcgtctgtctattttcgtagacggaaacaatatgttctatgctcaacaaaaaaatggctggttttttgacccgcgacgagtgttagaatattttaagaacgaacaacctgagacaacattaatcaatgctttttggtacaccggcttaaaagacccacaagaccaacgtggctttcgagatgcactcattagtttgggatatacagtacggactaaaattctcaaagaatattatgatgatgtctctggccgttattcacaaaaagctaatttagatattgaaattgttgttgatatgttcaataccgttgaccagtacgaccgagtagttttattcagtggagatggagattttgaaagagcgatcgagctactacgttccaaaaatacgcatattacagtggtatcgacagaaggaatgatagctagagaattgcgtaatgctacggatagatatatagacttgaacgatattagagaccaaatagaaaagaccgaagcttagtaaaattaataattatttacaaagcaaaagttaaaaactgaagaaggagtctataaccaggagtgagaagaaattattgaggcgaagcatcaccaaaagttagaactaccaaatcatagatttgctaggtatcttaatcccacttatacataagctagtcctatataattaattctaaattctctattctgactcctttattctttttaataaagttcaaggtattttaagcccacagtaacaactcaaccaaccaaaacccaaaaccaatgagcagtcaagcagacagaattatcatctttgatacgacactgcgagatggagaacagtgtccaggagcgaccttaaacatagacgaaaagctaattattgccaaacaattagcccgtttaggtgtagatgtaattgaagctggttttgcctttgcgagtccgggtgattttgaagcagtgagcaaaatcgcccagactgtgggcttggaagatggtccagtgatatgtagtttagctagagctagacacgatgatatcaaagccgcagcggaagcgatcaaaccagcagctcaggggaggattcatacatttattgctacttctgatattcacctgcaatataagttaaagaaaaccagaccagaagtaattgccatcgctgaggaaatggtagcttatgctaaaagcttcaccgatgatgtagaattttcccctgaagatgctggtagatccgatccagaatttttgtatcaagttttggaaagggcgatcgctgctggtgcaacaactgttaacattcccgacaccgtaggttacaccacccccagcgaatttggcgctttgattaaaggtatcaaagaaaacgtccccaacattgatcaggcggttatttccgtccacggccataatgatttgggtttagctgtggccaacttcctggaagctgtgaaaaacggcgcaagacagctagaatgtaccatcaatggtattggggaaagagccgggaacgctgctttagaagaattagtcatggccttgcacgtcagacggcaatattttaactccttctttggtagacctgctgattctgaagaatcattaactaatattgacaccaagcaaatttataaaacctcccgcttggtttccagcttgacaggaatgctggtacaaccgaataaagctattgtgggtgctaatgctttcgcacacgagtctggtattcatcaagatggagtgttgaaaaataaactcacttatgagattatggatgcccaattgattgggttgacagataatcaaatagtattgggtaaacactcaggtagaaatgcgtttcgtactcgtttaaaagaattgggctttgagttgtcagagaatgacttaaataaagcctttattcggtttaaagaagtagcggacaaaaagaaagaaatttctgattgggatttagaggcgatcgttaacgacgaaattaaacaagcgccggacttatttaaaatcgaattggtgcaagtttcctgtggtagcaacgccaaacccaccgcaactgttaccctgcggacaccagacggacaagaattaaccgatgcggcaatcggtactggtccagtggatgcagtttataaagccatcaatcgggtagtgaatgtacctaatgatttaattgagttttctgtgcaatctgtaaccgggggaattgatgctcttggagaggtgacgattcgtttacgttatgaatcccgtgtattttccggtcatgcagccagtacagatattattgtggcatcggctcaggcttatgtgaatgccctgaataggttgtacgctgcattacagcaaaccgtgaaggaagaagtgacagcttagaaagtgtagagacgtttcatgaaacgtctctacattatttaccaccaggtatctatttttgaattaactccaaagcatcagttaatatttctgattcttgtaccatagctgctaattcttctgtttcataacatcctccaaatgcttctaaagctgctcttttgagtgctacttgatatccttgttggagaatttccattaattccgtttgatttaagtaataacttccagatttgcggcgtttattgattttattgatttcccgtattgcattttctatagatatttcccaagaacgggtagaacgtttttcagctttttgtttaattaaatggatgagaagaattacaccataactatcaattttattgattttatcactaaggctcatttcttctaattcatccactaatattaatgcttcaggaattttaccctgttctagaagttgtctgagttcgagtagttcttccatgttatattttgtgcttcatgaaaaacagttattttggttttaactaatatttctgcttactgctatttcaattctaaactaaaaaaactttcccaaagaaaaacccctacctgggttgattgagtagaggttatttactattgttgattatctttaatcatctttcttagctttatcccgtgttagcaacatataaccactaaataggggttgctgagaaagtctttccgtgagggcataggagtcaggagtcaggagtcaggagtcaggaggagatttgaaaatttctttgccatctcttgaaatcccaaaaaatgcacactttttccggtatacccttcaaaacccttgcactaatttctgtgtttatcagcctctaacctttgatatatcaaggttttaggtttattcagcaaaccctaaatagaggtatagacaattcacctgttaacgctaatattgttgaactgtctaaaaagcacattgatgattatgaaaaattatggcgcgaacaattgcgggttgttcaagcagaagataagttttgggattggttatttaaactgggatatattagcaaacaagacaacgaagaaggttatgcccttgagtgtgaagattgtactcaagggttaatgatgatagaaacccaattacatggttcacgtttggcaatgggacaaaaattagtatatatccagtacattacctctgcaccttggaatcgtaaagaaatccaacgtccaccacgatacaaaggtgttggtactgcattattaagatatgcaagattgagaagtgtagaattaggttatggtgggagaattggactgcattcactacagactgcggaacgattttatgaaaaccaaaatatgctcaatcttggtgttgatgaagaatacaagaatctgacatactttgaatatggtattttgagactacaacaataatatcaatataggaacaaatttatgaataataatcacaatgtagcagcagctattgacatactttttaatcctacatctcttcaagaagcaattgaaattgaagataaaaccgactgtgatgtaaccgcagggttagaatggggtttagcagttcccgctttattgcaaaatcctggaatgtttggaaagttgagacagttgcgcgtatcactcaaccgagaactgcggttacttttacaagaatggaatttgggtataggggaaaaaacagctttagaagtagcacagaaatgtttgattcaaagacttcaattacctgaacctgtggctttatcagcactgcaaaatattttaaagcaagatgaattatataatattgacgaatttatatctaatcgggatgtattaaagtcacttttaagtattttactattagatagcgattggcaagaaatagctgtagcggctgcaaattcagtacgagaacaggtaatttatcaagtaggcattaatcaaatttctgcataaaataatgatttaggcttaaatttttctatgaatcacccgaccacatcattaacagaactccgcactgcattaaaacaaatctggggttatgatgattttcgtcctccacagggagaaattgtccaaagtttattatcccaaaaagatgctttaattattatgcccacaggagggggaaaatcaatttgttttcaacttcctgcactcctaaaaaccgggttaactttggtagtttctcccttggttgcattaatggaaaaccaagtagaagaactcaaacaacgaaatcaaaaagctgctcttttacatagtgaactacctacttatcaacgtcgggcaacattgcaagctttagaaaaacaacaattaagattattatatttatcaccagaaactttattcagtcctcctgtgtgggaaaggttatctcatccccaattacaaattaatggtttgatattagatgaagctcattgtttagtacaatggggtgatacttttcgtccagcttatcgccgtttgggtgctgtacgtccagctttattaaaaacaaaaccaccgggtacaaaaattagtatagcagcttttactgcaactgctgatcctgctgcacaaaagataatttctgaagttttacagttacaaaaacctgatagttataaactcaatccttaccggaataatttacatcttaatgtgcgtattgcttggacaccaaaaggcagaaaacaacaattattaaagttcattaaaaatcaccaaaatcaagcaggtttgatttatgtgagaactcgtaaagatagcgaagaattagcagcatggttaacagaattagggtataatactgctagttatcatgcgggattaggtgctacagaaagacgcgcagtagaagcaagttggttaaatggaaaaatgccgttcgttgtttgtacctgtgcttttggaatggggataaataagccagatgtccgttgggtgattcactttcaagcaccacttttattatcggaatatgtccaagaaattggacgtgcaggaagagatggaaaacctgcggaagcgttaactttaattagtgaaccaacgggttttttagatgctgaagataagcaaagacagcagttttttgaacaacaaattttacagcaacaacaaaaagcgcaacagttagcgaaaaagttaccaaaacaaggagaagtaacatctgtaattaaacaatttcctgatggtgcaacggcgctttctttacttcatagtagtggacaattacaatggcttgatccttttcattatgcgatttctgcaaagtcgggaaaacagccacaaatgcaattacaagctgctaaacagatgagtgaatatttgtatagtaaaaaatgtcgttggcagtttttgttaactgcttttggttttgggaaagaagcggaaaatttgcgttgtggacattgtgataattgtaaaaaatgattactttatttgtaataattcaggagtcaagagtcaggagtcagaatatttaataaaaccgtagattatcactagcgtgatttttggcgtaacctttaaaaagctgactactgtccgctgatagctgaatacttacctttatttttgttggcgtttttgttgaatataattacgaaagtcatccattgttaattgatctagccattgatgacgatcttttgtataatctccaaaaccggattcaaatcttagtaaaaatctagcagcaccaccataacctaattcttggattagtgcttggtagcctcttctagaaatttcactggctttcatttttaaaactcctgaattaacttttgattttccattaaccaattgacgggattagctacatttattttaacatcattaatataattccttgcttttcttaacagtcgatcatctgtcgtcagaaagactgttactggcgctggttctgcaaatgctaaatgcaatagacatctccagaaaagaaattatggaacctatttagggtttgctgaataaacctaaaaccttgatatatcaaaggttagaggctgataaacacagaaattagtgcaagggttttgaagggtataccggaaaaagtgtgcattttttgggatttcaagagatggcaaagaaattttcaaatctcctcctgactcctgactcctgactcctatgccctcacggaaagactttctcagcaacccctatttatgggggctgggcgaagcttatgggatatctagatgtctgatttttccgttaaattatcgcccataagcttcgcccctacaacttatgacaaattaatacattctattgtggagatgtctaatgaatcatataaagtaaaacctagtccacataaaatctctgctctagattctatatcttcatttgactcaacaaagatatttgctgcacctaaaaaagctaaaatctgatcacgattaccagaatcaggaattttttgaagctcaaactctagagcatcactgttgactaagactaaatcgccgcgatcgcaatattctagaattgagactactgcttcagtttctaaccgaactcgatactgtacgggatcgtctaaaagacggcagaaacaacaggaatccatataaatagtcaaaggtttactcaatatcaataaatcctctttgaataattgataattgtgaaatttgtgttcattgtaaaaattattcagtagtcattagtcagtttttcagtggttatcctactgactattgaccactgataattagttaaaactgccttaaaaagcgcaaatcgctattatacaaacggcgaatatcatcaatttgatgtaaaaccatcgcaaaacgttctacaccaaaaccagcagcaaaaccactataaatctctggatcataacccacagattttaatacattggggtcaaccataccgcaacccattacttctaaccagcgcccattccactgtaaatcaacttccgcagaaggttcggtaaaaggaaaataactagcgcggaaacgaatgggtaaatcaccaaacatcgcttgtaaaaatatctttaccgtgcctttcaaatctgtaaaagttaaaccttcatccactgctaaaagttcaatttgatggaaaacagccgagtgggtagcgtctacatcgtctctgcggtaaactcgaccaggggcaacaattttaaatggtggttcttctttttccatgtagcgaatttgcaccgatgaggtgtgagtccgcagtaaatttccatctggcaaatagaaagtatcctgcatatcacgggctgggtggtcaggaggggtgttgagggcttcaaaattgtagtaatctgtttccatctctgacccctgggcgacagtgtaacccataccgacaaagatatctagagcttggtcaatgataccattgaggggatgaatgcgaccttggggacggtaaataccgggcatagtcacatctaaagtttcagactctagctgtgcttgaatttgggcagtttctaaagcggtgcgttgctggtcaagactgttttgtaaagcttccttaactgtattggcgatcgccccaattttaggacgttcctccgcactcatttgtcccatgctgcgtaacagcgcccccagttgaccttttttgcccaaatagttaactcgcagttcttccaggcgttctagggtatcagcagcagcgatcgctgtttctccttcctgccgtaatactaaaagttgttcctctaaattgctagtcattcgtgattaattattagtcaggggtcaatcaattttagatttacgattttggattttggatttactccaccctaaaatgtggagcttgaggattttagattggcgttagcgaagcgtaggcagcgcagagagtattttggattaattctgccctgaaaaggccgagtttatcccgaaaattctcaatccacaatctaaaatccaaaatctaaaatttttcggtcagtggtcagtagtcagtagtcagtggcaaaatacaaacaaccaacaactgacaaaggacaattaaccttagcaatgtgccataaaccagtcaatgccacaaggtgcaactttcctctgtttacagtttagaagctagagagcatgagaaaagttttttttgcagttgttaccaaaaacactgacaacagaccatgaactaattattaattaccaatcaccttttccccaataacagatgaaattactaatcagcaacgacgatggaatttccgctttaggtattcgcaccttagccaacaccctagccgaagcaggccatcaagtgagtgtagtttgtccagatcgagagcgatcggcaactggacacggattaaccttacatcaaccaattcgcgctgaaatggttgaatccctgtttcatcctgctgttaatgcttgggcttgtgacggtacaccttccgattgtgtaaaattggcattgtgggcgttactcgattcccccccagatttggtattatcaggaattaaccaaggtgcgaatttaggaacagaaattctttactctggaactgtttcggcagcaatggaaggtatgattgagggcgttcctagtattgctttgagtctcaccagtcatacacacaaagactttcagccagctgccaaatttgccaaactgctagtagaccatctggcagtagaacccttaccagatttaatgttacttaacgtcaacattcccccaatctcttgggaagaaatagctggtgtcactctcactcgtcaaggagtgcgtcgctatgttgacgttttcgataagcgagttgacccccgtggcaaaacttattactggttaactggagaagttttagaagatgtcgaaccaccaccagggttaaatttacccccacacattcccatagatgtagaagttatccgtaaaaatttcattagtattactcctttgcaatacaatcttacttatgccaatggactgcataaattgtctacatggaaatttaactttacttaaatttttctgtatttccaaagactcaagtctaaattaaaaccattaccgtaaaatttacactttaaactagaaaaatcagcagcatttttttgatttatcgcccgctcagtccagcaaccaacaaccatgtctaggatagagaatcaatttacagtgcagttttggggcgttaggggtagtatcccctgtcctggtccacacaccgtccgttatggaggtaataccccttgtgttgccatgcaagtggggggtaaacgtttgatttttgattgtggtacaggagttcacgttttgggacaatctttactgtcccaaatgcctgtagagggtcatatcttctttactcactcccattgggatcatctacaggggtttccattctttactccggcttttatcaaaggaaataaatttaatatctacggtgcgatcgcccccgatggctcaaccattgagcaacgtctcaatgaccaaatgcttcatcccaacttccctgtacccttgcagattatgcaggctaacttgaatttttatactgttaaagcaggtgaaccaattcacattgaggacattaccatagaaacgacacatttaaaccatccaggtgaagccgtaggatatcgagttaactggtgtggtggagcagccgtttacatcacagatacagaacattttcctgatagattagatgaaaatgtcctcaggctatcacgcaatgccgatattttgatttatgattgcacctacactgatgaagaatactcttgggctaaatcaccaaaaattggttggggacattctacttggcaagaagcggtgaaaatagcccaagcagccaatgtgaaaacattggtcatttatcaccatgatcctgcccacaatgatgattttttagataatgtgggtaaacaagcagcggagaaatttcctggtgcaattatggccagagagggattaatactggatgttcctgtattagatgctgtctctaaatcattacctttacgtaagtcataaaataatcgtttaggtgataggtgactcttgacaagtgtgagagagaacagttcttaaatgatgaccgtcatcattggacaagatataacttccccaagacgatacttattcaaaaatgttaaaaaaggtaattttttaggataattactaatttgtaattggtaaacaaggtaatgggtctgctaattttacaccctgcaccccttaccctacacctgctccaagcctcaaatacgtctaaaaggcagaggttggcaaacgctgataacgaaaataaacctaaaatccctgaatccaagtgctaaatttgtctgaggctggttgttttttttgggggtgttctatgtgggttgctgcttctactgaacagctactaacaccaactgctgttgctcttggtaaatttgatggtgttcatcttggtcatcaaagagtaattcaaccaattttacattcaacagtaagtgattctattagttcaaatgggcggggaaatggggataaattaccaaaatactcaccagatcatccctctcaattattaaccgtaccatcatccccaaaccatacatattcaacggttgttacctttgatcctcatccccaggagttttttactggtcaaccccgtgctttgttaactcccctagatgaaaaagtcgaacaactgcgatcgctaggtgtagaacaactggtattattaccctttgatagagaattatctgctctatcaccagaagattttgtcaaaaaaatccttgtccaaaaactgcaatgtcaaaaaatcagtgttggggaagatttctgttttggcaaaaaacgcatgggtaacgccaaagatttgcaaattatcgctgctcagtacaatatacctgtaacaatagttcccatacaaactgatacagtaaattttcccaacaatactgataatatccccaatgatttcacagaagatggtcgtattagcacttcctcaattcgccaaagtttagaattaggagatatgactagagcaacccgcttactgggaaggccttatagtttaactggtgtggtgataacagggcaaaaattaggtagaaccattggttttcctactgctaacttgcaacttccaaaagataaatttttaccccgtctgggagtttacgctgtgcgggttgtcattcacagtgaaacccctgataccgctcctgtggaaaaattaggcgtaaaattaggcgtgatgaatattggcaaccgtcccactgtcaacggtacatactcaacagtagaagtacatttgtttgattggtctggtgatttatacggtaaaacattagtggtagagttagtcaaatttttacgcccagaacaaaaatttgctgatatagaagctctgaaaacccaaattcaacttgactgcaccatagccaaagaaattttaaataggacatactgaatttgaataattacttgggaacaatgtatatattggtgattggtgactggtgactggtgactggggaagaaaattttagattttagattttagattttagattggaattaacaaaaacaatccaaaatccaaaatccaaaattgaattaccaattaccaattaccaattaccaattaccaattaccaattacctaaagagaatgagagaaaaaattgacgctttaacccaaaatctggctcgtaccattgtcggtaaaaatgaagctatacgtttagttttagttgctttgctaggtggtggtcatgctttattagaagatgtacctggtgttggtaaaaccctactagctaaatctttagcgcgttctgtagatggtaaatttcaacgtttacaatgtacccccgatttactaccaacagatatcacaggtacaaatatttggaatcccaaaagcggcgaattttcttttatggcaggtccagtatttgctaatgtcttattagctgatgaaattaaccgcgctactcctcgcacccagtcagctttgctggaagtgatggaagaacatcaggtgacagttgatggtgtatcccgtgctgttccgcaaccgttttttgtgattgcaactcaaaatcctgtggaatatcaaggaacatttcctttaccagaagcacaaatggatcggtttatgttgtctttgagtttgggttatccttcggaaacagaagaactacaaatgctgcaaaatcttcaggaaggtgtacaagttactgatttacaaccttgtattactttggaagaagtcgcacaattacgtcaactttgttcccaggtaaaagtagaaacttctttacaacaatatattttagaattggtgcggactactagacaggatgaggaaattactttaggtgttagtcctcgtggtagtgtggcattacaaaaagctgcccaagcattagcttttattttaggtagagaatatgcaatacctgatgatgtgaagtttttagcaccttatgttttgagtcatcgtttgattcctagagggggaaggaatgcgaaaacgatagttgatagattattgcgatcggttgccattccttaaaggtaacaggtgagccactgcggtggacgggtttcccggcataaagcaagtggcgaaccccgaaggagtgacaggtaacagatgtaaaattttgtttttgtatagttacatcttgcacttgttacaactataataaatttattattggctgatatgagagttgctaattatgcagaaaattattattaaaaatttcgctgctattgaatatgcagagattgaagttaagaaaatcttagttttgattggtgagcaagcaagcggtaaaagcacaattgctaaattgatttatttttttcaatccataagagatgatttgtttagtcaaatttatcaggatacacaaaaagattattttgatattacttctgaccttatatttcctataagagaaaaattttacgattttttcggttctacatttcatttgcctgattttgaaataaaattttattacagttttgagaatgataaatatctcagattaacccttgatgataggaaaaaactttatcctaaatttttgaactccaattttttaaatgaagattttaaatcttctgcaagtaagatgaaaaagctttttcaacagggtttaactaccaatgctattcatgaacaattggcttttgatcaaaacagaattaaatatgttcaaagactttctagtttattaaatgaattgtttgaaatttattatacaaatccgctatttgtaattgcaggtagaaatgcaacagtaagctattctgatttttttgaaaagtatttattcgcaagtgttcagaataccatagagggaaatagaagaaaagggtttcaaccgaaagaacaaactatagatgaaactttaatgttaaagttcatggagagagttggaaaaatcaaagataaatttaaaaaatttgataattttgaaggactaattgaaatttatgaagaaaccacaatcaagcaaaaattatatctaatcaacaatcacatagcaagaatcataaaaggtgaataccgcattgataacagaggagaaaaaattgtcttcaaccaggaaacagaggaatatattgatctttctaatgcttcatcaggacaacaagaagtgataagaatattacaagatattttcctgaatatccttgatgatgtaaaagtattaagaattatagaagaaccagaagcacatttatttcctattgcccaaaaagaactcattgagttattatctgtaatggtgaatcatgatcaagataatcaactcatcattactacccatagtccttatatactcacagtttttaataatctcctatttgcaaatagagtagtggaaaaaaatccctccgcagaatcagaagtagcagaaattatccctaaagactcttggttaaaagctgaggatttttcagcttattcattaggtaatcaatctgtttctgaaacaacgcattattgtcaatcaatttttaatgctgaaaaaggtactattcaacaaaattatttggatactgtttccgaaattttgggtggtgattttcagactttatacagtgtccacgctagaacttttaaaagaagatgagcaaatttgacgatattaaagaactgctatcaaatgcgtttcctaagtttcctgatattgtacaaatagaattgagagcagagttttctgttatagactataaaggacaatcttttattgtcatcagtattgatttcgatgataatacatttattctaaaaatcaatggtgtggaaactataattaatggttttgatagcagcaaattatttaatatcattaatgctacgggagttgcttttattcctattgatggtaaacagggacttttaggatttggtaattctcattgtgattttgtattttttgatgaaagttatttctgttttgtacagttcaaattaaatgcaaccagtttgaggaaggtaaacaaaaatagagtagatgcgattagacaattaaaaaatacggcgttgcataatagagggatgaatcggcgtttgaaaccgttgaaaattcgttctaaattgggcgaaatcatcccatgattcagcaacgccaaaaatactatagatttatttgatgataaactagaaaggaattatgcagggttaaatttagaagcttatgtttgtactcctgaattttaccctagataaaatgccagttggcaagcattagcacagaattttttagaagattatggtattccactttttgaaaggaatgataaaacctgcaagtaaatagaaactaatgcaacaaattataataaaatctgtctaaatatcaggtatatacaaaaaccaaaatattcacttttaccataattctatttatgcctagtatgtttaaagctaaatcatcccacaaaaaactcaaacgccaactactgatagtcatgctgattcttttcggttggagtgtcgccataggatttatactaggtctagccaccagcacccaagcagcaaaccctccggaaattggtacagttgacgtagtacgcgcacaatataagttaggaaaagaattatatatagaaaactgttcaacctgtcatctagctttaccaccagaggtatttcctacccaaacctggaaaaatatcttggaagactcccagcactatggcgcaactattacgcccttaataggaatacaacgcaatttagtatggaaatatgtttctaccttttcccgtgtgcaactgcaagacgaagaaacaccctatcgtttaaacagatcacgttattttaaagctttacatcctggcgtagaattaccaaatcctgtaacaatgggtagttgtgttagttgtcatcctggtgcaaatgaatataatttccgcaaactgacaccagagtgggaaaaataaattggtgataatagttgatagttgatagttgattgggaaacatcaaattgattacccagtcaccagtcaccagtcaccagtcacctgttctagtggcaaaatgatactatgaaagaagtttaactataagatatgagttaaaaccaatcacaaaatcgggtgattggtaaattttcatttcggttttgagttgattctcattttctacccatccaccaccaaaacggttgggttgagttaagcgtctataattatatagcttttagctaaacctttaatttccattccccttgttctagttctataaactgccatgctaaaactattgttgggcgatcccaacgctcgtaaactaaaaaaataccagccttacattacagaaattaatctcttagaggaagaaattaaagcactctctgatgatgaattaaaaagtaaaactactgagtttagacaacgtatatctaagggtgaaagccttgatgatattctgccagaggcttttgcggttgttcgtgaatctgctcgacgggtgttaggattacgacattttgatgtacagttactcggtggggcaattctgcatactgggcaaatagcggaaatgaaaaccggtgaaggtaaaaccttggtcgctaccttaccgagttatttaaatgccctcacgggtaaaggtgttcacgttattacagtgaacgattacctggcacgtcgggacgcggaatggatgggacaggttcaccgcttcttgggtttaagtgtggggctaattcaagccagcatgagtcccacagaacggaagaaaaactatgactgtgatattacttatgtaactaacagtgaaatcggttttgactacctgcgggataatatggccacttctatggcggaggtggtgcagcgtccgtttaattattgtgttattgatgaagtagattcgattctgattgatgaagcacggacaccgctaattatttctggacaggtcgaaagaccgacagaaaagtatttacaagcggcagaaattgcttttactcttaaaaaagatgaacattacgaagtagatgagaaagcacgtaatgtcctgttaacggatgaaggttttgcagaagcggaagaccttttaaatgtaactgatttgtttgatcctgaaaatccttgggcgcattttgtgtttaatgcgattaaagctaaggaactatttctcaaagacgtgaattatattgtccgtaatggggaagtggtgatcgttgatgaatttacgggtcgggtattaccaggacgacgttggagtgatggactgcaccaagctattgaagcgaaggaacgggtagatattcagccagaaacccaaactctggcaactattacctatcaaaatctgtttttgctgtatcccaagttgggaggaatgacaggaacagcgaagacggaagaggtggaatttgaaaagatttataagttagaagtaagcattattcctaccaaccgggtgagaaaacgccaagatttatcggatatggtgtttaagacggaaataggtaaatggcgggcgatcgctaaagaatgtgcggaaatgcacgaacaaggtagacctgtgttagtgggtacgaccagcgtggaaaaatccgaacttcttagccgtctcttgaaagaaatagaaattccccatgagttactgaacgctagaccggaaaacgtggaacgggaagcggaaattgtcgcccaagctggacgcagaggggctgtaaccattgccaccaacatggcaggacggggtacagatatcatcctgggtggtaactctgaatatatggcgcggttaaagttgcgggaatattttatgccccggatcgtgtccccagaagatgatgagtttagcattcaacgggcttctggacttcctaccggtcatggtggaggacagggttttgtgcctggtaaaaaggtgaaaacttggcgtgcttccccggaaattttccccactcagatatcaaaggaaacagaacaactgttaaaagaagcggtagacgtggcggtaaaagcttacggtgaaagaagtttaccggagttggaagcggaagaaaaaatcgcggtagctgcggaaaaagcgcctactgatgatcctgtgattcaaaaattgcgggaagcttaccaacacattaagcatgagtatgaagaatttaccagtagtgaacatgatgatgtggtgaaccgtggcggtttgcacgttattggtactgaacgccatgaatcgcgacgcattgataaccagttacgcggacgggcgggcagacaaggagaccctggaacaacgagatttttcctcagtttagaggataacttgttaaggatctttgggggcgatcgcgttgccggcttgatgaatgctttccaagtagaggaagatatgcctattgagtcgggtatgttgactcgcagtttggaaggcgcacagaaaaaggttgaaacctattattacgacatccgtaaacaggtgtttgagtatgacgaggtaatgaataaccaacgtcgtgctatttatgcggaacgtcggcgggtattggaaggtcaagacctgaaggaacaggtgattaaatatgccgagaagacgatggatgacatcgttgattattacattaaccctgatttaccttcggaagaatgggagttagagaagttggtggataaggtgaaggagtttgtttacctgttggctgatatgcagtctagtcagttggaggatatgggagtaccggaaattaaggctttcctccatgaacaagcgcgtattgcttatgatattaaggaagcagaaattgatcaaattcaaccgggtttgatgcgtcaagcggaaaggttctttattttgcaacgcatagatactttgtggagagaacatttgcaacaaatggatgctttgcgtgagtcggttggtttgcgtggttatggacagaaagacccgctgattgagtataagagtgagggttatgagttgttcttggatatgatggtgaatatccgccgtgatgtggtttattcgctgtttatgttccagcctcagcctcagcctacggtgcagacttcggagatggtttaggtttttttcacgcagagacgcagagagttgttttctgcgtcttttgttttaggaggaattaaccacgaagacgcgaagagcgtgaaggaagaagaggaagaggaagaaaagagaaggttatttattcagcaaacatttgcgctaatctcatgaaatcaagtaatctcaagtcccaaaagatcccgttacaagcaaattctctagaatcaacaagacaggaaatattaagaaggatacaagcatctggctatcctccaaatggcttacttttaaactctagctttttaggtaaaaatggtcaaaattacgcagcagatattattgttttttctcctgatgctgtcctgcatatagaaccattattagtggtcagcatagctaaaaatggctttacctttagctatgaatgggtaaactcatttcaagactcaggagcaaaaaaaataatttggtttaatggtaaaatcttaaagcttttctatcttaattctcaagaaaaatatcaagaacttcctccatttttacctaattgggctgaaattaatcaagaaaatagtattttcagtcaacatttcaaatctaatttaactcctgcttatgatttaaagcaaattttatcagacttgcatgatcatttttatggtaatagtaatattcgcattccttcccgtttgggtacagaaattcaaaaaataattttattgaaaaaatttgatgaagaacaacctcataacagaattaatttttatattgcagaaaatgaactaccacaggggttaaatggtgataaaattataccatctgatgctgttgtctcagtcgcaaatcgtctgcgtaaattacttactcaatatgatttagaaagaaatgaaaagcaaaaattaggaaatttagacttggatgatcaatccctttatcatgctgtttttcaactagaaagattatctttgaaaaaaactcctacagatgttttaggtgatgcattagaagcatttagagtttatacagttaaaagagaaggaggtcagttttttacccatcgttatgtagtagatttagctttacatttagtaggatttacaggagaaaaacatcaaacattagcagatatcagttgtggaacttctggttttttacatagtgcaaaaaacattattattaataaagctcaagcagaaagtataattaccgaagaagaacaaaataatttagttagtgaactacttattgggttagaagtagatcaagacttggtgcagatatctaacacttcaccggaattttttagcctacctaaaatgttggttgaaagacaagatagtttagctccttatggaacttggaaaaaggaaatatctgagcgtattcaaccaaaatctagatattttatggtaggaaatcccccctttggtacaaagattgtagttaaagatacagaaacattaaaaagattctctttagcttatgcttggaaaaaagcgggtcataaatggcaaaaatcaaccgaaaaaattgtacccagatcaccggatattttatttattgaacgcaatttagattttttaattcccggaataggtagaatggtattagttgtaccatatcaaatcctcagcggacccaaagaaggttttgttcgtgaatggttaatgacaaattgtaaaataattgcaattgttgatttaccggaagatacatttcaaccctatacaggaacaaaaggatcacttttagtagttgaaaaaagattgaatcctaatcctcaatggagagatgaactagattatccaatatttatggcctgtccccaaaaaatcggacatgacagacggggaagaccgatttttaaaaataatgaatcggcagaaatagatgttgatttacctgaaatttccacagcttatgatgcttttttagctggaaataatcccagtcaagtatcggaattagcttttactatctcttctcaattcatcaaaaataatgccgatattcgcttgaatgctgcttattatcgtccttcatcaatagatttacgcgataagttaattacaattgttaagcaggatttatctttaacaattactccattaggagatttagttaaagatattttttaccctggtagatttaaacgtgaatacacagaagatttagaaaactcagttccttttttgggaggttctaatattacacaactaattcctgtcacagaaaaaagaattttaaaagacagtattcactatcaacaattagctttaaaagcaggatggattttaattaccagaagtggtactacaggaatagtatcaagtgtgcctcaaaactgggaaggttttgcagcatcagaacatattattagaataattcctgatcctgaaaagttgcatcctggttatttatacggttatttgaaaagtgaaattggacaaaatttactcaaaagtgggatttttggatctgtgattgatgaaattaattctagttatattgcatcaataccagttctccatcctcaagataaaagttatgctgataaaattggtgcaaaaatgtatgaagctgatctactcagatatcaagcgtcaattttaattcaagaaactactcaaacaattgaaaatctaataatttagatgtgtagttacttatagtttatatcctgcctttttcgtgataacctttaactactctggtcatgagttctagtagttcatctaacgtttgattaccttggatttgattacttctttctaacattaaaaatgtattttgcggggtatgtttaccaccacgatccaaaggaattaaatgaccggattgaattgttcttggtgtatcaataagctgagaaaattcaatgggaattaattgtataggatcaagatatattcccggttttacggaatgttccaacagccaaataaagctatcttgaatagaattatctggtaaactaggtgatccattcattgataaagcttgtagaaaatactttacttcaaccagtgttgcatccacttgtgaagcataaaatttatgttctgatggaagttcccagcgatttattctatttccatcttttccatcttgcggcctacctggcacacgactagatgtaggtttccaaggtgcagaacgtctccctgcatcacgaaattttgtgataatagcacgaatttttttctcttcatatcctgctgataataatagtgttttaaataaactagaagttaacttgataagttgtgttactgcctctacagaaatattatattcttgtacagctaattttttgatattttcagaaattgcctctacaggaaaaacattgtctttgacagatgaatttttaatttctgctatggttttgtctattaaatcattctcatctctatcttctaattttttaaatatctgaacttttttgttacttaaattctcatctttcttttttgccataattgttactcatcttgaaagttaaacaaatcaacataagaaacatggagaaattcagagagtttttccaaggtatcgaaagaaggtgcattaataccacgttcgatattactaataaactcaacagaaactcctattgcttcagctaattgttcttgagttaaatttttcaatctacgtatttgccttaatttacggccaaattttactttgagattagtttttgtcaaatctactatttgtaaacagataaaaataataccgtagtttaaattactgtaacacgaagtataactacgagttttgcctagaaaagtatatatagtaaaatagtcaagaggtttacccttgactgacttttattttttaaataatttggtcaaactttgactataaataaatatatatataaagaattattttacttaccccagtttctagacatcatctaataaaacataatcgccattttccgctatttctataaatgctttttcccaaccttttcttacttgtttaactgggcgaataatgaaatgatttccttgaacttctatttctacttctgagttaattccgcttttttataacagtgttttaggaataaaaacaccttgcgaatctccgattttgacaatttggattttaatagctttgcccattgtatgtgattgagtaaatatattattgtatcacacaaatattataatcatgttatgatataaaagtgtatggagaaaagatccatgactactttagtgaaagaattattaagcacatttgatattttaccagaatccgaaagattagaaatagctgtggagattttaaaacgggttacaaatttagactttccacctttatccgatgacgatttagtgtggaatgctgaagaactctttttataattatatcaacaagaaacagattatgagtacccctagacgtggagaagtttggcttgttgatctgggttacactgcaaaagtcagtccaacagtatttcaaaattcaaggaaaaaatattatgaatgtatctattgctgaccaaattattgaacaattaaaaataatgcctcaagacttgcaatatcaagtcctggaatttgcccgcagtttgacaaatttaaaaatcaaaggtgttcccggtaaagaattactaaattttgcaggttcaatacccaaacaagatttacagctaatgagtgaagcaataaaccaagattgcgaaaaggttgactttgatgaatggtagatacttgctcgatactaatattattattgctttctttgctgatgaaatagctgtcaaaaacaacctttcacaagcaactgaagttttcattcccagtattgcagtaggggaattgttttatggtgctagaaaatcgggacgttcaaaagagaatatagaacgtattgaagaatttatcgccaaaaatactgtacttgaatgtaatacacaaacatctcgaatatatggtgaaataaaaaatcagctacgtttaaaaggtcgtcccttacctgaaaatgatatttggatcgccgcaatgagtcttcaatataatctaattttagttacacgcaatgctcattttcagggtctgtattcttagtcacaaaaatagtccgtcaaaaaaccattgtccgtataaaatcttccttgtccatcccttcgactacgctcaggacaagccttccttgtcttcctggtcttgccttcacagatcatattaaaaacctacccctgtgaggtggggtcatcgcacaaaatcgcattgctccccaactgttaacagaactgcggttaatcggcaatgcttttcccaactagctcagtgggggtgataaattaggagagtccagagaataaagcccactgcgtcgtcagcaagtggactatgattttaagaatatattttcaacaattctatttgtaatcgccaatggttcaacagccgatgtcgccaactcaagaaactcaaaacctagaaaaaccagcagagaaaatctatttaccccgcaccagcgaatcagaaacattaaaaaaaattcgccataccgcttctcacgtcatggccatggccgtacaaaagctgtttcccaaggcgcaagttaccattggtccgtggattgaaaacggtttttattatgacttcgataaccccgaaccctttagcgataaggatttaaaagccatccaaaaagagatggtgaagattattaaccgcaaactcccagttattcgggaagaagtcaaccgcgaagaagcaaaaaaacgaattgaagcaattcaagaaccgtataaattagaaattctcgcagatattaaagaagaacccattaccatttatcatttaggtgatcaatggtgggatttgtgcgcgggtccccacgtcgaaaataccaaggacatcaaccccaaagcgatagaattagaaagcgtagccggtgcttattggcgcggagatgaaaccaaagcccagttacaacgcatttacgctactgcttgggaaactcccgaacaactagcagaatataaacgccgcaaagaagaagcgttaaggcgtgaccatcgtaaactgggtaaagaactcggtttgtttattttcgccgatcctgtcggtcctggtttacccctttggactcctaaaggtacgctgttgagaagcattttagaagacttcctgaaaaaagaacagttaaaacggggttatttacctgttgttacacctcacattgccagagttgatttatttaaaacatcgggacactggcaaaaatacaaggaagatatgtttccgatgatggctgaaaatgaggaagctaaagccattgaacagggttttgtcctcaagccaatgaactgcccctttcatatccaaatatacaagagtgaattaagatcctatcgggaattaccgatgcgtttggcggaatttggtacagtttaccgctatgaacaatcgggagaactgggtggtttaacgcgggtacgtggttttactgtggatgattcccatttatttgttactcctgaacaactggatgaggaatttttgaatgttgtagatttgattttgacggtgtttagaagtctgcaactgaagaattttaaagcgagattgagtttccgtgatccagccagtgataaatatattggtggggatgaagtttgggataaagcggaaggtgcgattcgtcgtgctgtgcaagaattgggaatggactattttgaaggtattggggaagcggctttttatggtccaaaactcgattttatcttcagtgatgccttagatagagaatggcaattagggacggtgcaggtagattataatttacctgaacgctttgatttagaatacgttgctgaagatggttcgcgtaaacgtcctgttatgattcaccgcgcaccatttggatctttggaacggttgatagggattttaattgaagaatatgcgggtgattttcctttatggttagcacctgtgcagattcgacttttacctgtaggtgaattgcaagttgattttaccaaagaagttgctgcgaaaatggtagctttaggaattagagccgaagttgatttaagtggcgatcgcttgggtaaattgattcgcaatgcggaaaaggataaaatcccagtaatggcggtagtaggtgcgaaggaagtagaaagtaattctttgagtattcgtacccgtgcatctggggagttgggagcgatatctgtagatgaagttgtgaataaaatgcaggaagcgatttctaattttagcaacttctaataattagtaggttgggtagagcgcaagcgaaacccaacattacaaaaaacccaacctatgatttttttgaactgtgtgatctcaaaattttcctaaaattagattacgattatcatcatgccagcaaaggatatttatcacgatactttcaggaaagctctggaaaaagacgattggataattacagatgatcctttgaaattaacttggggtaaaagagatttttttgttgatattggtgctaaaaaattgatagccgcacaaaaaggagaattaaaaattgcggttgaaattaaaagttttgcgggtatttcccaagccacagaattagaaaaagcattaggacaatatatattatatcgcaatattttagaagaaaaagaacctgaacgtttattatatttggcaattacaaaatcaacatttaatgatatattctcagaacctattggtgatttagttatccataaaaatcaaattaaactgatgatagttgatgccaaaaaggagataattatcaaatggataaattaactaattatcgtcaaattattgaaaaagtcctcacagaatatgctgctataccctatcattatggagatttaaaagccgaagtaattattagcaaggacgaaaatcgttatttagtgattacatcaggatgggaagatgatactagagttcatgcttgtattattcatatagatattattgatcataaaatttggattcaaagtgatagtacagaggatggaatagctttagatttgttagcagcaggtattcctaaagaagagattgttttaggatttcatgaacctaacgttagacaatatacaggatttgcagtagcttaaattctcaatcctgttaatcctttaatcctggacatcctgattctgacaaaaatcaaaatctagctgtaaattgctaatctcttttcagggcgggatatttaccaatagggttttatttctgcaatgggtaatagtaaagtatggcgttgcataatagagggatgaattgagggttgatacggtgcattgtccatactgtgggtctactgagattagaaaaaatggaaaacgcagaggtaaacaaaatcacatttgcgtcaaatgtggtcgtcagtttatagatgtttatagtccaccaagaggatactcaaatgaagtgaaacaagatgcttaaaatcctacgtcaatgggatgggatttagagccatagaacgtactcaaggtgttcatcatacaactgtaatttcttgggttaaacaaattggtgagaaattgccagatgcaccaccaattgaggaaataccagaagtaggtgaattagatgaattagagacttttattggctcaaaaaaaacaaaatttggttgtggacagcagtaaatcactttagtcaagggattttagcttgggttttgggagaccacagtgcggaaacttttcagcctttgtgggatattgttaaactctggcaatgctatttttatgtcactgatggatggaaagtttatcctagtttcattcaaccagaagaccatattgtgagtaaaacatatatgactagagttgaaggagaaaatacacgtttacgtcattatctagcacgtctacatagaaagacattatgttattctaaatccgtagatatgcttaaatattcagttagattattacttcattatttgaaatataatcaaatacccgtgttcaactaattcatcccacacttatgcaacgccaaatgtcaatatcatattcactattaagataaatcccttttaataaatgtgtccataatacaattaaacggctttcaacttcagccctatccctacccgccaagatttccatctcctcaattaaatgttccacatccaacccatgaaaatctcgcgccttgagtttgaggatggtatcttctaaccatagatactgatcctgatcataaagaccttctgttactaattcaatctctgtcatggatttaatagatttaatgtaatagcgcgatcaccacttataacataactaaatcttataacatcagctacatatacccttaccaatactaaccataggatttttctaggtatttattctctctatatgtaaagagggtaaaaatttataaagaaattgttacaaattccagtacaatgtcatcattacacaaataagtatttttctctattgacatgatggcggaacaatttccttggctgaccgcgattattctcctccctctccttgcatcctttctgattcctgtactacctgataaagacggtaaacttgtccggtggtatgctttgggtgtaggtatcgctgactttgcgttaatgtgctatgctttctggacacattacaatcctgctgatgcgagtttccaactaatagaaaattatgcctggatgcctaccctgggactaaactggtctgtggcagtggatggtatttctgcgcctttggtacttttagcaggttttgtcaccaccctttctatattttcagcttggcaagttgaccgcagaccacgcctattttactttttaatgttggtgctatattcggcacaaataggggtgtttgttgccaaagacctgatgttatttttcatcgcatgggaagtagaactactccctgtatatctattagtttccatttggggtggtcaaaaacgacgctacgccgcaaccaaatttatactatatacagcagcagcttctatatttatcttagtagccgccctcgcaatgggtttacaaggtgacggtgttctcagttttgatatcagtgacttagctactaaaagttatcctctcggtttacaattactgctttatgcaggtttgtttgttgcctttggggtgaagttggcaattttccccttacatacctggttgcccgatgcccacggtgaagcatcttcacctgtatctatgattttggcaggtgtgttactaaaaatgggcggttatggtttgattcgcctgaatatgcagcttttacccgatgcccatatttactttgcaccagttttagctattctcggtgtggtcaatattatctatggtgcgttaaactcctttgcccaaactaacatgaaacggcgtttagccttttcttctatctctcacatgggttttgtactgctaggtttagcttccttcaccgatttagggatgaatggggctatgttgcaaatgatatcacatggtttaatcgcctccgtgttattcttcctggcaggtgtcacctacgaccgcacccatacaatggtgatgaaggatatgggtggtattggacaagcgatgcctgtggtgtttgcgttgtttactataggtgcaatggcatctctggctttacccggtatgagtggttttgtgggtgaactctcggtgtttgtgggtgtaacaaccagcgatgtttatagttccactttctgcacagtgacagttttcctcgccgctgtgggtgttatcctcacacctatttatctactttctatgctgcgtcaggtattttatggtaaggatgcagcattgatttgtgatatcaataatggaggttcggaaaacctggaagatgaaggtactgcttgttttggtactgattgtttattaccaggtcaatcactttacactgatgctagaccccgtgaagtgtttattgcagcttgttttctagttttaattatcggtattggtttctatcctaaagtggcgatgcagatgtatgacgctacaactgtggctattaatgcccaggtacgtcaatcttacactgtgatttctgaaactaagcctggtatttatgctgggtttgccagtccaaaaattgctgatgttgaggtcaactcggttttggcgactgttgaataaacctaagaggttgtcttaaaagttttcggcgaatataattcgctactacacaagcaaagtccacctgcgtggactaacgaaaaattaaggatttgaaacctgcataggcaggttttgtctgtagtagatgtgatttctaatcgcccaagttagacttttcaaacatcctctaatcttgcgaacgaaattaagttttttattgtttactcaacaaaatagaaaatttttgatcataaattaatcccactacttttactatattggtagtgggtattttttatagtgaagcattaaatttaagtgaaattagctaactcatctgatcttgagatatcagatataatctgaacttcaggttatcaagtcagtagctagttgcaattaaatataagatgtgagatgggccagacagaccgtcaacaggctagaagcctgttccactatctaacagttaattaagcctacttacttatttctattgagagtgggacaaaatttgtaatcggcgatcgctctcttgatatctagtcaaaaacattgataaaagaaagagtaatcttaaatttgattacccctttttttatatcaattttgatatctaggaaagcaatttgtgagtgtttttctgtgaaatgtgggttacgaattaactgccgccaccaccactactttcactaattactggaattacttcttcatactcgttatggtatgagcagtttgtacagtggtgggttactcttttctttcctgtactgctagtcgttgcagcaactaatattgtagaattcctgtttagcgtaaatttttcacattcaggacattttcgattattgattgctgaaaagaggtgtttgtgcggcagcatgattgagagaaagtgcaatagtgaaaaatagagcaacgcaaaatagagacaatcttcggataagtttaatccacataatttaacctattgaatgtagttcaagaattatttatgaagcggaaatttcacaaatctccgcacaataattaaaagcttctctattactcaaagtcatagtattgagagccagaaatcagttgaacttgacgctaacgatgatatcattgaaatctttatcaccaccattggtcaagtcctcaaatccgaagacattgttacctaacatccgcacatggtctactttgtccgaatttgcaccaagatacgggaagtaaatggcggggttattattggggttgctatcaagaagttggtctggtgtgccattgacaatgagaaacggcgcaaatattgagccaccttcaaactgacccgtaaagcttgcttgaccttgattgcccacactcaggttaataccaccgacacggttctttaccgcagcttctccataacctgtttgtccgggtagcaaatcccctataccgtcaccgttgatatcaatactaccgttggcatcagctacactaaagaacccaacaaagttgttatatgctgcctcacggttaaccgtaaatgttgccgtttgcgtatctgttagcccacgtaagtcaagtacctcaccttcctgctggtcttgtagattagtacctataggtttatcagcttctgttcctagttgcatttgcaacactgcatcattgaactgaccactcccaggactatcctcaaaacgcaggtcaaaggtgctgttacctacgtcagaaacttgcaaggaggcaggagaggatagcaacaattgtgacagtggtactgtaccattccttaaaccatcgagagtgccgttttgtactaataggaggcggaagcgaatacctgcatcgaggtctagagtccgggtgaggttagtatcaaatccgttgggcgaatttcctaaagttgagaaaatactgcgagaacgtgacagcaccgcttgagtgtaattagaatcgttgggcgcaataccgtctatagttccttgatcatcgtctacagtaaatagtccaatttcgttgacaacactagggtaatattgccacttttggcaataccattgaaacttcccgtgatgtaggtgttaccagaactatcgacagtaatgccgtgagcaagtcctaagttgacaatttcatagacaaaactatacttatattgacaaaaatcaatatatttttaggaaaaaatcaactacttgatatataatacggtgatatcaagtattgaattgagactattgccgacgcgaaaaccaagcaatgatggtggtagtctttttgagaaacttaattggaacacaatcgcgtctggctaaggcgtgaaagtctactgagggataactgctcccatgctcccgttgaagtagaaagtaaagtctagttttgtctaggttttatatagcagcagagtcataggatgtaccacccaatttctttgcccagaggaatttgccactactatcgagcttggttatgaacccatcactaccacctgcactggtaagggtaatgtctccgaaagtagcagtatctgaaaaatatcctgtgatgtaactattacctgctccatcgctggcaataccttcgccatagtcagttgctcatgatagatatgtattagttgctagtaaatttcttttgccgttaatttttcggatcaaagtttagtttgtggagtttctgcttgacgaccagtgattttttctaactgcgatcgcatttctctaccagtttctcgctcgataaatacccttaaggagttcacacttttttcctggctggtgtcttggggagtagttgatgtatagtcaaactcaatttctgatacctttttgttgggagtgagtagcaaaccagcaactccaaataggatcgtgttgactatcttcgcgcctgtgttgcctttttcatcttcacgatattgaattctacccacgctagtcggggtaatctgtacggtacgagtagattttttatcgttaataatttccagttctttgccagtttcttggtaaatggtaatgcctgtaccattgacagtaatcttacaaagtcctcggctttctacctcattatttttaaatatgcaatcacctattttgccggctcgatcatccaaggctataggcgtttcatatccttgacattgggaattgaggggaaagcgagaacatagctggtatagctttcttgcatccaacccatgagcagtgggtacaaatactgcctcaactagcagcaagggaataaatacaatccctaagaatttacttttttgcataattttctgtgttctatttggaattgtttacaatctgtctctgctacccagatttttttcttcggtgtctgcaatattgagaatttctatgatgtctttacgcgccaaatccggatctttgtttagaagcccaaccgcttgatatgtcattaactttgctttacaattgcttggttttttccccatctggaggtgttttagcaattcgagaaaaagacattacgagaataaaatcattgttaccaatttttccaacttctggcacgataaatccattttgagtccgattaccgtcaactccagctaaatattgcaatagtcccatctttttggaattcataattcatccctaagcgatccaagaaggctgtaaccggggaaggtttggtttgagcaaatgcctgagttgataacgaagccataattgtaaccgtagcaacagaggttgagataaagtgcttcatggtcttttccgtcgtctttgaggaatatacttaatatcactgatgtctattaactatttctagttcagtttcggttcactataatactgatctaaaattgagcttgacagatttagcacaagcccctaataatctctcatgcctagtctcaaactctcagttaccggactgcacatcatcaaacaggctcggaaagaaaaggatggacgattgataatcctttttggttagaaactgcgagtcaaattctcgaacccggacggaactgggaaaatgcggaagtttttgcaaatagtatatctttacctggaaacgttttctatcacaattttccgttatgggggtgactggagtgatgagatttgaggggggcaacctcaaaaatggtaaagttactatggttatggtacgtcgtgattgtaattccggtgagtttgtgtttagcccaagcgatcgctctctaaaatgtcagttttagtgttaaattagccttttccatgagatgctattttattgattaataaatatcggcaaatgtctactatttctactgttactgttaaggtccctgctactactgctaatttaggtcctggttttgactgcatcggtgcggctttgcaactgcacaatgaatttaagtttactcgcaatgatggcggtttggtgattcaggtttctgggacggaagcggataaggtgcaaactgatgaaagtaatctgctttatcaggcttttgtcaagttatatgaatatatccaggaaaaaccgccttctgtgaaaattgagattaagttgggtgtacccttagccagaggtttgggaagttctgctactgctattgtgggtggtttggttgctggtaatgcgttagcgggttcgccgttgtctgatgtgcaggtaatggaattggcgatcgcaatggaaggacatcctgataatgttgttcctgcttttttgggtggatgtcgtttagcggccactggtttgaatggttggaaaatttgtgatctgacttggcacaaagatattatacctgtggtggcaattcctgattttgagttatcaacttcggaagcacgtaaggttttacctacggaaataagtcgggctgatgcgatttttaatgctgctcatttgggtttgttgttgcgggctttggcaacgagtagggaagaatggctaaaagctgctttgcaagataaattacatcaaccctatcgtaaggctttgattcctggttatgataatgtagaaacttctgctttagctgctggtgcttatggaatggttattagtggtgcaggacctacgcttttagctttgactgataatttacatacacaagctgtagtaactgcgatggctaatgcttggaagcaagagggaattacttctcatgtgcgatcgcttcccattgatgtgcaaggggcagttattttgtaagcggtgattttttgacactctgcgtcctaaaggatcgcagattctttagatcccttgcggtgtctaacaagcgaggtggttctctccctagcctggatttttcattttcttaaataaagattcatattgctgtgttgctgctgctgataatgggataataaattcgcttttctccaacaattcctgattagttaataataggttttgtaatggttgggaaatatcagaggcagcaatatttgtggtaataggcgtgttcgttttagtcaatatagtaatttccttagctatatttggttgccaacaaaaattaatccattcggatgataaattgctttgctcaactcctgctggttttacccataagtcagcccaaattgctgttcctgattggggaattatagcattaagtttaggataacgactgagtatgggtataacatcatttgaccaccccacagctaaccaagtatctcccatgattagcggttctaggtaggtagtagaatcatagaatttaacttgttgatttaaggtttttaattctgtttctaaatcggaaatttctgcaagattttctgtattgtaggattttccgagtttctttaaaactaacccaattacttctctaggatggtttagtagggaaatgcgcgatcgcaactcactgcgccataaatcactccaatcttttggttgccaatcaaattgttgcaacttttcccgattataaacaattactgtattaccccagcgataaggtgcagcccaaaccttaccttgtggatctatatttccttgatcatccctttttaccggttgttgccattttggatttaaagttgaccattgtttaattttttctgtttccaatggttgaattaatttctgttcaatagctgcttttagccaataatctcctaatgttactaagtcagatttagtaactttttgattttgcctaaatggaatcaaacgactccatccttctttgttattagcgtctggttgttgccaagtttgtaactgtttaaataaatcataaatttgattaacagggacaaacttgaaatttacctctgactgtacagttttgcgaaattgattaaccacgtagcctggtatagaaccctttaatagctgcacattgaattgcgcctggttctggctattacaacccattagcatttgggaaactacgaacccgcttgtacctagtaaaaaaaaccgtcgatccatttattttcaactctagggctatcaacataatcttaaccataggagcaaaatttgctaagaaaataacaatatctcactcctgtatctttagaaaccgatgataacaaattgtaactgattattagcaggacttacgcaaaatagaacaaaagtaggggtaattcatgaattacccctacacaagaatcagtttttagtacaatcttgcgtatagcaatatttacatcttgtaactttcccatcagtgttggtgagcaatgccgcctaatacttcaatttattaataaatatttgagtgatatggatagattttattgatgtacatatataattaataatctctttcacaacctaccaagaaaaatatcaaagattaaataaatcataagtatttttaacattgccagtaaattgaataacatagaaacactatttgggaataaaggtattaaatggactcactgcaaacacagatactgactttgagccagaaagtagatgctctataccaggtgattgaaaaccttgacaggaaactgtctcagggtttgactgattgctttttagagcaaaaacagccaaaagataattatctagaaaatcatgaagttgaaatgttcaacttcaaaccacagattactttcaattctaatttggaacataaggatgtgttaatagatggcatttatccagatatgaatatgcaagctggagataggcaaataacaccagaaattcaaatccaacgactaacagcacaattaacagcggcatataatcgtattgctgctttagaagaacaattaatgcgacaacgaatttattaattgtgtcatttgggcttcaatggctgttaaaagttgttcttgcagccaattttgactgagataggccgctagacacgctgctccagcaccaacaccttctttgacaaaaccctgctcataagcttggagttggggataacgagaattagcaaaacttaattgtgtagctagtaggggaggagtgattttaccccaactaaagttgtttttacccaagctgagggctaagtcaactgtagccccggtagtgtcttctgcaacccaacgagttgtaccaacaactattgcttctggttgccaagataaagagtaagcttgagcgatcgcttgcagtaaagcataaacagccagcatttgtgtaccaccagccagcaaaaccccacaacgccgactagcagcgatcgccatcccagctaccactacttgcatgggatcacctactgcggccaccagttccagaggatctgtaaaattgtgtcggttttccaaacctgcttgtactacagcccacttttgtgcatgattacaaacaggatgactactattaacttttccagccgcatcaatacctaaaccagttaaaattgccaaagcagttgtagtaccacccaccacacactcacttaaaattagatatccctgagagtgtttagcaccgagttgatcaccccaaagtaaaccttgttccagcaaatgtttaactgtggctatttccatagctgcacctgtgcttaaacacctagcagtcgtgcctcccaaatcaattaatggtacagccggaatcaaaggtaaacccgcattaaacaaataaactggtatttttagttcttccaccacagcacgagaaattagcaccggggaagcgccagcagtcaaaggtggtaagggatattgaggctgatgtgctgcaccataatacaaaaattccgcatcagcacaagcagtatattttctatcctctggagtcaaaccagcagcagaaataccaggaatcaaacaagtttctgtaaaacctaaaacacaggcaaaaataggtaaactaccataataacgtttgagccatgcttcaccctgttcaatttgggtataaattttaatcattgtcattaggaacagggaatagggaacagggaagagacaggagtttatgaattatcaattatcaattatcaattatcaattattaattaaccttcataatccaacaagatttgtacccaacgtgggggacgggggataggatttcccagacgattcaaaagtaaccatgctaccagatgtaccacaaacaaataaatcaagttgttgaatgcaatcaaaagcatcccccccacctgaacaacaaacacattgggagttgctaatatttgcagtttcaggaatatccattcaataatttctgtcacctggttaatcacataaacccacaaatcttcaccagataaaaccgacagtaaccacagtcggaaaaacacacccaaagtacccaggagcatacctaaagtaattgacacaatccaaggtacacgacgatgccaagttgcccctaaaagtacacccatcaaaccaaaaggcatcacgaataacatactgcgaacaggtcccatcagcaccgccaacagtaaaccagatgttaccgcagccatccaggcagcacgtttaccccagcgcaaataaactaaagcaatgggtaaagggaaaaacatccgtaaaaccggacccaaaggaaaataaaaattaataaaccaaattaaactagctgtactggctaaaaatgccgtttccaccatcctcaaaggagcatcaactttaagttggggacgctttaagtgttggtgtatatctggctgattaccagggtttgatgattcaggtgatgaatcttctcccggttcatctggcatagaatctaaaatactcatatcatgtttgttttaacacctatcatatctgttttgcttggtgattggtgattggtgattggtgactgggaaaatacaaataatttccccctgctccctgctccctgctccctgctccctgttccctgctccctgttccctgttccctgctccctgttccctattccctattccctattccctattccctattaaatgatcattttttccaaagctactacatcagggatacacattacatcttgttcccggataatcaagccttttttttctaaccttgtcagtacgcgtgtaactgtttcccgtgccagtccactcaaactgctcaattctcgatgaggtaaattaggaatttctgtacctgtttctcctatcttaccctgtccctctgctaaaaatagcaaagtatctgctacccgtgattgactatctgattctcgcagacgcaaacgacgatttacttgtcttaatcgtcgcgccattaattgggataatctcattcccgctaaaggttctgtttgcaacaatttgacaaaatcttgagcaggcatactgcctatcatggttggggtaagagttatgacatcagtggaacggggaacttcatctagtgccgccatttctccaaataattccccatgcccaataatgtttagtgttacctcttttccttctaaattgtatgtacggatttttacccatccctctaaaataaaatatactgaaccaccccagtcattttctagcaggatcacttggttggctgggtgggtacgggtaacaagattggtgagggctgtttctacaatagattcaggcaacccttgaaaaaagggtgctgaagtgatcaagttttgagcggatgtctgcaagctatatcggtcttccattaggacatatttatttaagctgctatgaacagaacaagtaagatcggtgtttttagccttacctatcaaattattacagccgctttcaaagaggagactaaactatgttacacaagaaaacgacaaataattttttctcaacaatttttactttcccttagtatttgctgattaaatacaccaggcttaacccccctgtcaccaataccacgaatttgattttaccttaacctaacgcaaaatttggcaaactacctaaaaacacagctaatcatctagatcaagttgcatctctgagtgattcataacataattgccgtcagaagtacgagcaataaatttggttactcagtgctttcgtaaacttaattaccataaacatcacagtacatttctagctaaggtaatttaacgtgacttcccgtaaagatgaaattcacaaactgattgcagatattgacaacttgcttgtcaatagtggtaatcccctatcaaaactgctgtctggtcagggacaagaagagagagatgttttacagcgagtgcgtgagtttcttgtcaaactcaatgaaagtgagacaccagaagaaactcctgtggagcaatcacagacacaaccactgtcatctttgttggcgcgatatgtggagcaggagcataaccaagctggatcaaagtcttatcaatcccaacagccacaggctaattttaccgcagaacaattaaaagatgaaattttggttgtgcttcaacctttgcaggcagaattatcaagtctgttgcaagaaagagcttctcttgtccaggaaattagacagctagagcaaaagcgactgcaaaactattccttaacacagcagttagccacccaagagcagataattagcgaatttttacaagtgctaatcagtcgtttagtgccaaatttaattccatatttaacaagaaatgcagctaattcttctagtttgactacaggtgaaactaagcaagaagtcagcaactctgctattcaacctgttgtggaatccgtcgaagggttagaaaggttagctagtttggccaaggagttggatcaacgtttactatcactagatggaactgttaacgttatctttgaggcattagagcgtaacattaacacttattatcagtctttatcccaagcactggcaagaatgcacagtcaggggttgcaaggtgaacagttgatggcaaattttctgaataatttgcatcagactttacaaatacaatctccagatgctccacctttaacctttgggttagattctgcaacagaagtacaacctgtttcttctgttgctgaggaattaattcaggatactgtgactgcggacactcaagaacctgagattgtggaaaatctggaagcagtgctttcacaactgactgcacaaccagcaccagtttcagcagttgatagttttattagttctaatattagttctaatattagttctgatgaaactccatcagagaatggggaggaattaattcaggatactgtgactgcggacactcaagaacctgagattgtggaaaatctggaagcagtgctttcacaactgactgcacaaccagcaccagtttcagcagttgatagttttattagttctaatattagttctaatattagttctgatgaaactccatcagagaatggggaggaattaattcaggatactgtgactgcggacactcaagaacctgagattgtggaaaatctggaagcagtgctttcacaattgactgcacaaccagcaccagtttcagcagttgatagttttattagttctaatattagttctaatattagttctgatgaaactccatcagagaatggggaggaattaattcaggatactgtgactgcggacactcaagaacctgagattgtggagaatttggaagcagtgctgttacaactgaggtcagatgagatttcaagttcagttgctgcttcttttaccacccctgatgaaactcactcagagagtattgatgaagtagatgaactttatgcgagtttgtttggtggtgcagataggattaaatcaacaaaatcgactacagaatctactgctgtgccagtggtgacaagtgaggtaaataacactgctgagattagtgaaagtatgtcagcatcaccaattattccagaagcacaagaagaagcacaagagcttaatgtgcaggtgtcgtcagaaagtgtagagcaagaggatttaaatatttttgagcagagtaacaattttccacctgaaaatgcggctatggttgtagaaaccacagagccagcatcatctgatttatgggaaaaatccttgttgccagaggatacgcaatcacaagctgaatttgccagcactcctacattactgaactttcatccagatagtagtgatacaatcacagtgctgacggacttgttagttgatgtcttcggtgaagaacaagttacagaagctttagctgttgatgatcatccagacacgacagaactagagactcccatagttagctctgctgtagaggaatcgacagagacacaaaatttagcatctgcttacattctggcttcaccacaggaaaatttactatctatagataacacggatacagagacgcaaggtataccgaatattgttttagatgaagcgcagttgcaacaattggatcgagatttaaccaattttgattggcggttaaattctgaatcgcaacagacaacgaatgtagaaagtttgcaggattcggtatctgaaggtcagaatattctccaggatatcctggatacaggaatgcagttgatggaatctcctagcagcacagcaacagaaaatatcccattagctgctgtttctaatgtgaatagtccgcaaagtccgcaaactgaaaaaaaaaaggaagtcacaaattctgcaccagaagttgctttgctgggcgatgaaaagttaagtgataattctgtgttgagagtcaacgacccaaactttgtttggtatttaggaattgatttgggtacaactgggatttctgcggcgttgttgaatcgttcgcagttggttgtgtatccgatctactggtcaacagaaaatccatcaggtaacactgcttttgagcaatcttttcgtttaccggcagaagtttatttacctacggcttccatacctcattcagacgcagaaagcagagaaaatagagagcagacaacacctgcggcggtggcacaggatcaaactcactccacaacagcaccgaaacaaaatctttactctgctcatttaaagccttttttagacatagggattccttatagaactacgcagcaaaaatgggaacctgtattgcagttaaatgaattttccgcaggtcctttgatttgggtggtgcgatcgctctctaaattactgttaactctcaaatcggatcaaacaagtacaactccagctttaattgctcatgctgtggggatagatactcaagttttctctgagattatgaataatattgccggtgttgtttgtagttgtccttctagttggtctgaacaatatcgttttaatgtgcgggaagcaatactggctagtcagcttgtttcccatccccaagagatattttttgtggaggaggcgatcgctagtttgctgccagaacttaatcctaacaattctccttcagtacagttgcatgacaatcaaggtttgcgtcctttaaaaaccagtgaaaatttccatgggggtacaaccctggctctaaatattggtgctactgctacagagatggcattggttgatttaccgacagatttgagccaattaacatacagagattttatgcttcacagttttgcctatgctggtaaggctatggagcaggatattatttgtcagttgctactaccaccaaaatctcgccaaccccgtgggaggtcaaaagctaacagtagcatttctagtagtaatccttggcattggcaaccctcaattcctggtttagaccagatacaatggtctagtttgagtttggaagcgttagaactaccacgagttggagaaccggatctactttcccgcatccgcttccagcaaaagttagaaagttctttgttgggacaaggattgttagatgctgctctggctctgaagctgattttgcaacatcaagaatctttcactctggagttagcagatcagtgctggatattgcagcgacgagatttggaaactcaggtttttgtcccctacatacgtcgtctcaaccgggaactgaataaattattagtagctcgtggtattcctacggaagctgttgatcagacaattatttctggtggggtggctgctattgctacagtcaaccgttggttaagacaaaaacttcccaatgccaaaattattcaggatttatatctgggtgaaaatggcgctcctaaatgtagtcgggtggcttatgggttggctaccttacctctacatccccaggttttagaagtacctaaacaacagtatacagattacttcttgttttcggaattgctgaaaattttaccgcatagctcaggtggtgaaactatgcgttctctatcttttggtgaaattctgcaattgtttgagaatcgtggcatcaatacccgcatttgtcaacagcgtttgctggcttttttggaaggtgaactacctgctggtttaatacctactgctgctgaaatcttaccagaaccagatgataaacttctttcagggcaaacatctttaaattctctatggttagcaaaaacttctcaggaaaatcctgattatcaggcgatcgcctctgcaccattgtttcaaaaacaaggaaatctcacatatcgtcccaattctcaacaacttctattgttgcgtcgttatctggatgctatcaaagctagttctttacaatcactaaaagaacctttagcggttaacttgatctcaactgttagccaataaatagggtttgctgagaaagttttttcgtggagaaaggaaacagggaggaaaattttagattttagattttagattttagattggagataacaaaaacaatccaaaatccttgcatccaaaatccaaaattaataactcctgactcctgtaagggcgttcgcgaagcgtgctggaagcatcagcattcgggcgatcaattctcaattttgatcacaggttattttcctgtaagggcgaagcattcgggcgatcaattctcaattttgatcacaggttattttcctgtaagggcgaagcattcgggcgatcaattctcaattttgatcacaggttattttccgaatgcttcgcccctacttcgcccctacgactcctgaatttttacactttgacttttgaattgcaattatcctttaacaccgctacctgtatctgtggggacaataaacctttgtaaaaagagaaataacagcaaaactggagcaattgaaattacagatccagctgctactaatcgccaatctaaggaaaatgtacctgctaatttagccactcccaagggtaaagtatataaactctcatcttggataacaattaacggccataaaaagtcactccaagcaccaataaatacaaaaatagccagagttattagtgctggtttaatagcgggtaacatcacaaaccaccataatcctaactcagaactaccatccatgcgggcggcttcttctatttctttaggcactcccataaaagcttgtcttaataaaaaaatgccaaaagcagaagctaaactgggaaaaatcattcctaaataactatttgttaaccctaactgcactatcaaaatatataagggaatcatgactatttgaaagggaatcataattgtagaaacaatcgcaataaaaattccattccgtcctaaaaatgataatctggctaaaggataagcggctaaagaacaaaacattaaattcaaaattacagtcaatacagataccaaaatactattatataaatattgcccaaaaggtaaagattgccaaacacgagagaaattatttaaagtcggttgaatgggtaataactggggtggagactgtaaaagattttcggtgggtgattttaaggctgtactaatgagccataataagggaaacagggtgaggagtgcgatcgctgtcaataatccgtatatgatgaagatttgtcggtttgatttttggatgttcatattttttctcactcaaagacgcaaagtaataagaattaagtacctgggcaaaattaatttaacatttttggaacaaacaaaaatccctgtattccttatctgttccctgttccctgttccctgttccctctcccaaatataaaatttattttgcacgactacttatctgttatgctgcttttgatattgattaaactaaccgcaaagtacgcaaagtacacaaaggaagaaaagaagtcttctttagggttgaaggtaggagttcagtttttggactaagcatatgaagaataccctaaatattgtactttttttggtaatatgtttgacggtagtaagtgtaagttatttgggacaagcaactatgatatcaccaccacaactattaacagatccatttttacaactaccaacagaaaattctgtgcgtgtagtttggtttactgagtttgccggtgataaacatttggttgtttacggtgataaatttgatagaaattcaattgcaaaaactactaaacttagtcgtgttcgggaagatcaagggtcaagagtagcagatcaaaaggcaaatgggcaagtttatgaacaacctgtaaaaagagatatttggcgacatgaagctgaagttactggtttaactcctaatctacgagttccctattttgtcaccagtatacgagaagatgggaaaaaggttaatagtgaggtttttactcttgcatctactccaaaacccggtacaccgttaaaagttctcctcacatctgatcatcaattaaaaccaatgacagcagcaaatttacaaaaagttgtggaaactgtggggagagttgacggcgtatggtttgctggagatttaattaatgttccagatcgtgcttctgaatggtttgatgataatcgcggaaatgctttatttccaggtttacaaggtcgtggtaattatacaatggaatctcatgatggtgtcaaggttacttacactggtgggaaaattattcaaaatgcccctatgtttccttgtattggtaatcatgaagtcatgggaagatatcagagaaaaaagagtttaaatgatgaatttaatgatactgttccccgtgaagtagctgaaaatttgtatggtaaaaaatctttaatagataattcttttaatactatcacttacgaggaaatttttactttacctgaaactaaatcaggtggaaaaacctattacgctgttacttttggtgatgtccgtttggtggttttgtatattacgaatatgtggcgacatcctcaattaaattcagagagaaaaggtagatatatagaaccagaaacagatttgaataatcctgaaaattggggttatggacagttaatttttgaacctagttttaaaggaagtgatcaatatgattggttggaggaagaattaaaaagtcctgaatttcaacaggcaaaatataaggtggttatgttccatcatcctcctcatacgttgggtgataatattgttccagcttacactaatcctttacagattattgaaaaagatcaaacaggaaatattaaatctgtaaattacgaatatcccaaaaatgcagattacattattcgtgatgtgattcctttattagaagctgctaaagtgcaattagtattttatggacattcccatttatggaataggtttgttagttctagtggaatgcactttttagaaacttctaatgttggtaattcctatggtgctgcttggggtgaaagaaagcgagatgttcccgtaaactatccagaagatgattataccagaattggtgatcccaatggtttagaaccagttataccaacgatttctccattattaggagaagatggtcaacctttaccttatattgctagtaatgagattacagttttcagcattttcgacacgggaacaggtactattagtagttatcgctttaataccaaaaaacctgattcgcaagttgtaaaatttgatcaatttgtgattggtaattgatactagttgatagttgatagttaatagggaaacatcaaatttattacccagtcaccagtcaccagtcaccagtcaccagtcaccagtcaccagtcaccagtcaccagtcaccagtcaccagtcaccagtcaccagtcaccagtcaccagtcaccagtcaccagtcaccagtcaccaatcaccagtcaccaatcaccagtcaccagtcacctatattagataaaatttcttgcgctcttttgatattattacttacagaattagccgaagtttgtaaagctgctttttctgtatcgttgagagtcaattctaaaatactctcgactccaccacatcctaaacgacaaggaacaccaatcactacatcatttaaaccatattcaccttgtaaataagctgcaactggtaataagcgagactgatttaataaaatagattctatcatcaaagaagtggcagaagcaggagcaaaaaacgcgccgcctgtgtgcattaattccacaatttctgcgccgccattgcgtgttctttgtactaactgttcaattttttctgcatctaataattctgtaatcggaataccattaacagtagcataacgggctaaaggaaccattaaatcaccgtgacttcctaaaaccattgctttgacatccgcaggtaaaacccctaattctaaagcaatgaaagtttcaaatcttgctgagtctaaaactccagccattcccatgatttgatttctgggtaaacctgtaacttgccaagttaaataagtcatcacatctaaaggatttgtgacgacaataaaaatagcatggggagaatgggcgatcgcattttttgccgcttcaaccacaattttggcattgatttttagcaaatcatcccgactcattcccggtttgcgaggaaaaccagcggtaatgacaacaatattagaattagccgtatctgcataattattagtaccgctaatttgccgattatgtaattctaatcccctcgcttctagcaaatctaaagctaaaccttggggcattccttcgacaatatctaacaatactacatcggccaaatttttctccgcgatgcgttgggctaaagtgctaccaactctacccgcacccacaatagtcacacggggagatttacagaaaacaggagaagaaagtaaataagacataagaaatattttcttgacaattgcaattcctgactaatagtagagtagattagtaaatattgatatccactgaagttagaaattaaatttctaatttaatttggagcatcccaatttggaaaaaaaatcaccacagcaaaaccaaaaaatctcttaaattctcttacctttgtgtcctttgcgccctttgcggttcaatcatatccagttccttggattattttatttccttggatagaaataaatttacaaatttgggaaactctcaattatttagtcatctttagatgacttcagctattagcaaggaacttaagttccttgcgggaattgtacactaaagcacaacctttgttatgcaaactcttccaattgttctaattttaaccaaatattgggagttggtacttttccgaacttcaccaaagcataatcacctttaatatctactatttcccctggactatcaaataaataggagggaaagcgagtatcactagcttttgcttctacactattttccaacttctcgcgcacagcacgaaccatatttcctttttttacagccatgagttcctctgacgattcatcaacgcttttactaaaaattttatcttgtgggaagatcaaaggcagattttcttgagttaaaaaagagcagaaacccagatacacgcaaggtattaaatacctaaacaatacggttgacaattgtccaaacttctccatcagaacgaacatggggaactgaaatggttttgaatccggtaatgaacggtttatagtacacttgccaatacatggggctaagttcatcagcacaagctttgagtagtttaatttcttctgctagttcttgtgcgagttcatttaccctttgggcgtgaatttcggctacttttttcgctgcttctaattcttgttgttgttgagcaagacgtttagaaaaagttagtgaaccatttaactgagcttgtttttgttgtttttgtttttctaaaaaagcgatcgcattatctataccttgaatttctgccgcaatttcgggattttccctagcttgacggcgataagcttcaactattgccaaatttgtattattttcactagattctatactattttgagttaatgcagccctttctcttaggagggcttgaatttgtgagttgagttctttgatttctacttgaattttattcatatatatattattatgctacggtaaattttagcccaaagtgcgatttcttacaaaacattaataaaccgagtattatatgtgtacgttcgcaaattaaatgtcgcttttcgcaactcctgtcgcaatagaatgtaatagctgaaacctttactatgtaaggagtatagcttatttatctctaccccagaccaatttgcctattttgcatattgtatgtcgcaaatcaaggcaaaactgaaatttcatctcatccagtggtttgctgaatcacccaacctcactattaaatctcagataaataaggcagtagcagatactcttggtgtttatactcgtcatttggaagcttaatttgacagattgcgacaattaagctgctatatcctgtgaatataaatactgctgaaacccgataaatacttcactgatattagcaacgctacctaattctttaatagcatcatggatagtatggtatttcaactctaataattggggtaacttagatcgatccagttcttctactccatctttaatatattgatccaagacaaaatcaagaaattcctgttgtttacctacatatttagagaaaattaacgatttatgagctaaaaccctttcccgacggctaataggtacagcagcataagcaatataggctaaaatatcatataaatcacttttttccgcattaattaaacggctaattactgttaattgttctgcatcataacctttttctgataatccttctaacagtgcttttcgagtatctggacgactccaaatagttcttaattcattttcgtttttgaacaattcgggaatttcaccaaatagcctttctataaattctgcggacgttatgggtttaccgtctacactccaaaagctggtagatatttgatgttgaatagttctttctttaccatctcctaatttaactttaattattttaggtgtggtatcttctgttttttcggttctctcttttgtggtattcttatctgtatttggtgataattcccgtgcttttctgttggtaactttcacaggttcttggggttcaccatcccattctggatcgttaaaatgttcataagctttgacaaaatcataaatagtaaaataatcttttccatcatataaccgagtaccacgaccgataatttgtttaaattcaatcatggaattaataggacgcattaaaactatattccgcacattgcgagcatcaaccccggtggaaagtttttgagaagtggttaaaattgtgggaatatttttttcattatcttgaaaattcttcaggtgttgttctcctaatttcccatcattagctgtcactctgtggcaataattaggattatgactaatcttgatttgattgattaaatttcttaccgctagggcatgatcttggttagcacaaaatacaagggttttttgattttgatctatttcctccatgaacaattgcactcggtagcgttcccgttcttcaatttcaataatgcggttaaagtctgtttctgtataggttttttcatcatctatcaccccttctatgacatcatcatcagcactgtaaatatattcatctaaactagtttctatttccctgactttaaagggagttaaaaacccatcattaataccatcttttaaagcataagtataaactggttcgccgaaataagcgtaagtatcagcattatttttgcgtttgggtgtggcagtaagtcctagttgtaccgcaggggaaaagtattctaaaattcctcgccaggtgctttcgtcacttgctccccctcggtgacattcatcaataataataaagtcgaaaaagttggggggatagtcgttaaatttgggggtgttgtcttcgacttcgctcagacaactgctcagagaaccgcttgttttagtcatgaaggtttgaaaaattgtaaaaaagatgctgccatttttgggaactcgaccccgttttttaatggtttcgggatctatgcgaactaaagcatcatcagcaaaggcagaaaaggcgttaaaggcttggtctgcgagaatattacgatctgctaaaaacagtattctagggcggcgtgtggtcactgagcgacttgtactgagcgaagtcgaagtaagtcgaagtgtggggttatagctcaagttccatcggctttggaagagtttccaggccagttggaaagcgataaaagttttacctgtaccagtggccatggttaataaaattcggttttgtccttgagcgatcgcctctaatacatatttgatggcattatgttgatagtatcgagcctcccatgtaccgcttttatcttcaaagggaatagttgcaaagcgttcacgaagtatcgctgaaagagaatcacgccattcttgttcttgttccctgagcggagtcgaagggaaatcgctggtttcgacttcgctggttttgacttcgctggtttcgacttcgctggtttcgacttcgctggtttcgacttcgctcaaccgccaggtggatttccatagttcatcgggtgtgggatatttgttgatataaccttcttttccggtgtgcatatctacttggtaaatgcccacaccattggtagaatatgcaaagcgagtttttaatttttcggcgtattttttcgcctgtgctagaccttctgtatcgggtaaatcgcgttttttagcttcaataacagcgagtttttcaccacgataaactaatacataatcagcgatgtctgctttagcccgtttaccattgccaattaaacggccaggggcgatgacttctcgacggatgcggctattttcaactactccccaaccagcagcagtaagggcggggtcaattaattcggcgcgagtttcggcttcgctcaacttagaggtttcggcttcgttcattggacagttgacagttgacagttgacagttgacagttgacagttgacagtagttaagtaaatttaacttaatttgtagtgttagtttggattatcttctatttgattttcttcttcatatttggcgatcgcttcttcaattatttcattactcacatctgaaatatcagatttagaatagatcgtagtgagtatgatggcttgggcagttttcacataataaatgactcgataacctccactttttcctttttgaatgttgctatttttcagacgaactttaaacacctgatatttcagcccagaaattctatctccaggagtttctcctgtttgcagttgttcaattaagggttgaatatcactgcgaattgaacgatagcgtttagcaagttctcttaaatccctttgaaatcgaggtgtaagagcaatttggatcaatggttcactctgcatcaataccatcccacatttgtgaaaggggtagagtttgcccacttaaagcctctctgatgccttgatgaataccttcgatgacgatttctgtaggtgtttcttccgcagataattcttcttgtaagcctagacgaaagtggtggattatatcatagatttctgctaatttatcttcaggaatgtctcgcagttcttggataattttatcaatcaacataaattaaattttgggaaattttcggttagtggttaatcatcaataagttgtgctgtatttattatggctcatcttgagaatatggcagtcagcgacgggcagtagcgatcgcttcttgtagtttagcttgtaacaactctttaagtggtaacacggtcaggtatgaggcaacatgaataccacttttatctagttctagcaattagatttgctctaaaacacttttttgttgattttacaagggtttcgggaattgagagttgctaatctcgatttgctctaaaacacttttttgttgattttgcgagggtttcaggaattgagggttgctaatctcgatttgctctaaaacacttttttaagataatcatgcggctacttcccccttttcggttttcgagttatctgctgttaattcccctgcaaaggctttttgtaagatgctttgtttcagttcttttaatgcagcgattttttgacggtagatattttcaaggcgttgtgtttcagtaaataattcatcaattttttgtgcaatatttatttgatctgaaatactaggaatccatgtactatatctaaaaagatgatctcggtttaccttcggcattcctgctcggtctgaacctgaaattgcataatttgtaaaatctcgactcataagaatataaaataagaaatctctgtttaattgttcattattaggaagtagtggataaacatctgcactacaaagaccactaaaatcaggtctacaagctttcatcaagtaaggacgaattttactatagagaaccatagtttcatcaaaaagaaattttccagatattaattgttcttgtctggcagttttaacctctattagttccccagtcatagaaatcatattacctgcgccaatatgtggtaaatcaataaactctggttgtcgaggatcaacgagtttagatgtaatactgcaaacatcctctaatttcttctcttcccaaccttcgcctttttgactaaaaatagaatttagataactttcaaatagttcccgtgcattgctgaggtttttttcagtgttgcttattgctctatcaattccctcaaacgcctcatctaatatcgttacaattctcttttgttctggaagtggtggtaaattaattagaatttctttaagaacttttacagaagcaacatttttaattgcaacgcccatagaaaggtttaaaatttgattttgaaaatttggactactcatccaatattttaaaaaattagcattaatatcctgtctaggagcaagtttcagaagagcttggtttataattcctttatgaataccatcaggaactattgcaacttttcccatagttcccgaacaactcataattaaatcacctggaaaaatctcaaatctcttcatctcttgatattttgattcattaataaaatatcgaatttccttgaactgattataaattgcgtgttgttgctcataaaccgcatatccagaacttttaaaacaggattttttaagactacctccaaatggtccgcgaatgaaatcacataaacttcctaaagtttttacttcccaaccttctctcataacatccctccaatatctgccaaaatatcagcactttccagatccaaaactgcaatttcatccaaaatatcctgcggttctcttaacctcacttcctcccccttattgggatttttcaccgataaatcaaacgactcctgatcaatatcagcaacatccactaaccaagacttttccgacactgcaaaagtagcttgtaactccacaaactcccgtaaatcatcatcatttaaaggattagttttccccaaacttcgccccggatctaattgataataccaaatctttttagtcgccatttgttcagcatgagatttaccctgagaaaataaaggcattcctgttccctgagcgaagtcgaagggagcgaagtcgaagggagcgaagtcgaagggagcgaagtcgaagggagcgaagtcgaagggagcgaagtcgaagggagcgaagtcgaagggagcgaagtcgaagg

SEQ ID NO: 3 - DNA, 136001 bp, Sphaerospermopsis sp. LEGE 00249
  LEGE00249_10
ccagtccccagtccccattccccagtcccctacatcacagcaacacggggtagacgatgcttgaagccgcaaagaatttcccacgaaatggtatttaattgatttgcccaatcatcagctgtgattttttctcttccttgttctcccaataaggagactatttccccttcctggacatcgggtatggaactgacatctatcatgagttgatccattgtaatcgcgccaatttgctgcaaacgctggccacgcagtaaaacttgcatttgttgggaaagactgcggggaactccatccgcataaccaatacccactactgcaatccgcatttctctgggtgcgataaacttatgaccatagctcacaccagttcccgcagcaattgtttttacatgggtaattctggctttgagttgtaaaactggtcgcagtttgatttgattttgcaggtggggagcaggataaagtccataaatggctaaacctgcacgcaccatatcataatgtaatctcggatctgccagggtagcggctgaattagctaagtgcaaactgggaattgtgatacctctggctttgatttgggcgatcgcttcctcaaatcgtctatgctgttcttccatgatcgccggatcaggactatctgctgtagctaggtgagaataaatactgtcaatatttagatgtggtaatctttgtactaattgcacaaaatcacctgcttgctgccaattagtacctaatctcgacattcccgtatctagtttgatatgtacaggtaagggagaattatatttaattgcttctaatgtgttggaaaatattaaagcttgtttagggctgcaaagtgtaggttgcagtttccaatgagcgatcgcatgaatttgttctgctgtattggttgctcctaaaattaaaatcggtgcttttatcccaccttcccgtaattgaataccttcgggaactgtcgctacccccaaccaactcgcacccgcttctaacacagttttagcaacagttaccgccccatgtccataggcatcagcttttaccactgccattaactgtgtacgtggtgataaaaatcttactaattgcttgacattatcggacaacgcccctaaatcaatttccacccaagcacgttgagaaaaccaagcgtaagtattgcgctcctgactatcagcaaaactaggggtttgtttgctactaaacattcctcttcactcctatcacaccactgcaaagcttccagacgctccgactgtgctaatttttgccccttaaagccatatcaatttaatcagcaaagtgtaacgttgatccgggagtttgtacaagtagtcaggagtcagaataattttagattttagattttagattttagattttagattttagattggaattgacaaaaataatccaaaatccaaaatcctttcattgtatccccagtcaccaaatcattgaggaagtataaattattctcatctccccagaaaggtatatttgtgttaaaatatctaaaactaataccttgagctaatatcaatggggaaggttttagtcctaaacgcctcctacgaaccgctcaacatcacgagttggcgacgtgccatagttttgttgataaaaggcaaggcagaacacgtagaacacaatggcaaattcctctactcggattttcctctgccaaccgtaatccggttgcgtcattacgtgcgtgttccctataaagaaattcctctgacgcgccgaaatatattgcatcgagatgggcatacttgtcaatactgtggctacacaggtgatgagttgaccctagatcatgtaatgccgcgatcgcgtggaggaggtgacacctgggaaaacatcgttactgcctgtgtacgctgcaacgtcaaaaaaggctgtcgtacacctcaagaagcccggatgcctttgcgccatccaccccgtcaaccatacagtagcctctattttgaggtgacaaaacatcttaagagtggacttcatcaggagtggcaaaaatatgtgataggactttgacattaacacagaactaattgagacagcaggggaatgagtcttcacctgtaggtgttgctgtttgaccttggtcaagacagtataccacaagttgagggttaaatttgcccttggtaagtgtttttttgcagcttttcaggggcattccccaaagctggaaggattgtttgtttaaattccagcgagacaacacaaacacaggctcactattgtacctcattttttgaggcatggatcattgtcactataaattattcccaatcatcacaaaatttacccaaactgagataaatattgaagttaaaatcagcttttaagaaaaagttgctgggttattcccagtaactatatgtacaccagttagatgtcactcgattctggatttacgttagcgaagcgtacgtagggtttgctgaataaacctaaaaccttgatatatcaaaggttagaggctgataaacacagaaattagtccaagggttttgaagggtataccggaaaaagtgtgcattttttgggatttcaagagatggcaaagaaattttcaaatctcctcctgactcctgactcctgactcctgactcctatgccctcacggaaagactttctcagcaacccctacgtagcgcagcgagtattttggattttggattgaatccaccctaaagtgtggaagctcgagaattttggatttgggatttacgttagcgaagcgtgcgtagcgcagcgagtatttttccgtcctgaaagacctagacctgtaccaaatttttttaatctaaaatctaaaatctaaaatctaaaatctaaaatctaaaatctaaaatctaaaattcccggtcagcaatccctgactagttggcttgacaaaacatagacaaacatgatgccgtgccaaagctgtagatttctgtcaagatcgtaatgtgtggacgagccagagcataactggtggaagccacaaagctgaaaactaaattccctatgtatttgaattctcccgttactcaatttgagggcttttcattgaccacagagccgaatggggaggaagtagaaatagagagagatgctcttgaacttccaccacttacccggccttccttaccagcagcaaatggggcagcagcaaatggtgatggaggtatctatttagctcaacgtggcaattccctggcgattcagaagtcagaagagttacaaaaaaccctgctcaaccatagacatgagcgccatctggtacttctacaagattttcctgaccctgatgctctttcttgtgcttgggcttaccaactaattgcccaacaatacgatatcaaatgtgaaataatttatgctggcactctcagccatcaggagaatattgccttagttaagctaactactttacctgctcaacgctggacaatgcaaaccctaaaaagtaaagatttgttatcttatcaagggtttgtgttgattgataatcagggaactacatctcaattactagcagcagtacaacaggctggacttcccctagtcgtgctggttgatcatcatagcttgcaaggagaactgaaagctgagtttaccgatgttcgtccttatgtacgagcaactgccacaatctttacacagtatttacaatcaggtttactcacattagatagcagtcttagccagcacgtaaaatgtgcaactgctttaatgcacggtttgcgctcagataccaatcggttaatgcaagcgcaagaagaagattttatggcagctgcttacctgagcaggttttatgatgctcagttgctcaatgccattttacaagccaatcgttctaagcgtgtaatggatgtgatcgagcgatcgctcaaaaatcgcattgtccaaaataacttttccatagctggtgtaggttatttacgctacgacgaccgagatgctataccccaagcagctgattttctggtgacagaagaaaacgtgcatactgctgtagtgtacggcatagttcacgatgaagatgacgaactagaagtagtcataggttctctgagaaccacaaaacttaccttagatcctgacgaatttatcaaagaagcctttggacaagatagcacaggacggttttttggtggtggacgcactggtgcaggtggctttgagattccgatgggattcttatctggcggtaacgaaaattctgcttatgcgaaaatgaaatgggaagtttttgatgctcaaattaagcagaaattattgaaattggtaaatcctaaagataacccaattcagtcttagttacactgtttcggcaaaaatcgcctcattccccatccgttgtgaggttgggggtaaataaggcaaaagtcaggaggcagaaggcaggagtcaggagtaaaactggctttgtgtataggttttaattgagattgcgtacctcattgatatgcaatcttatttatcatcattaaaatgtgagcaattctatgatgaaatatctttacgaacaggattttcaagtttggattgatacaacaattcagaatttacaaaaacgtgaatttgaatcactagatgtacagtaactaattatctgtcgtcgggacaaattaatgtgattatacaaatccttgctgtataagggttttagccattttacgatactatacttaatctagtgcagtgacaaattaaatgtcagattccataaatgtgacaaattaaatgtcgcgtttcggactataaaaaaggtcttataaattttcataatgacaaattgactgtcgctttccattacaatagaataacattatgtgtttataaaaaattcgtgtttcattgatacttattctcgttgcattatgggtattaatttaggttttgatgcacctagctctcaggtagtttccttagcattacgtcatgcgattttacccaaaaggtacggttcagagtacaaacttcactgcgaatggggaacttacggtaagccagaacatttctatactgatgggggtaaagactttcgctctaaccatttaagccaaattgcagcacaattgggatttgtctgtcatttacgcgatcgcccctcggaaggtggagtagttgagcgtccttttaagacattcaatgatcaactgttttccactctacctggttaggtatgttcgattcaaatccatcaatggaacagtatctgatattcgcgacaaaacaacacaagccttaacacactgttgtgtagaaatgatcattattgatgaagctgatcggctcaagcctgaaacttttgcagaggtgcgtgatatttatgacaacttgggaattgctgttgtcttggtaggaactgaccgtttagatgcagtaattaatcgagatgaacaagtttataaccgattcagggcttgtcatcgttttggaaagttgacagggaaggatttccaggatactgtccaaatctgggaagataaggttttaaagttaccattgccttctaacctgattagcaaagatatactgcgtattctaacttcggctacagaaggttacattggtcgcctagatgaaattttgcgagaagcagctattctctctttatcaagaggatttaagaagattgacaaggctgttttacaggaagttgctaaagaatacaagtgatgaaagcaccaaatattgagccttggctttttattattcagccttatgatggggaaagcttgagccattttctaggcaggtttagacgtgccaactatttatctgctgctgctttgggtaatttggcaggtgttggtgctgtagtagcacggtgggaaaggtttcattttaatcctcgccctagtgagaaagagttggaagcgatcgcatctatggtggaagtggatgtccagaggttagtccaaatgctgccacctgttggggtgggtatgcagcatgaacccattcggttatgtggtgcttgttatgcagaaacaccttgtcaccagattaagtggcagtttaaggaaacagcaggatgcgatcgccatcatttgcgtttactgtccaagtgtcctaagtgtgaggctaggtttaaaatctctgctttgtgggagtttggagtttgccacaggtgtacaacgccatttgctgagatggtaaattatcagaagtcatttaattgagaagtttcactactaaatctcgattagtagaatattaaaaccccaattaatttggacttagcgatcgctttttttgagtaattccactatagtaataaaagccgtatgtcggcgtgaagctgataacggtagaccagcgatacaattttctgtttataaaacttggcttcgattttaacatggctgtaaggggactagattatgcaattgaaactgcacatcgagtgtggcaaatagagccacaccgtcatgtccgtatacctccagcccaaggtgatcagcaacccatacctgtagatgctttgtggacggattatggtcttcgccctaatgccaataacttgtctttcatggttcaatctgttcaggaatcggaaatagacaaatggaaacagaggttacgttattggcctattcgtgcaggtttgttagtctcagatgaaatttatatacttcaatattacactcaatctggcttagaagaacgaattgtagatcgtgaatctctatcttcagaactaactagaccagatagccacttgtttaaaccaaaagcactggcagaatttcgtactggtcagctaacactagcagatattgaagaatctgtttcagaacgtagtttttcttttttactgcggcaaagagccgaattagatcaagcattccaaaatgctattcaagaggtgctggcagaaatcggtattcctaaaaagagaaatcccaaaaatcaaatatcttctcgtcacgaaatagcaggtcatggaatccgtgtagcgatcgcatttttagcaggaagaattttagaagataagggattttttggttctgaatcactcattcctacaaatgatcctcgtcttttacttgaaaaaacagtacctcgtgctaatggttttttcaaaaaagcactggaggagtcaatacctcatcttactgacagaatattacagcgtttagcagctaacttaggtagtcgagttagttttgcactggtagatcatcgagacgtgggattgctgtatgaaagagctattaaagaattacctagtgagattgaaggtgaacaatggactgatttgcagcgacactatacgccaattgcgatcgctgaaagaatgctagaattactgcctttagaaaggttacgtccagaagaaagaataatttttgatcctgctgctggttctggtagtttattattagctgctacatcacgtttagcagggatgattgatattcctgaaaaattaaaagcaagaaaatcttatcttgccaatcatgtagctggtaatgatttagatcaatatgcggatttagtaacacaactacgatataccctagctagagaatcactaggtcaagatattccatttccttttcctaataacttcactcatcaaaattatgagttattaactaaagagaatatgggtattaaaccaagagttattgttgctaatcctccttttgcagaagatggtaatactcaacgggctgcaagatttataaaaaaagcattaagttggctagaacatggttctcaatttgcttttattttacctcaatcttttttaactaatacaactcatggtattcccaatgcacgcaggttattaagtgaaaattgccaaatttttgaagtttggcaatgtccagaaaaagcgattggaattgaggcagaacaggctgtatgtataatattaggacaggtaggtaaatcaaaaataataattcccagtgcatcaagagcagtattttctaggtcgaaagacactgtatctaatattcgtgataatgggtttcttggtactcaatggattacacaattaaatttagataactgggaagtttttacagcaccacctattgatattcaaattcctacaattccgttaggaaatcttttcttcgtttttaatggagtaactcctagtaaaaactacaaaccagttagtcaatgtccaccaaatacccaatgtaagagaaactggcgtatgaaatggcgtgatcaagatcgcttatgggtagatccaactagagttcctgacaaccagcgttggttaatgtatggaaaacaatatctttcaagtgctagattaaaatatgaaccactttttgacttaccaaaaatttttgtaggtcgtaaagtaaatcgaggttctttatatccccttgctgctcaattagatactataggtctttgtcctgacaataatatcttttgtgttcttcctgcacaacaagcaggaaaatcccctcaactacctgataataaaaaatttgtgaaagaatggaatcagctaactgatgaagatcaaagattatggttgttaggcattctatcatctaaaattgccaattcactatctttaattggacgcaaaacacatgaaataacaagtgatgagctatgtaaatttaccttacctcagaaaatagatccgcgaataattgaaattactcgtcaaattgttgaaagagatcaacaacatcttgacattcctgaaccagataatatacgaattcaattagataaaattgtagaagaatcctatggaaatcctcattggatagaacttaaacgaactggagaacctccagaattagaattatggaaatcagaacaaacaaaacctacattaactgtgattggtcaagttttagaaatttctcaagataatacccacatacttctttatttaagtggtttgctagacgataacgaagaagcatggcttcctatcctaccagaaatgcctggttgggcgcttgatggtacagcttttgaagctgaactaagtgagtatatagaaacatttgaacaacttgcacaacatccttgggcaattagaagttttcgccatacgccttatccatacctaactaatgaagaattaaaacaaaagttaaggatagacagtatggaggagcgtttatgacttgtgaaatttcatttttacctgtaggtaatgctgattgtatggttatatgtgatcacagtgatgccgcagttgttgttgatattgggaaaccacgtttattacagaaatggcttcaaaacaaaaataaaaaatatataaagcgaatttatattactcatgcacatgatgatcatcttccaccgctactcaagcttgtagagtttcttgatatttggttaaaacagggagaagtagaaacattttgtcttcctcactctttttataaaatctcagtcgaaaaactaatagctaataaaggaacaagtcctaaatatgacaggctagaattggcactgcatcgccttgatgattgggatagactgggacgtattcggtttattccagcttcacgggattcaaactcatacacacagggaaatttagaaattcacgttttacatccacgacaattattcgttgaaaagcatttagccacatctaacactaaacttaacgaaatttcccttgtcctgcgtgtaatttatggtaattttgcagcaatactacttgctgatattgaaaatgcaggtttgaaagaatgcgtagatatttgccaaccagatgaacttaacgctaatgttgttaaagttcctcatcatggagcgtggccaagaaatggggatgatttaaagcaattactagaaactatcaatcctgaaatagcagttttatcagtaggtagtaccaacatatttggccacgttgttccagaactatttaacttgttactcaacctacaaaatgataattctaaacagttgaaacaatttgtttgtacagaagtgactcgaacttgtgttaaatcagcaagcgatcgctctagtatgggtaaatcaggtttaacagcacaacaattatgtgcaggagaaattaccattcttgcagaaacttctggaaaatggactttgaagactcagacagatcatgaaaatgtaatctcttcattaccatatccagcgtgtcaaggtcatgcagaattgggtgcagtctctacttagtagggtaagtgttggtaataaatttttccagatttcatcgttgatacgtttgggtaaacctctgtcaccatccttattgggaattatgcagcttcattagaatcatctttgtctttaattcttctcttgaattcttcaatattaattacgcttgattgtttagcaataccccaaatttcgttaataatttctttcaatgctggtacgaccaaaagagtgtactgccctattcctttaccacgggaatcacctattttcagtgccgagattatttctccaaagtctgaccaactaatatccacccaaaagacttcttcattgactactactatttgcttgtctcttaaagttttatcaatttgatagttttcaaaaaaattaagtatcttcctaattacttgcagtgaagtggtttctctgagattgcgtattgctcttatttccaaaatctgctgccaggtatagtaaacctctggcttctttttaccattccatactcgtattggtttgatcagttccgaacgctcaagatactgtaactgattggatgttgccccagtcagttccatcgtctctcgcctagtaaactgattaattacactcatcttcaaaaaatgtattcaaacccgcaaaacaaaatacatttgctagtatagtttctagagcatgagccaagcgccacttagcccatgcttagtaaaatatacgaggctttttctatgcgatatcgatctggacagagagtgcctgttagtggtcaatatgcaattattgatccttacgggcgaaataccggatatgaggtaacagtagttagtggagaaccttttccacctacctctagtcctggctatactttcttgctggttgatccaacaagacacagaagatagttctattttacaactcaagggcaagttgtaaatgggtctaaagacagggtgagaataattagttccaaccctgtcttaaaagctaaaacctactggactgggaatgcagcatgaacccattcgtttatgtggtgcttgttatacagaaacaccttgtcaccagattaagtgggagttcaaggaaacttattactatttactcaccagatgcctgagagtttctttctgccaagtattgctgtaaattatgaaacatgacttgacggaacaactccccaaattttgtatcatctgtcagcttttggtaaatatcaaaattcgtgtcaatcatgtcttctaaagtaacctggaaaaaggattcaaatgctaacttgcgagtttcttcagagggattgatactagcatccaaggctagaattaggtcttcctggtttgctaatatactgttcatatcttcagtaaactgattgagtttatcctcatctgaccaatctccaggatcaaagtgttcattaacataagccaaaattgctgatagaggggctggattatcagtttttggtttaactacactcagatcagataaaggcactaattccccatcttctgttaaaagctgaattctccctgtactggtttgctcgatgcgataggagtccatgctaatgtaattagttaaatcagtggggtagcgatcgccagcaaagggcaattttttcaaaagtagtcgcccaaactggtaaaatttctctaactctgcatctgtaaaagtaattacttgcactaaaaaagcgtaaatacgtacatattcccctaaacgtaagcgaatttctgccttatcttctggcgtgcgttgttcatatctatctacaatggggttgaggatggggtgtaaatttgcttggttaggattggggttttgtgtggtgggaaagtaagcacgggcaaaattttctacttcattagtcgtgaataaagcaaagttttctaataagcgtttgaggtcatagagtctatttggatctgtagattcagataaaattgttgcttgataatagtcttgaaaagctgactcgatatcatcggttttgttagcaaaatctaagacaaatacgccatttttaccggggtaattacggttaagacgggaaagggtttgtactgcttctacttttttgatgcgtttatcaacatacattgtttgcaataaaggctgattaaatcctgtttgaaacttacgagcaacaattaaaaaacgatattctttttgtttaaatacctccactgtccgactttcaggaaaaccattgagacgtgattcggtgtaaggttcaggtaaaaggttttctggatcaataactccaccagtgaaagcaactaaagctttatatggataacctttttcttctaaataactgtcaaaagctaatttatacttaacagcatgaagacgagaacgggtgacgatcatcgctttggcttgtccatctatcaaagctgatacctgttggtgaaaatgttccaccatgatttcggttttactgttgatggtgtgggagtgggtttcagcgtaggattgaagaacgtaagctgcttttctctgatcctaatttggggtttctgtcgctttttgaactaatttaaaataagaagtaaaagtagtgtaattctgcaaaacatctaaaataaagccttcttcaatggcttgacgcatggaataaagaacaatactatctggaaaacaagcaggaaaatctaaaatagcaacatctccaatatttgcagcaatagccattacaagagtacctttaggaaactgcttgcttacggcaaaaccaagagcatttaaagtttgctcataggtggtaatatatttatctgtagcggcgatatctccagtttgtataaatggataatccccatcatataatttaggatcatttcttggacgatgtgaaaatttaccacgtaaaattgttgaaatatatttaattttcttaacttcccaatgtccaggaattttacccaaccactcaacccccgaatttttatactcagaataagggggaaaatcttgaaaaaacttttgagcaacttcaactaaagtcaatagataacattccaccagaaccacaagcacaatcataaatagtgcgtatcactcctggttgtttgagtgctgtttcatctcctcgtaatactaaacgcaccattaatttaattacttcacggggtgtaaagtgttcccccggattttcgttcatttgttcgttaaaacggcgaattagttcttcaaagattgtccccattgtatggttatcaatcttatctggactcagatcaacttcggaaaatttgttaatcagaggtactaataaatttttagaatctaaagtattaatagtagtacgtaaactaaatttatcaattacctcacgcatattttctgaaaatccgttgaggtaagcaatgagatttttagctaagttctttttatcttctagtaattttttaaagtcatatccagaaacgttataaaaagattttcctcctgctgctttgcgtaattgcccatctaggttttgtagtcctttttgttgaagaaattcatatctttttaacacctcatctttagtaggtgctaaaacgcaatctaagcgacgcaagactgtaaatggtaaaatcacatcaggatatttaccgcgcttaaagtcatctctgagtatttcatcagctatttgccagataaagttagctgtttcttggaagttcacaattgcaccactgataaattagtcaggtgttttattccctaaccataattgcagctagttggttagaggtaaagatgtcttgatcgagaaactagacaaatcaatatagagatagggaatattattatacccgtctagggacatttattgttttttataaaaataaatacatatttagccagtaaaggctttgagattatctttcaattgttgatgtaagcgatcgcaccagaacggaaccacaatgtatccctcagacagtgcttgtagtgccatttggctatcaaactctaacactttcagaggatatttaggcaatcccgtcagtaataacatcattcgctttaacttatcttcttcaagatacaacttaaacagccaaggttctctttcgcgtaatacgtccaaagctagattgcacacttcaaagcttaaacctcttgacagcagatgccccatgaccatcaactcgaacaagtctgctttggaataataaacatttctccctttcccaaaggcattaacagtaggtacaataatcgccttatcccgccaatactgtaactgtcggcgagagcaattagtaatttcagccgcttcggtgcttgtgtaaaatctattgtccataagaatcatcctagtagaagattttttggaaacgcatattttttttagaatacattatgtgtttttgtgatattttattttcatgagtaaaatcacggttcaatgtcgcctaattgccagtgaatgtacccgtcaaaaactctggacacttatggcagaattaaacacacccctagttaacgaattactacaacagcttcgccaacacccagatttcgagaaatggcgtaaaaatggcaaattgccttcaagcgttgttcataaactttgtaaaccgttagaaactgatcctcgttttgccggacaaccaagccgttgttatttatccgcgattcatattgtggattacatctacaagtcgtggttggcaatccagaaacgactacaacagcagctagatggcaaaatacgctggttagaaatgctcaatagcgatgctgaattagtagaaaccagtggttacagcttggaagctattcgtaccaaagctgctgagattttggcagcagcaacaccaacatctgaccctgatgctcctgcaaataaaaccagaaagactaagaaatccaagaaatccaaacaagcatccgcttccaattctgagaagagtgtatctaatcaattatttgatgcttaccaagaaactgacaatacactcagccgtagtgctatcagctatctgctaaaaaatggctgtaaattgaatgataaagaagaagaaccagagaagtttgctaaacgtcgccgtaagctagaaatacagattcaaaggttaacagacaagttaaccagtcgaattcccaaaggtcgagatttaaccgatgctaaatggctggaaacactgttgactgctgcaatcaccgttccaaaagacaacactgaagccaaacactggcaggatattctgttaagtcgatcaagttcccttccttttcccctaatttttgaaacgaacgaagacctagtttggtcaaaaaatgaaaaaggtaggctgtgcgttcacttcaatggactgagcgatttaatttttgaagtatattgcgatagtcgccaactgcactggtttaaacgcttcttagaagaccaacagactaaacgcaaaagcaaaaattacatcttcaacgacaacaatttggcataatgacattaatttgtcaccgatgacaaataattagtcactgtacaagaaaaaaccgcgaaccaagatagttggtgtcacggctttcggtatggtgtgaggagcttaactaactccatcatagatcaccaaatcaagaatggggatactcgtatcaattttggtaacagaatttttttagtaacaggttatttgaggatttagctatcagctatcagtgattcattctactaaagcaccaccacaactagaaccacatccagcagtacaaccataacaataatcagcagtttgtacttctttgatgacatctaaactaccaagttctaataatttactaattgtcaaagtttcaccattgtgagttcttgctggtaaattcatcatttggttaaaatcgcaatcataaacattacccaaataatcaacagaaatttcctcacgacacattaaattattaacggtgtcagggttaaaatgtgattctaaaaactgcaaatattgtttataaagatgtttacgttctaaatataacttagttcttcctacaggtaagttagtaatagtcagtaagttattaaagacaatatcaaaatgttcttgtaagaaatttttataagctagttgaagatttttttgatctggagttaaagaaaaattttcatcctttggtaactgaggattataaaccaaatctaaaattaaatttgcatcttgaccataacccaatttatttaaccattgtaaagcttgaatagactgaacaaaaacaccatgaccccgcattttatccacattatcagctaaataacagggaagagaagcaacaacacgcacttgatttttagctaaaaagtcaggaatatctgcaaaaccttccacaaaaaagattgttaaatttgatctaacaattacttgtttacctgcttttctcgcagcttccaccaatggtttaaaaccataattcatctctggtgcgcccccagtcaaatcaacaattttaatttcaggaaatttatgaataaaatcaattaaatcttgacaaactgctggggaaagttcctcagttcttttaggacttgcttccacatgacaatgagaacaagcaagattacaaagtttaccgagattgacttgtaaaactttgatttctttttttgttaaaggataatttagtttatcttggaaatttgtgattgatatagtctgcatggctgaatgctcacaaaagatgaaaaattgatgattacttagatgttgtaattacggttgtagtaatttataggttattacactaatcatagccgcaataggtaaagttaataaccaagaaaggagaatccgataaaaaatgcccaaatttgaatttttattaatcaaacctactccaaaaattgaaccgactgaaacatgagtagtagaaacgggtaatcctaaactactagcaccaattaccatagaacctgtgacaatgttggcagataaaccctcgatatgattgagagaagtaatttttttactcatagttttggcaactttgtgggcgttgaataaaccacctaatgacattgttacagctatagctatgattccgcctggaagcgaaaatgctttaataatgagaacgagagcaacaattttgggtgtgtcatttaatcctctagcaaaactcacgataccagaactcataaaatgactggtatcaataattttctggtgatttttgattttgaagttcaggttcatgtaatcaagaaatatgtaaattattgctcctaaaggtatagcgatgagtggactaaataagaggggtaaaaaaaatgattttcctaaagctgaaaaattcactgggaaaccttgagctactattccagcaccaaccagcgcacctgttaaactgtgagttgtagaaataggaaaaccaataaaggtagcaatgatgatagtcaaagcagcaccaatagctacagctatcctaaattctggtgtattggcgatcgcatcgggaactagacctttaccagaaaagtttttaattagtgtactagcgataaaaaccgaagcaactgaaccagcaaaagttgtcaaagttgcccaccaaattgctgttttatagctagtagtttgacttccaaataatgttgctacacctttaaagttatcatttgcgccattagaataagctaaaaatagcgtagccagaaacaaactgatgaaaatcattatttatttacaaaaaattccctaacagcaaccaccaccatcataataccaagtagaatcagtaatcatgatttcttctggtttcaaatctcccaatttagcagccgttttatcacaaactgcggcaggaataccacgttgtaaaatatgtcctgctccatcatcaaaaaatgattctgaacctgcataaattgctgttttacctgtgaaaatacaagcaccgtcttcaggaatttgcaccttaaaagaaacggaatcaagactttccaaaagtagattttcttccaggttataagtttgtttatctaataatctatagggacgacgggcgcgaatttctatttgtccaaatccagcattgataattaattgtgtatattcttcataagtgagcgcaccggataaacacattgcccttaatctttcatcttgtcgtaaatgttggggaataggacgggtagcaatggggtcactcatttgtaatctgccactgggttttaaaactcgatatgctgcttttaaagcgcgggttaaatcagcaggttcaaagatattaaaaagacaattttgggcgactatatcaacagaggcatcattgacaggtaaattaaaagcatccccggcaataatttccacaaaactaggatcaaaccaaggattttcttgggcagcaatttctaaatttcttttcgcagcttctcgcatttctgctactggttcaactgcgatgacagcaccaggacgacgggaaaaataagcaaattgtaaagcttctaaaccaccaccgacaccaacatataatactgtaggttggtttgctaattcgttagtatgaacggtagttccgcagccataattcatttcctgcatgactaaaggaatttttaatcctggtagttgcaggggtgtactttggacacaacaaagtcctacttctggtgtttgagcaacttcgctgtaaaattgggctgcggtttctaaataggtcattgccgttttttgggtttaactttgtatatattgattctgcatattaatatattgacatatattctgaggagattttaatgatttttacagtgattacggtgattaccgtagaaaatttatggaactatatttaatccgtcacggtatcgcagaagaacatcaaccagggttaaaagatgaagggcgatcgctcacccaagaaggcagacaaaaaaccgcaaaagtagcccaaagattaataaaacttggttttaaatttgatttaatcctcactagtcccctagtccgcgcccaacaaacagcagaaatactcatggcagccggattaagttctcagttagaaacctcagattatctcagctttgaaggcgatcttcaatggtggctaagagactggttagaaccgagaaaatatcctcaaaatacccaactagcactggtgggacatgaaccctgtttaactaattgggctgaaattctcctttggggtgaagcaaaagaacaactcgtccttaaaaaagcaggtatgatcggaataaaagtaccagatgatggttctcctgtgggtcgtagtcaaatgttctggttgacacctcccaagtacctactataacagtttttcgagctttcgcataaaatagttgttaaatcggcaactgttatagtgaaaaggatctctggtaagttagcgtgttcagatatttcacaaagcaagtggtgtagccatgacggtgtgcgaatataagcctggtttagaaggcattcccgcagcccagtctagcattagtcatgtagacgggcaaaagggaatactagagtatcggggcattcggatcgaagaattagcagaaaaaagtaccttcctagaaactgcttatcttttaatctggggaaaattgcccagcaaagaagaattgacagcttttgagagtgaagttaacgctcacagacggataaaatatcgtattcgggacatgatgaaatgttttcccgaaagtggtcatccaatggatgctctccaagcctccgctgctgccttgggtttattttattctcgtcgtgacttacataatcctgtctacattcgtaattctgtagtccggttagtagccacaattcccacaatggtagcagcgttccagttgatgcggaaaggaaatgatcctgtaaaaccgagggatgacttagattatgccgccaacttcttgtatatgctcaatgaaaaagaacctgaccccctagcagcgcggatttttgatatctgcttaattctgcacgttgagcatacaatgaatgcttctacctttagtgcgcgagtcacagcttccaccttaaccgatccctatgcagttgtagctagtgcagtagggacattaggcggaccattgcacggtggagcaaacgaagaagtaatacagatgttagaggaaattggctctgtagataacgtccgtccttacctagaagatcgtctacaaagaaaggcgaaaatcatgggatttggacaccgcgtgtataaggtaaaagatcctagagccacaatattacaacttttagcggtgcaattgttcgagaaattcggctacgacaagttttatgaaattgccctggaagtagaaagggtaatggccgaaaaagttggcagtaaaggaatttatcctaacgttgacttttattctggtttagtgtataggaaaataggaattcccacagatttgtttacaccagtatttgcgatcgcccgtgttgcaggttggttagcacactggaaagaacaacttgaagaaaaccggattttccgacccacacaggtctacaacggtctacacgaaattccttacacttccattgagcagcgttaactacctgggaaggtgacaggtgacagttatgaggtattttcctgggaataggtgataaatacccaattttagatttgagattctagattgatgctctcaagtggacagattgataagtgtcatctgtcagcttgatgaggttgacaatcaaaaatctcgaatttacatggataatctggaattggcattgtcatcacaacctgctgtacaggaaaatcagacaatttgcatagaatataaaaccgttaccaatttggggacggtaactttgtcttgtcagaataataggtgacaggtgacaagtgacaggtgacagtaagaagagaaaaggaagaggaggaggaaagaggttttttcccaatcaccaatcaccagtcaccaatccctaatcaccaatctcaatctcaaccataagcagaagttgtcatctgggatcaaaagggtaaaaccatcaaaggatatactaaactcaggaattggcaacaaatctacaatcaggcatcatctcaatagagattctaaaccagtaaatttacagatattaaattaaataatgtttgttaatttactatgactcgacgaattacagagtagcaaacatgaatgcaggaattgacctccaaggaacttttatcgaatccgtcaaggatttgggcataccagcaggggcagccaaagccctgtggatgccattaccaatgatcctgatgctgattggggcaacagtaggtgtactggttgcaacctggctagaacggaaaatttctgcggccgcacagcaacggattggtcctgaatatcaaggtccatttggtttgctagtgcctgtagccgatggtttaaagctgatctttaaagaagatatcgtaccagccaaagcagatccctggttatttacccttggtccaataatcgtagtaattccggtattcttatcatttttgattgttccctttggggagaatatcgtgattactaacgtcggtatgggcgtatttttgtggattgcattatccagcattcagcccataggcttattaatggctggttacgcatctaacaacaaatactccttgttagggggtttgcgggcagccgcgcaatcaatcagttatgaaataccattggcgttgagtgtattggcgatcgccatgatgtctaacagcctcagcaccattgacatcgtaaaccaacaatctaacttcgggattttgggttggaacgtttggagacaaccactaggtttcatcatcttctggatcgccgccctagcagaatgcgaacgtctaccctttgacttacccgaagcggaagaagaactggtagcaggatatcaaaccgaatacgcagggatgaaattcggtttattttacttaggttcatacatcaacctgatcctgtcttccctactcgtagcaattttatatttgggcggttggcattttcccattcccgtcagcttgataggtgactttttgggaatgagtgaaaccaaccccatcttacaagtaatcacagctgctttaggtatcacaatgaccgtacttaaagcgtattttctcgtatttctggccatcctgattcgttggacagtaccacgggtacggattgaccaactgctagatttaggatggaagttcttactaccagttggcttggttaacctgttattaaccgcagcactaaaactagcctttcccgtcgctttcggtggttaaagagattttagattttagattttagattttggattgaatcttaaatctaaaatccaaaatccaaaatccaaaattgttagagaagagacacaaaaaatgctaaagttcctcaaacaagttggtgattacgccaaagaagcagtacaatcagcgcgttatatcggacaagggttatccgtcacctttgaccacatgcaacgccgccctgttaccgtacaatacccttatgaaaaactgattcctggtgaacggtttcggggtaggattcactatgaatttgacaagtgtattgcttgtgaagtgtgtgtgcgtgtttgtcccattaacctccctgtagttgactgggaaatggacaaagccactaagaagaaaaaactcaaacactacagtatagatttcggagtttgtattttctgtggtaactgcgtggaatactgtcccacaaactgtttatccatgacagaagaatatgaactttctacttacgatcgccacgaattgaactacgatagcgtagcattaggacgcttgccctacaaggtgacagacgatccaatggtgacaccactgcgcgaactggtttatctacctaaaggcgtacttgaaccccacggagtccccgcagatgctccccgtgctggttctcgtccagaagacttagttgaaagtggtaatgggtaatgggtaataggtaatgggtaataaatcgttttttccaattaccaattaccaattaccaattaccgatcagcatttatcaaaacatcaagaggatcgaaaaaagtgaatttagccgaaggagtacaatctgtttcatttggcatattaggtgtaatgatgattggcgcagcactaggagtagtgttgttttccaacatcgtttattccgcctttttgctgggtggtgtattcatcagcatggccggactttacctattgctaaatggtgattttgtcgcagcagcacaaattctgatttatgtgggtgcgatcaacgtcttgattttgtttgccatcatgttggtaaacaaacgtcaggatttttaccctttacccagtgctggtttacggaaaatcattaccggtgtagttagtctgggactatttgccctattaagtacaatggtactggcaacaccttgggctaatacctctacacctgtagttggtcaaaattccatagttttaattggtgaacatttcttcacggactttttgcttccctttgaattagcttccgtattgttgctaatggcaatggtaggagcaatcattttggcacgtcgggaatacttaccagatgaagttaccccttccgaactgccacaaaccatcttaaccttgccagaacgccccagagaattggtatctagtggcactgatgactagggtactggtgactggtgactggtgactggtgactgggaatatgaatttacccaatgcccaattaccaattaccaattaccaattaccaattaccaatcaccaattaccaattaccaattaccaattaccaaactatgcaacttcaatacttcttactacttgcagcagctttattttgcatcggtatctatggtttaattaccagccgtaacgccgtccgtgtactcatgtcaattgagttactgttaaatgctgttaatctaaatttaatggcattttccaattttctcgactcaacattaattaaaggtcaggttttcactgtttttgtgattactgtggcagctgcggaagcggcggtagggttagcgattgtactggctatttatcgtaaccgtgataccgttgacatggagcagtttaatctcctcaagtggtaacagtacgtgcaattaaagcaggtaatcatagcttacaaagcgcgagactcccaaagtaaacgctgggctgaactctgcgctaaacaattagaagaccgccaatgtcaagttttggttggacctagtggacccaaagacaacccctatccagtgtttttggcatccgccagccaaccaattgatttagctttagtccttggtggtgatggtacggttttaaccagtgctagacatttagccccggctggtatccccattttgggggtaaatgtgggtggccatttggggtttttaactgagtcaatggatgagtttcaagaaccggaacgagtttgggatcggttatttgaagatcgctatgctctccaacgccgaatgatgttacaagcggctatttatgagggtcatcggacaaatttagaaccagttacagaacattacctcgccttaaatgagttttgtattaaacccgcttctgctgataggatgatcacctcgattctggaaatggaaattgatggtgaggtggttgatcaatatgtgggtgatgggttaattatttctactcctacaggttctacaggttacacggtttcggctaatggtccaattatgcacgatgggatggaggctattaccatcactcctatttgtccgatgagtctttctagtcgtcccctagttttacctcctggttctgtggtcagtgtttggccgtttggggattatgatttaactacaaaattatggatggatggggtgttggctacttccatttggcctaatcatcgtgttgatgtgcggatggctgactgtcgtgctaaatttatcgttttgcgggctaataattcctattatcaaactctgcgagaaaagttactttgggctggtactagggttcgctacactaatcatggtcagcacaattaaaaataagtattcagccatcagctatcagccgtcggcttttgaggctaaaagtcaattcacctgaaaaaactcaataccaagatcccaggtttcttgtagaagtccgggatctattactatttagggcttttgttattgacaaaaaaaataaattgtgtaattacaaaatttgtattctattgccagattttagtgatcaaaatgttcataattagatattaaatcctcttagaatttttcacaaatttaagtattaacctggatgtaaatgtattacaatcctatcacttcatctttttcatctgtacagtttactgattttccggtcttggaaagtgaaaagtatatcctgcgactggctaaaactgatgcagagttagaatctatttttcgcttacggtttcaggtttttaatcaagagttggatttgggtttttctagttctaatttttctcaaatggatcgggataagtttgattatttttgtgatcatttattgctgatttgtaaaaggactggtgcaactattggtacttatagaatgcaaacttatacaatggctgcaaaaaatttaggttttgatgctgctgatatatttaatcttgctcaaattcctgattttatattgcagtcttctgtagaaattggtcgtgcttgcatagctcaagaatatcgcaatagttacacacttttattactttggcaaggtttagctaattatttaatttatactggtaatcaatattttttcggttgtgcatctttgttaactcaatgtcataaacaagctgtttgtgcttataattattttctctataatcattgtttacattctcatattttagtgaatcctcatccagaatattccatagaaattaattctaattgtccagatatctataatgtagaaattccgaaaattttacaagcttatttgagtattggtgcaaaaatttgtagtcttcctgctattgatagacagtttaaaactattgattttttaattatctctaatattggggattggggattgggtatggctgatttagcgtaagcattcagccatcagcaagccctatgtatctgataccaattttatttgaggttgccctattccgtaggggcaattcatgaattacccctacaatgtataatttgacaaaaatctgattatggcagtaaaatctaaaattgccggttaattgttcattgttaattgtccattatttaatttgggttactctccgataagttgctttgcgtctaaacctgttaactgtgtgacttgttctataggcattccattatttaacaaattaactgccacttgtcttaatttattttcagcttgttcagcccgttgtttttcttgttcagcaagttctaaagaagtaggaaataactcaccgatcttatttgcccagcgtaaccaagtggcattgacaccgcgataattaccctgccaacgtactaaacttaaacctaaaactgtacttactaactgatttttttcattaaaagcaatcggttcatacacaccggtattaatgtgaaaacctgcaaaatcatctgggttaaaaggatcaaaccaaaaatattcagaaacacgcatttgattttgataaatcagttttttctcatttttatcatttttagctgtgctttctgaaagtaattcaattactacatctggtgattttccttcttcccaaactacccaagaaagacgctcttttttgggaactcctaagacggtaaagaagtctggaccacgaaaatcctgattttttaattgcgctaaactgtagtagacaaacatattgccccctacatatccatcagtcctttgatctagccaaggctgaatggtatcaattaaaatatccaattgtaatttatgtctttgtgtctccatcggaataccgtcatcataaggaagttctgcctgggtgggtggcatttccacagtagtttcagtcgcaagagtttctaacatatagcaatctgatatgatgactcagatcattcacgtttcctgctgtttgttgtttttatccaacaaaaactgctgatcaaaaataggaagtttatctttgctgtttgtggaaacgtgaggaacaatctttgtattcatattagcattctcttgaaagaaagtttgtgtgtaaataatgatgcactttgctttcatttttggctggctgatcaatgcttaaattttcagttctgctaaccccaaataacggataccttcaggagaaatatcaaaccgataagggagaacttctaaaccttgtttaattgcttcccgtaacaatttaccatatacaggatctgtgctatctcctggggcaaattgtgtacaatctccgcgattgataaaatacaacattactgcccgactttggggtaaaacttccattaattcccgcaaatgtttttgtcctctggtggtttctgtgtcgggaaacagggctaaagttccctgcgaccaagttgtattttttacttctaaataaatggggcgttgtccttcttttccggtcaggtaaaaatctacccggctttttttgtcttttccataaacaacttcacctttaacttgtgtatattcacttaattctgggaaaagatatttctctaaagcctgtttcacaactcgattaggtaaagcagtattgacaccgacccaagttggtgctaaatcatctacttgaatcaattccagtgtataagctaatttgcggttaggattatcacttttagataactgtacaggactacctactttggaaactcctgtcatgggtcctgtatttggacagtgtgctgttacaacctccccggagtccagttgaatatcagcaaaaaaacgcttgtagcgtttgagtaaaataccagtgtataatttagggtactgatacagccagttattcattctgctaggtaaattataaatttgaattaatagtaaatatacgataaaagaggttagcaggaggaatgagagctttgaaaatattgggaaaatattgggaaaatattgggaaaatattgggaaaatatttttgttcccagatgagtaactatataatggagtagggaatagggaatagggaatagggaatagggaatagggaatagggaataggaaagtgagtagctagagttcttgttaaatattccaacttaataaattttgtagtcacatttacaacaattactaaataattgcttataatagatattacatacctctcatgtaaaaaatgggaggaatttaaaaatccagttcgcattcagctattagcggtcagcagtcagctaaaactacctggaaaatggagtttttgctggctgaataattataaaatgcaaggagaaaaatcctatgcaacaagtatcttctgtaacggggttagaatatgcttttctgtttactctgagaaaggtaaattctattaataatcaaggtttccagccattttttgagaacttacctgttgatccttatattaagggcaaatatcgctctagaaggttatcaagagtaatggttgctgagaataagttgattaaactttctcatggatatttgtgccaaagtcgagaatataatcctttattgggtgatatcaaaagagagttcgcagaattagaatatggactgatagaactggaaatttttaagaatttggttctagcatttattgattcttgcaaactccatccagaagcagaaattggtattcatcaaatcagaactacttgttcaccaggtcatttaggaaatcccgcccctgaaggtattcatcaagatggaactgattttattggcattttttctgttggtaggaacaatattcaaggtggagaaacacatttatatactgctaaaaaagagaaaccagtttttcacaaaattctccaacccggagaactgcttttagttaatgatcatgagttcttccactttactagcccgattaaatctgaaaatccagcaccgggaactagggatgttttcgtgttgacttctcctagtttaattcaaccttaaaaagggtaatactcagatccccgatctcttaaataagtcggggatatatccactttatatttgatgataagtatgtcgaaaaaccacattttccgtaggggttgagcattgctaaacccctacaacacgacaacaataaatttttgtgatataataaaatttgtgatataatattgttttaaataaatttaaatcgagttcatagaaaaaactaaattatgacttctgaattttacaatcgcggcttagaaaaagcgaaacaaaaagactatgctggtgctattgaagattttaaccaagctatacagctagatccttactttagtacagcttacatagaaaggggtttagcttattataaatcaggtgcgactttacaagcagtttttgattataatgaagctattaagctggatggagaaaatgccaaagcttattattttcgggcgttagcaaaattaactttaaaaaatcttcctggtgctttagaagatgtagaaaaagcgattcagtttaaatttaatgatgctggtgcttatgatttacgggggatagtacagcgcaaacaaggaaatattccagaggcgatcgctaattttaaaaaagcagcagaattatatttagcacaaaaagataaagaaaatgcgtgtctttgtttagagaagattaaacaactacaaccaaaagcagaaccaaaactaaatcaagaaatcaataaaccagcagcaattcccacaccaattatatctactcaatattatttcacacaattattagaaaaggcagaaaagggagatacaaaatcggcaatttctgatttaaattggatattaaaagctgatgctcaagatgcccaagcttattgctgtcgtggggtggtactttgtaaaatgggtcaatatcgagaggcgatcgcagattttaatcaagcaataaatttaaattttcaagatgctattgtttatcggaatcggggaaaagctcgttctcaaataggagattatcaaggggctttggctgatatcaatcaagccttgaaaatacaaccccaagacaatttagtatatattgctagaggtaatgtctatcaatcaatgggcaattatttagcagcaattcaagattattctcaagcaatacaaatgaatcctgagcatccattagcttactataatcgtggtattgcctacacttgtttagaagaaatgcccaatgctgtggaagattatcaaaaagcagctagtatctattgtgaacaagaagactgggagaattatcaactagttttaaatagtctgcaaaaaattcaatcatctatcccagcaaccaacaaagccacctataatttattacgtcaaagactattacgtatggttggaggacattgggaaatagccgcaagattaattgagcaaaagcaagatttttatccaggtatgtcggaggagtggtatttacaaacagtaattgatgatttggaaagagatagacgataacaattgataatggacaattgacaattgacaattacatctttttctcattaaaaggaaaggttttaaacttggcatcaaacaattatcaattatcaattatcaattatcaattatcaattacccagttgctacattattgtgaaaaacgccaaatcttaattttattatcctctccactgctaactaaagttttgccatcagcactaaaaaccaaggatgtgacggtgttagtatgtccagtaatagaggaaatttcctcacctgtagccacattccatagtttaatattaggtttaatagttggatgacattctatacaatctcgattaccactaacaagagttttaccatctggactaaaagctaaagatgtgacattatgatcttgtttagttatagtgcgaatttccgtttttgtattgatattccacagtttaattgtgcgatcgcgactagcactagcgagaattttaccatctggactaaaagctaaagatgtcacagtttgggaattaggagttaatgaataaattgatttttctggtgatttttctggtgatttttcttgggtgatattccacagtttaatacttttatcaaaactaccacttgctaaagtaaaaccatcaggactaatagccagagaacgtacccaataagtatgatctttgagagtaagaattagctttcctgttgctaaattccaaactttaatagttgtgtcatcactagcactaaccaaagttttcccatccttactaatagccaaagcatgaactgaatcagtatgactaattaaggtatgaattaactgacctgttgctaaattccaaactttaattgttttgtcatcactaccactgaccaaaattttaccatcaggactaatagccacgacattgattttttgtgtatgtccttgcagtgaataaatctcttgatctgtggtaatattccatagtttaataatgcgattaccagcactagcaatagttttagcatctgaagtaatagctacagaggaaattgattcatttggttctgtgatagttttcaataaagaaattttttctaaagactcctgtggtggttgttgaacaatagtatcactcttagtttgacttttcctattttgcaggggactccagcgagaaaaaatagttgtttgtagttggtgaaagtgtctataaccaaattctcccaaacctaaaaatactattgttcctactattaaaattgaatttctcagcaaaatatatttttgaggataaacattagctttctttgctggtgctgataataaagaattactagctggtgctagtagatgtgtgtactgtttacttaaatctctaatcacttcatcagcagattgatagcgattccgaatatctatttgtagtaacttatcaataattattgctaactcataactgagaggagaatgcaaataagattgccaattatttaaccaactatatccatgttccatccataactgaaaaggagaaattcccgttaataaatgaaagcaggtagcacccaaactaaataaatcactagcagggtacgctttaccatctctgatttgttcaatggcagaataaccatgtgaacctatagaagttccatgttttttctgcactttagctgttaattgtttagaagaaccaaaatcaatgagagttaatcttccgtcacttttgcggcggataatattttccggtttgatatctcggtgaataactccacgactgtgaataaatttgagaataggcaacaaatctaacaaaatagattgaatatcccaatctttgtagtttttccgtaattgcaactcctgtaataaattttgtccatcaataaactgttgtaccaaatacagacagttatcttgttcaaaataagctaagagagtgggaatttgtggatgttctcccagttctctcagtcgttttgcttcttcacaaaacaactccattgcttttttttgtgaccaagttccttggaattttggtgctaactgtttaacgacacaacaatcatttaatttatctgtatcttctgataaataggttctaccaaaacctccttcatcggaaagtacccgaatcacacggaaacgatttcttaaaagtggtactaagggagtattgcaactttgacaaaactcttttccttctggattttgaggatttttgcaatcaggatttaagcagcatatcatgatcaaagaagagtgactgcatgataaataatgctaagttatttccgcattttcccttgatttcatggcttcttgctgactgaaatggtagatcaacctggtgagggattgaggaattacttattatattccaagtttttaaaatgtcttctgttttcctgaagatgggaaaaccacaagagccattatttatatcttttgatcataccgcaagctcaatcaaaaatcatgtcaaattgccatgacaatctttgatttatatgttattgatttctgagaccaatactactaaatgcagtaatcactcaccaattacccattacccattacccattacccattacctattaccaattttaatgtgtttgtaatgctttaaaccatttatttagaactgtattgatagtttgtttaatttgatgcttacgattccatttttggaaagcagcttcatagtcttcacctttgctttgaaaggtgttccaaatatcaagtacaatggtgagtccagagaatagtaaaatgtatagtgaccaagaaagaccagcaccaccaaccaaatctacaagtatgaaaaaactattaacaattgcataattacccagacgttttttaaatttaccttggcggtaaagatcaaaagctttgcgttgttgtacttcgctttgttggactatccaatcacattccgcttgtttaactgcttctggtgaaatttgtaactcggcagcaatttcgataatttgctgatatgaaaattcttgatcacgatcatcggtttgacgagcgatcgctaattgtagaatttgctgcacctgttcttgactgtaggaacgggggttgttagattcaaatacggtcataatttttgctctgataagaattttcataatttgcactacttctacagtagcaaatctagatggtagatggtaattggtgactggtgactggtgactggtgatagggttattaacttcccctaccgccctatcacctcatcttcccacccagcgacaacagaagtagtcatttgagggcaactttggggctaaaagctgcaaagatgtagatttacccaggaatttaaggtaatattaaaaggtaatattaaatattattgccaagttacctgatgctatgtttgatatattgccctttagatttgaattagataaaattgcgatcgctggagcttgtttatggtctttagctttatatttagctttagcatccaccagagaatgggtaatagatcaattaaatcgctggtttaattttgccgaaagattcctttacaccagtgaaacagaatttgaaaaaacccgcaaggccagagaatcacaaaatgctttttacgcttcactttttagcattgtaccttttttcatctttggtgcattatctaactggggtttagaaatcagtttaggtgagagttggggaattagcacaggtatactgtcctgtatgggtgcgggtatttatgaactagggcgtagagatggggaaaattctgattagatgggtgtaaattgagtaaaatgtggggacgataaaacacatactagagatgttacattgaaaaatgtgttaaattgatagaaatataataggctattcggcaaaaaataaatcaatctcaaagttaaatcaggtgggaaaaacccaccctataaaacataactcaaaacataaattaagccgtccgaaaacgggctaattcttttcctgttttagcatcatgggcgtgaacagtacacaccaaacatgaatcaaaagaacgcgctacatgacccacttctacaggatcattaggatcagcaataggtgtacctattaacgcttcttccacaggtccacgttttccagcaccgtcacggggtccaatattccaagttccgggggcgataacttggtattgtttaatcttaccttcttctatttccacccagtgacacaaagcgcctctcgctgcttccgttgcaccccaacctttaccgtctttttcttggggtttaatataccagggttcgtttaatttaaactccttcaaacaacgttccgcttgccgatataatttgactaattcgtgaactctcgctagttgtctgaggtgaacatttgcaccgcccatttttttgaagacatcaagaataaatgggtcataatgttgccatgactctccatgttttccacctgcaactaattgacgtgctaaaggtccagcttctaatcttcctaagtcttggtgtaggactgcacttgcccaagaatatgcaccgctaaaatctttttggttgttgatagttggggacgttttgcgatcgctcggatgccaatcttgagtaccttcattataccaagaatgggttaaattttcccgtgcaaaagcctgatccatcaatctatgagtatctttacaaccatcgtaaacaccgcttttcataattaccgcagcgttacgtccttcaatggtgggtttattatatctatcctcatggggtaaatatccccaagtgacatatttacccacacctacaccatatctatctaacccgatatctagacccatacgccagtataaacctaagtcagattctcggtgtttgatatcttcatttaaccatttttggaaatcctcataagattgaatttcctcatatctttctaaagaacatcctaaccaaactggttctaaccaattagtgcggaaatattctaaaatcccccaagcgcgggtaatatcagtcaaagtgggggcgcacattacaccaccaggaaccatataactgctatgggaactggtgatatactgaaaatgttactaaagaacttattttttcaggtaattttgctcagttataacattttattttcactatttccgcttttataaataagtgaatatttagggaataattcagtaaaatcagggaaattgcgtaggcgcagcccgccgcaggcatcgccaaaagttaatatcggaaacctatcccccatctctacatgaggatgcaaatacagactccggggactggttcgcagatatgtttgcagattttgtatagattagacttctccagaaaagaaattatggcttatttatgggggcaggtcgaagcatttgggatatctagatgtctgatttttccgtcaaattatcgcccaaatgcttcgcccctacaatatattaaaaatcaatacattctattttggagaggtctattttgaaccgcagaacactacagacggtaggtatagggaatggcgaaaataaaagcaacggaattacagtatcaagcagtttttgaacagaagttaattgaagctaatagtaatttaaaaagggagagagttaaagttagtattaaacaaactggaaattctctccaattacgcgctacgttacctttaaaaccaggagatagtagtgtaggtaaacagaaaaaacagtatgatttatctctgggaatacccgcaaatttagagggtttaaaaactgcaattgaggaaagttacgagttaggtaaattaattgctcgtcatacttttcaatggaatgagaagtatttaggaattaaatcgagagagaaacaagaacttaaaaccattggggaattattagatacctttgatgaaaaatattatcaaacccgtcaaaaaactatcaccagtgaaaatacttttgctaactatatatctgtgattaaaagaaactttgatttaacaattttagctactaaggaaaattttgaggaagtgattaattcagttaatggtaataaaaaaaatgaattaattgcggtaacttcggttttgatcaaaacctttaatttaggatttcaattggatgtaaaacgagatcacgttattcctaattatcgagaaataccggatgatgaaaaaattatctctagtttttacctctttgaaaaattcgccctcaaccgcaaaaatacaaatattagtgatgaaatagacacatgggaaatgtggcgttgggtatatggaatgttggcaacctatggattaaggccaagggaattatttgtagaaacggatattaattggtggatgtccccccaaaatatagatcatacttggaaggtgaataaaaataccaaaactggatatagagaagttattccttttgtacctgaatgggtagaattatttgatttaaaaaatcctaaaccgttaaatattttagcaagaaaacttgaaaaaattgcttctgtacaaaatattaattggatgagaagagatatatccagatggtttagaaaagtgggaattgagtttcaaccttatgatttacgccatgcttgtgcaattagagcgcatcttcagggaatagcaattaaagcagcagcagataatttaggtcatactgttgatgaacatactaagacttatcaaagatggtttgggattgaaaaccggaaaaaagcttttggtgaggtaattagtcaaaggtcgttaattgagttgcagaagaatgagattttggcgttaaggatggagaatgaaaggttgaggttggaggtggaaaggtggaaattgttgggaggtaagaatttataggggtgggaacatttatacgaaaaaatcccatataatcctgctgttaagggtaattatagtgaaaaattctgtataatatctgaataaggatataataaataagttttccatataatacgaaaataggtgcttgtaatgcttgatatatagggattaagattagtgagctagatggttaaatgactgttaaaataccctgtattgcgtatatatttattagctataaatgaggtgtataagcatggacatagatagacgaattttcctggatggagagaaattgctgcttagtaaagcaagtaatgctgttttcaagattagcgattacggattaaagtcgcttccgtatgatcaattgatgtcagtcatgggttttaatggtaaagaagctatcggtggcaaattgcatttaacaaactatcgcttgatcttcaaatctcaccctttaaatcgggttacaggtaaattcagtatttttttacctacgattaatagtgtgcttgatacatctcaatttctaacaaagaaaattgaagtatctacgcatacgcaaaattttgagtttattttatggggtattccatcctttattcaggctattaactctgcatcaaatagtttgactgaaacgcaaaagactgatattaagaattacgtaaaaaaggattatgagaaagtgggtgatggcttgaaaatttctaaagtcatggataaaattgcattaaagatgccagatacagtaaatcaagttcttgaaattgctcaagatcctatcagcctcacaggaatattgaacgtccttgaactgttggaaatgattatgaaagatggtgaatagcagtttgtttccttgccattttgtagtaaatgggtagcaaaattgtgggtaaacctatgataatgtaccttttttgaatacgagtttgatgaaccgcttgttttaacactttgcttactagataattgtatgaaaaaatgttatatgtaaaatttgtatataatttaagttgtattgagacaataatctggaaaaattatgaatcgtacggcagtcgaaagagcatctgcgtttgaaaaattagtagctgatttgttaattgccttgggttttgagaatgtgacattgcaatccactatagcaagcccggataggtgtgtggatattcaagcttataatatcacaaaatcaccaactggcgaaaaggtttctgaattgtggcttgtagaaactaaatactacgttaacaatcaaattgattcccgtacaatcgcacaactatcaggtattcttaatattgaaaaaagagctaaggctctccttgttacttcaagtaatttgacttcttctgcttggaattacgtgcataagttaaatgcctcagttgaaaaaagacttgaagtatgggacagagataagctactaactctattggcaaaatttccacaactagaagaaaaatataaacaaattacttccagctttccgttaagcctatccacagctaaaaacgaaatatcctcctcactaatacaaaggctatcaatctgtcctttagggaaagaagggtggaaagattttgaagatatttgcacacagattttaactgaagtatttgttcctcctctcaagccaccaaaacaacaacctcgtactctcaatggtcttgaaaggcgtgatgcacttttctcacttagggatgcagacatagatactggatgggcaaagatttgtagagattttgattctagatttttactgtgtgaatttaaaaactataccaatccttgtactaaagatgaagtaaaccaaactcggaattacttaaaacaaactattggaagatttggtataatttttagtaggaaaggcgcagattgtggtgcttatagaatgcgaaatagtatatattctgaggaaaaaaagatcattttactttttgatgacaaccatctgattgaactacttaaactcaaggccgctaatcaaaatcctatcgatcttatccgtgatgccatagatgatttctacatctctcatgagtgagatatcagctaccagccacataacaacgccacttcaccagatagtgcgatcgctcaacttcttttttgtgcttccttaactattattaaatgagatgtttacagatagggaagcgatcgctcaatatccaaacaatatattaataaaaatatgcgtgaaaacattgacactcaaaagttagaacgtctgatgcaagtcttaggtagagaagcccagggttcaggctgcatctactttacaggaggagctagtgcgctactaattggatggcgtaactccacagttgatgttgatcttcgtctagatcctgaaccaccaggcatttttcaagctattgccaaactcaaacaagaattaaacattaatatcgaattagcatctccccaggatttcttaccacctcttcctggatggcgtgatagaagtgtattcattggcaaacgaggtcaaatttcgttttatcactatgattttaccgcccaagctcttgctaaactatccaggggatttgaccgtgatattaaagatattgaagccatgtataaacagaaattattctctttgaatgatgtacggaattgctttgaagcgatcgcacctgaactaatcagatttccctctctaaaccctgatatccttagaagtagaattgagaaatttattgaacgttgtgaaaataacctggaggaaaatcaatcatgaatcttaatgaattaccaggtgcagaaacaatattacctggactgaatgatcttcacaatggtgaatctaatacaattggagcattattaattgcaattgcctcaacacggttatctgaagcaggtttagatatccctaaagatcacctagcaccagaaccagagttaactttatatgctaatctccaagataaacaagaggatgcttacagttactataatgctttgcttaatcaactaaatagcttttgcaatgctcttgaattaagttataaatatcagccgtctaaatttactgtttaacatctttgagaaaagcgatcgctcaatctttattttctagtgcttcgttaactactaagtcgtagggcgaccaaattggatactctgaggcagaaaagattacttgtaattcagcatttgggatttgttttgctaggagtttcaagagtgataatttatctgactgactcagattattgactagaggaattaactcagcgagtgacatattttaaatttttagatatacaataatacattgattataagcgatctgtgaggtaaaaattagaattactcctctctacaaagctataatgtgattgaagtcaaaaaaccataacctgaaatgtcaaccattgaacaaattgaagcagctattctgacgcttccaccagaacagtttcagcgactccggcaatggatattagacatagactaccaacattgggacgagcagctagaacaagacatcgcagacggcaaactggaggctttagcagaagaagcgatcgctcaatttccttttttgtgattccttaactgtgattaactgcgatctcatgagtaagcgatcgccaattctgtggggtgcgttaatgaaatgtaatgcacctgataaattcaccattaaacatctttaataagtggggtcagtcaaatagctaccatctcaatagcgtttcaatgctataattggtaataatatagaaaagttcttgaaatgtaaaatcttatatgactactctcctagaagttgaatcagcaatcaagcaattgccagagagtgaagttcgtgatctggtaaagtggcttcaagaatatattgatgagatgtgggatcagcaaattgaggcagatttatcatcagggaaattagatcgccttattgctcaggcagaaaaagatattgcagccaacaacgtgagggatcttgatgaaatcctttgcaacgagtgagttttggaaaacttatgctaatttgtcacctgagatgcaagagcaagcgcggaaggcttatcagctttggcaggaaaactcacttcatccctctttgcacttcaaaaaagtcggtaaaaatctttggtctgcccgtgtcactggtggatatagagccttagccttaaaaaagggtgacgattattattggatttggatcggtaatcacgatgaatatgaaagtcttttaaattagcccgttgtggtaagccagtttgccaattctatagggtgcgttaatgaaatgtaaagcacctttttctgtggcatgatgagttcgataatctacaatctaccttccgtgccaacgaacaattctgaaatacagaaccaagcaagaaacatcttggatgcaattgcgtttactccctttgagcaatgccaacccttgagccaggattttagcgatattcctgatcgtccgggtatttacgcagttaggcatagatatcaaggattgctttacattggtaaaaccaaaagcttacgaggtcgttttaaaggtggacacaaggcttttttgtgggcttggctcgatcaatataaaagtgaagatgtaagaattgcggtgcagataataccttactcgaaaaaccctgcgttattattagaactagaggcgataattttgagagcgactgagccaccatataacgttaaaatccatatcgagtcctaacccatgcaagtgaaaccttcggagcaaatttcgtccgatgatgcagagattattttaaaacacttaccagactggattcaagatgccctgatttctcgtgctaatgaaattgattatcccgttgaagcaattattgagatggcgttcacgtagtgtctctgaaagagaatcgccagctttctagacacagaagcattaagttttgccgactgtaagccagggcgaggtcaataagtctaataaacatctttgcaaaaagcgatcgctctacttccttttcttgtacttccttaactattattaaatgcgatacctacagggagggaagcgatcgctaatcctgtagggtgcgttaatgaaatgtaatacaccttatctgaatctgattggttttgtaaaaaaaattctcgctaaactataatcagagaaacagcaaaatcagattatgaacttagatacaattcaacaagatattgcctctcttcctcccgatgcacaacaaatcatagtcgaacttgtagaagtcctaaaaaaaccctatcttctgagtcaacacaaatcttcagaaaattccttgcaagactggtcagactttatcggttgtatagaagctgaaactgacctctctaaaaactataaaaactacttagatagtgaacttaatcaaaaatatgatcatagttgatacaggcttttggttagctcttgctaataaacaagatgtagtttatatagccgccaaaaaacgatttcaagatttagctaatcagcaatttattacaacctggtgtgtcgttacagaaacttgctatttgttacaaaaaagagtaggagtagatgctccaaaaatatttattaatatttattaatatttattaatatttattaatagttattaatatttattaataaaatttccacaggaatctcaaactttaaacctggacatacactttatcacctttaacttgcacttgataactttgtagagaaatatccggtactgttaaacatttgcctgtatttaaatcgtattcaaattgatgggatgcacaggtgataataccatttttaactttacctttatccaagggaaaacctaaatgagaacaggcattaccataacagtgtaccttattatcttgtttgtataaaatcaagttatgattttcaattctaactcctaatatttgattttcaggaagttcattaacattcgtaactcttacccaataggaatttgtgggaatagtagcaattgtagaattaggagtattattaacagctacaattttggtaatttctggacaatggtttttaatagtttgttctactaactgagttaaagtcaaagtagaactggcacaattactacaactaccaattaacttaacttcaactgtatccggtggtttaatagcaactaattccacatccccattatggctttgtaaactagggcgaatttccgctaatgctgtttttatccgttctgataatggcagttttaccaaattgtgatacaataaaaccgcataaacaatatcatcatttaccgcattgcttaaagcggctaaattatcctttttcaaacttttaatcaagttcgttaaagctgctttatgtaaagcttcaactgcactttttaaaccaacggccacacatctttgactttcatcccaatcagaaataattgcttcaaatctttgaatatctgctattaattcatttaaattatccataaaaatctgcatttatatgcgtttgtctgcgttcaatcataaaacaatcccccagataaatctgtagggattgataagttttataattgtaactgcatcatttcatgcgaaaatctttcagtagaaaaggcatcatgacacctgtaactaaactagttacagtaataggaatacaaacgggaattgatagctgtgctaataaaattaataatagtgtaccaataccactagcgattattgtttgacgcagaaaatatagtggatcacgaaataatttacccttgagaaataatctcaaagaaaaccagcctaattctaacatatatcctcctattagttacctattagttacctattagttacctattagttacctattagttgcctaacaaatttaaaattaataaccctaaaatgagggtgggaattacgccagcaggggcaaataaactaccaatggtggctgaaaatttgtagcctaaatctttaccggctaatatcatacctccaattgcaccacctaccattgataaaattacggcaatggctaaccaagctaatgcagtggtaaaattgaggttagtatttaaactataaagaaaatctctaaattctgggttggtgataaaatcaaacattgttttttctcctatttgttgacaagttaatagtcatttttcaggattcatcagattcatcagtttgtttgatttgatattgaagcctgattaatgaaacctgattaattaaacctgatgaaaatacttgcttttctccatttttgatgcaagtaaatattctgaatcctgactcctttacgggtgttcgcaaagcgtgctggaagcatcagcattcgggcaatcaggtatcaatttttgtccaagggtattttccgaatgcttgtcccctaatgattcctaatatttaatttaaggaaactgctagtatttctgcttccaaatcttggattgcttgggctactatttccgctttctcaatttcttgatgtgctgtaaatatttgccaagcttcttgatagtataatttggcttgtagcaggttttcaggattccctaattctggtttttcaggatcgtcgggtaagttaaaaaatacgttagccttgttagaaattgtgttagcatattccaagggtgtatctctagaattacgcacttttaaagcttcatcgtaagctgcaacagcccgcaaattattgtcaatgggatgggaactaattaaatattgcaaagcattacctaaattattttgcaacatggcatattccctgggatgatcaattatgttaatatgctcaagtgctacttcaaaagattgtactgctaacccttgacgtaaatattcccgttcagatgccatgggcattgaaagataggcgatcgcaatattattatataaaatcgcatattcttgggggtattcttgccaagtaaacacccgcaaagcctcatgataagcttggatactatcagttatccgcgctaaattatagggaactaaagactgtaaaactaaacccaaattcatctgcgcttctgctacttcttctggtgtagcaaactgctgtaaaataggtaaagcttcttcgtaactatccttagcttgtactaataattggggattagaatcgggtattatttgtaaagtacccgccattcccacttttgcccgtgctttcagtaaaggataatcttcaccacacatttgataagcacgataaaacaatcctaacccactgcgtaaatcttgggaatttttcggttttttgagaaaaccctgcgccatttctatcagcatttggattttttcctctgctgttgctgactcatcagaaatggccgccatagccgcttttacggcagaatctgtaacactagaagtcataaattggccatagtaattgagtcatcaactaagccgatttacgcagtttttgattaagtatttttttacagattccccttttaatagctatcggctatcagttatcaactatcagcagtcagatttttaaaagttattctgactcctgactcctgcaaggttttaccagtgctaaacccctactaaatcatgaaaataaagtgtttgtacctatcctttgttaagattcaaggaaagggtaataacattaatatttttcactataaaagattcatttaagaaaaatctagcgtaaaattactaatgttaatttttgtagagataaattgatcacttgagcagaaatttctgtatcatcaatcaatcaaaatccagtaaatcaacaaatcctgtcaattctgattcagacagaaattccatgttaaaataacaataataatcaatcagcgagactctacaaaaatcctcagtagtagaaattcaaaaattgataatgttgctaaaattcctgcgtatctccccatcaacactgacggaataatcccgtgaaataatcccgtgtatctctccacatctacaatagaaaaatcatagccaatgacaaatgtactctggctgcaaggtggtgcttgttcaggtaacaccatgtcatttctcaatgccgaagaacctacagcttgtgatttaatagcagactttggcattaaaattctttggcatccttccctgggtttagaactcggtgcaaacttacaaaccttgctttgggaatgtgtcttaggtaaaactcctctggatattttagtatttgaaggtagcgtagttaacgcccccaatggtacaggagaatggaaccgttttgcagatcgccccatgaaagaatggttaaacgacttagcccaagctgctaactttgttgtagccattggcgactgtgccacttggggcggtattcctgcaatgtcacccaaccccagcgaatctgagggtttacaatttctgaaacgggacaaaggtggttttttaggtaaagattttgtcagcaaagccggtttacctgtaataaatatacccggatgtcccgcccatcctgactggataacccagatattagtcgccatagctaccggacgcatcagcgatattaccctagacgacctacaccgtccccaaaccttctttaacacctttacccaaactggttgtactcgtaacattcactttgcttacaaagccacaaccgcagaatttggacaacgtaaaggctgtctcttttatgacttagggtgtcgtggtcccatgacccgttcttcctgtaaccgcattctttggaatcgcgtatcatcaaaaacccgcgccggaatgccttgtattggttgcacagaaccagaatttcccttccatgatctcaaaccaggaacagtatttaaaactcaaacaattatgggtgttcccaaagaaataccccccggagtcaaccaaaaagattacgcagttctcacagttgttgctaaagatgcagcaccaaaatgggctgatgaagactttttcttggtttagtcattagtcattagtcattagtcattagtcattagttattagtcttgatgtcttaacttttaacttttgcctattccctattccctattccctttaattatgccaattcaaacattagatattgctcccgttggtagagtcgaaggtgatttagatgtccgtgtagaaatcgaagacggatatgttacaaatgcctggactcatgcagaactttttcgcggttttgaaataattttacgcggaaaagacccccaagccggtttaattgtcacccctagaatttgcggaatttgtggcggttctcatttaagttcagcttcttgggctttagatactgcttggggaacagaagttcctagaaatgcaattttggcgagaaatttaggtcaaattgtggaaacaatccaaagtattcctcgctatttttatggattgtttgccattgatttaaccaataaaaattatcgccgcagtcatttttatgatgaagcttgtcgtcgctttgccgcttttacaggtaaatcttatgagattggggtaacaatttctgctaaacctgtagaaatctacgccttattaggtggacaatggccgcacagcagttatatggagataaattaggaaattgctgatatagcaagcatttttcaggataggtctgattattccctgttttttccttaatttaagcgataaacccaccccatatatacaataagttcatttatttttacctactagaagtcatttggggttctcagacgttacctaatttttccctaaccttattaggggcgaagcattcgggtgataaactatcgctgaaaccagttcatattctgtccgaatgcttcaccctgacgattaatgaattggtgttctagattagcgagcataactatggtaatgggataaatccaaaacgggtttttacactcaaacaacaacagcagactaaattgccattaaaactacatcttagtatcatcaaatattcttaaataaataaaccccaaaacttctccttctctttgcgcctctgcgtgaaataataatgaagccaatacccctcacttcccaagctgcaaaaatcatcttaggaaaccctaacaaacccgaacaaataaccataccccttgcacccacaccctcaacaatgttcggaccccgtgcagcttgtttactatcaccaactggaccattatgggtgtcagatacaggacatcatcggttattaggatggcgaaatttaccgacggaagataaccaaccggcagatttaattatcggacaaccggacttttttagtgaaggacaaaacgccaaaggtacaccatcaaaaaatacatttagtgttcctacaggtatttgtaaatatggtaatggtttagccgttgctgatgcttggaatcatcggattttaatttggtataatctcccagaggaaaataatcaacccgcagatttagtattaggacaaagtaattttatcgctaatgaacctaaccggggcagtcaagaaccagcagctaatactttacattggccttatgggattttatgtgataaaaatcaattatttgttgctgatactggaaatagaagattattaatttggcatagtttacctacaaaaaatggacaacctgcggatatagttttgggacaaccaaacatgatttctcgtaatgaaaacgggggcagttctcccactgctgctagtatgcgttggtgtcatgatattacgatttggaatggtaatttggtggtgacagatgcgggtaataatcgggtgatgatttgggaaggaatacctacagaaaataatagtccttgtgcggtggttgtgggtcagaaaaattttaattttgtggaattaaatcaaggtgtttattttcctagtcgtagtagtttaagtatgccttatggtgtagatatttgggaagattggttaatagttgctgatactgctaattctcgtttgttaggatggaagaaaagggaaaatatttttttgttacagggtgcagatgctgatggaatattgggacaggatagttttacaagtaagagtgaaaataaggattttggtttaccaactagggaaagtttaaattggtgttacggaattaaggtttgtggggaaaatatggtagtttctgattctgggaataatcgagttttgattttttaattttattaatctcacccagagacgcagagaacgcagaggataagaatgagaaaagaggaaattagggttaagggtactgttcaaggtgtgggttttcgtcctactgtttatcggttagcgaaattttgtggtttgaagggtgatgtttgtaatgatggggaaggggttttaattcgggttgctggtagtgaggagaaaattactgagtttgtagataaattatatcaggaatgtccgcccttggctaaaattaataagttaattagaagttcatatttgggtgattttgattttgatgattttgtgatttctcatagtgtgaatactgtggtgaaaactgaaatttcccctgatgcagcaacttgttctcaatgtcaaaaggagatttttgacccttttagtcgttattttcgttatccttttacaaattgtactcattgcggtccgaggttaactattattcgggctattccttatgatagaaatcatacgagtatggttaagtttccgatgtgtggagactgtaacacagaatatgaagatgtggaaaataggcgttttcatgcccaacctgtggcgtgttttaagtgtggtccaagtgcttggttagaacgtgctgatggtcaacctgtcatcgctgatatgttctcgatgttggatgatgtggatgcggtttgtactttattacaaaagggggaaattgtcgctattaagggtttagggggttttcatttagcttgtgatgcaactcaagaaacggctgttaaaaagttaagggaacggaaaagacgttatcataaaccttttgctttgatggctagggatatcaatattatatctgaatattgttatgtttctgatttagaaaaaactttattaaccagtcctgctgcacctattgttttattaaatattaaacctgaaaaacaggtagctatatcagttgcacaaggacaaaatactttgggttttatgttaccttatacgcctttacatcatttaattctcagaagaatgaactgccctatagttttgactagcggtaatatttctgatgaaccacaatgtataaataatgaagatgctaaagagaagttagggaaaatagcagattattttttattacataaccgggatattgttaaccgggttgatgattcagttgtgagggttattgatgataaaatacaaatcctgagacgtgcgcggggatatgcaccagcaccaattattttaccatctggttttgagaaagtagcacctattttagcaatgggtagcgagttaaaaaatactttttgtttattaagagaaggtgaggcgattttatcccaacatttaggagatttagaaaacgctgctggttttaatgcttatcaagaaacattgaatttatatctgaatttatttgcacataaaccagaaataattgctattgataaacatccagaatatttatcatcaaaactgggaaaagaattagcaacaagtaacgaaattaaattaatagaaattcaacatcatcacgcccatatagcagcttgcatggcagaaaataaaataccattagatgcaaaaccaatcttaggaatagcctttgatgggttaggatatggggaagatgggacattatggggaggggaatttttattagctgactatcagaaatttcagagaatagccacatttaaacctgtcgccatgataggaggagaacaggcaatttatcaaccttggcgaaatacctacgcccatttacaaactgcatttaactgggaagaaattaaacaaaaatatgctgatttagaaattatcaaatttatagaacaaaaacccttaaaactactcaaccagatgatagaaaaaggtattaacacacccttagcatcatcagttgggcggttatttgatgcagtagcagcagcaataggtatatgtcgggaagaatgcagctatgaaggacaagcagccatagaaatggaggcaacagctaatgttaacatattaaacaaagatgaagaaactataaattatccctggaaaattgaaaaattagatagaatttattatatagaccctgcaccgatgtgggaagggatattacaagacctcaagcagcaaatttcaccatcagaaatagctgcaaaatttcacataagtttagctattgtcatcacagaaatagttaaacaactaacccaagaacacaaaattaatcaagtagcattaacaggaggagtatttcagaaccggatacttttagaacaaacaaccaaacacttacaaaaactaggaatagaagtttttacccatagtatagtacctgcaaacgacggcggtttatcattaggacaagctgttatagctgctgctagatgtatgaggtgacaggtgacaggtgacaggtgacagttaaaaagagaaaaagatagaaattcaataatttgatttttatctcattttaaattaaaacctctgcgttctctgcgcctctgcggttcttataaaaaaggaaaataaaaaaatgtgtttaggaatacccggacaaattgtagaaataaccaacccagaacataaactagcaatggtaaacgtcggcggagtcaaacgccaaataaacatagcgtgcatcgtagacgaacaacacccaccagaaaaatgtataggcgactgggtacttgttcacgttggttttgccatgaacagaataaacgaacaagaagcagcagaaaccctaaaactactgcaagaaatatcccaagcatacacctaaaaacccttttcttcctttgcgtctttgcgccttcgtggttcaataaaaatatgaaatatgtagacgaatttcgtaacccagaaaaagcccaagccttacaaaaagaaatagaaaaactcagccgccaaatagacaaacatttaaaaatcatggaagtatgtggcggacatacccattctatctttaaatacggcatcgaagaaatattaccccataatattgaactaattcatggacctggttgtccagtttgtgtgatgcctaaaggtagaatagatgatgcgatcgccctctcccaaaatcctcacatcatcttaacaactttcggcgatgccatgcgcgtacccggttcaaaaaccagccttttacaagcaaaagcccaaggcgcagatatccgtatggtttattcaccctgggatagcttaaaaattgccaaagaaaaccccgaaaaagaaatagttttcttcggtttagggtttgaaaccactgcccccagtaccgcttttaccgttctccaagcagcagcagaaaatattaccaactttagtttattttctaatcatgtattagtaattcccgcattacaagcattattagaaaatccagatttacaacttgatggttttgttggtccaggtcatgtaagtatggtcataggaacagaaacctatgaatttattgcccaaaaatatcataaacccatcgttgtttctggctttgaaccattagacattttccaatctatttggatgttattaaaacaaatagtagaaaatcgctgtgaagttgaaaatcaatataatcgcttagttgaaaaatcaggaaataaaaacgcattaacagccatgaatcaagtttttacaccccgtgaaaaatttgcatggcgtgggttaggagaaatacccaattctggttttcaaataagggaagaatacgcccaatttgatgcagaagttaaatttgatcttcctaatttaacagttcccgatcataaagcctgtaaatgtggtgacattctcaaaggagttttgaaaccttgggaatgtaaagtatttggcacagcttgtacaccagaaaatcccattggtgcttgtatggtttcttccgaaggtgcttgtgcagcatattataaatatggcagactgacaacaatggagaaaaaagccaaccagcaaaataaagtagtggcaaatgtcagttaaaacctcacataagtccctgatttattttaataaatgtattcatttatagagaatataaaaaagaagtcggggatcttataagttgtagattaaaggtaaattattatgccatttgtaactgtacaaattgccaaaggacactctatagaaaagaagcggaaactagcgcaagctgtcacagatgctttagtttctgctttaggtacaaaaccagaatggatcactgttcacattgatgaatttgaacgggataactgggcggttggtggtgttttacattctgataaacacgccggtagacatgaggaaactgggaggtagtttatagggtgcgttggcgttgtcgtaacgcaccaattcttttttttataaccgcaaagtacgcaaagtacacaaaggaagaaaagaaaggtttttaagttaagaagtttataagatgaagatgtttaatatggaagtttacaataatcaagaagttaaaaatccgctatttcaaaaaattgaacaggtgcgccgtcgtgctaataaggtgaaagatactcacattaatttatctcatggtagtggtggtaaggctatgagagatttaattaatgatgtgtttgttagtagttttgataatccgattttatcacagttggaagaccaagcgagttttgatttatctcaactttctctattaggaaataggttagcttttactactgattcctatgtggttgatccgttgtttttccctggttcaaatattggtgaattagcggttaatggcactattaatgatttagctgtgagtggtgcgaaacctttatatcttacttgtagtatgattttggaggagggtttggagttagaaactttaagaaaagttgtctttagtatgcaagatgccgcccaaaaagcaggggtacaaatagtgacgggagatactaaagtcgtccatcgtggttgtgctgataaactctttataaatactgcgggtattggtattattccttcaggaattgatatttctccccgcaatattcaacccggtgatgtggtaattattaacggcgaaataggaaatcatggtgctgccattttaattgctaggggagaattagcattagaaacagatatagaaagtgactgtcaaccattacatgaattagtcgccgaaattattaatgtttgcccaggaattaaagctatgcgagatgcaaccagaggaggtttagccacagtattaaatgaatttgcccaaactgccaatgtgggaattagtattcatgaaaaagccattcctgtacgagaagaagtaaatggaatgtgtgaaattttaggtttagatcctttatatttagccaatgaaggaaaactagtaatagttgcacccaaagaaaaagccgagttaatattatcaataatgcaaaaccacccagccggaaaacaagcagcaattattggtgaaattctcccccaacccccaggaatagtattattaaaaacagcatttggtgcagaaagaatagtagatatgctagtaggtgatcaactacccagaatatgttagtcattagttatttagttattggttaatttcttcccagtccccagtccccagtcaccagtcaccagtcacctcaaaatgcacgaactaggaataactcaaaacatcatcgctatcgttagcgaaaacgcccaaaataaaaaagtccaaagagttctattagaaattggcaaactctccgccattatgcccgatgccatcaaattttgctttgatatttgcgcccaaggtacaatagtcgaaggggcaatattagaaatattagaaataccgggaatggcaagatgtcgccaatgtggtaatacattttatgtagataaaccctttggaatttgtgactgtggtagtgtagaattagatttaataaccggtcaagaattaaacattaaagaaattgaggtagaagaattatgtgtgtaacctgcggttgttctgatgataacaatacaactattacaaacatggaaaatcaacattcacatactcatactttacccgatggaactgtaattacccattcccatgatcatcatcatgaatcaccagcaaatgttcacgctaaaattcataatactactatatccttagagcaggaaattttaggtaaaaataatttattagctgctcaaaatcgaggctggtttaaaggtagaaatatcctggctttaaatttaatgagttctcctggtgcgggtaaaactactttattaactcgtactattaatgatttaaaagagaagttaaatattagcgtcattgaaggtgatcaagaaactactaatgatgcagaaagaattaaatctacaggctgtaaagtggtgcaaattaacaccggaacaggttgtcatttagatgcttcaatgatagaaaagggtttacaggaacttaaccccccattaaattctgtagtgatgattgaaaatgtaggtaatttagtttgtccagctttatttgatttaggtgaacaggctaaagttgtcattttgtcggtgacggaaggggaggataaaccaattaaataccctcatattttccgcgctagtgacattatgattattacaaaaattgatttgttaccctatttgcagtttgatgtagaaaaatgtattgaatatgcaaaacaggtaaacccaaaaatacaaatttttcaggtttctgctactactggtgtgggtttagatgagtggtatgggtttttgtcatgtcaatctgcaattactgtataatttcttattgtgaaaatcattatcttttagtttagtttcaatcctcaatgtttcaatcctcaattaccttaattagtaattgtcactcctttaacgctagatcctctaacactaaaatcaagtttcaatcctcaattaccttaattagtaattgtcacgttccgttagcagcagtatcagcagcagctagactatacagtttcaatcctcaattaccttaattagtaattgtcacttgccggggatgccttctttgtggttagactctttccctgtttcaatcctcaattaccttaattagtaattgtcacgaaacaaagacgagcgtgacactgaaattctagacgtttcaatcctcaattaccttaattagtaattgtcacttaacacacacccttgggttaagaaagatatgtcagagtttcaatcctcaattaccttaattagtaattgtcaccccgggtcttcatatcatgtagctgtaccatatactgtttcaatcctcaattaccttaattagtaattgtcacttggtagcaagtgccgtgctatgcgtattgaaaatgtttcaatcctcaattaccttaattagtaattgtcacctttcttttgtagagccatcgcctttaagtttagattggtttcaatcctcaattaccttaattagtaattgtcaccccgccccaaactgcattgtctacaatgaaccattgtttcaatcctcaattaccttaattagtaattgtcaccgaaaatttatcaaatctcctaatatttctaaggtttcaatcctcaattaccttaattagtaattgtcactctacaattatcacgtaaagtatccggggaactaccgtttcaatcctcaattaccttaattagtaattgtcacaccgccgtcagcgcaaggagaagttttacaacaattggtttcaatcctcaattaccttaattagtaattgtcaccaaccgatcgcgcaaacccttagaaataggacatttccacaacgatttgcgcggatgccaaaataataccccatttcagagaacagcacaagagcgaaaaacgccgaaacccttacagcgtaaggtgcgcgggtggttgacaacacccaacggataaaaactagacagtgtaagagtttccagcttaatcataatcactccgacttaacacccacccatccgcgcattttcaagccaactttgtcaaagtcacaccatcaggtaacacctcatccaagtcaacctgataatcagcaaaactgcggggtacatcaacagtagacttaatttgcagtttatcaaataactcatgaacgggagcattaccatatttactggcatgagtaaaaacatacaaaccacgacaagccataaaaccccgtgctgaagaacggtcaaactcccaagccttaatcaaagcttgccaaaataaagctaaatctcgttcattcacacaaccagatttttctgccaaagccaaatggggattataaaaaacataagacctatataaaccatagggtaaaacctcttttctgcccatagttttattatctttttttacaccatcttttttttctttttcttccgttgcagcacaacgagtaatactcacagattggggaaaaaccggatcaatactacgagaaaaactaatttgtacaggtccccaaacttgaccagcttttaaaccagtagataataccgccccaaacattcttaaatcataataattctgctgcatccacttagcaacctttaattgatcttctggtgttccttctttttgtggtaaaccgacagcagtataagcgcgactgattttttcatttaatacacttccttcttccacaaatattttatatctttctggtgttggttcatccttaccaagcatctctacataatttctcaccttacgttttaaacaggcatctgtcaccaaaccttgattagtttgggggtcaattcttggttgatttccggcatcgggatcaccattgggattaccatccaaacaatcaaataataaaattgcatcgtgttttttagtagggtctaaatatgcagtcatgattttttttccttgtgatttgttgatagtttgaagacctaacccctagcttcttccctacgagggaagggagacaagaattagataaaaactggtttttaaagcctttctcttggtaggagagcggtttggagagaggttaacattgaaaattatttgttgggtttcactttgttcaacccaacctactcagatttgtctttacttttaaaaaactcggctcttttttgccaccaaccttgaaaaaacaaagcctgagattttaaatctagcacttctggcaatatggaaatatcaaagttttcaaattcttcagctagtaactttttgatgtatttactattatcactttctatatgataatgagtacaaccatgacaaagccgagcaaaaacttgagtcggtgtagaagataaagtctttaaactacgcataacattagtattatcttcactcatattttgagctttaacttgtgattggtgcattaaaaatgcaattctgcctaaagtgtaagcagtatcaaattgaggatcgcctgtgggatatttcatattgtttgtggctaaataaagtaataaaccttgcagtctgggaaaatatcgagattgtttagatttagatggaaaatcatgaaataccttttcactacatatcctatcaatgattctgtaagcatattcatcaggtaaactttcacctaaaaaagcagctttaattaatgctgttgctattctgtctgtgtgttctttactaggattcaaaaaagcactattacataacatccacataggactaggtgacaaataattaacttgctgacattggataaattgcccaatagaatctttgattttttgggtagtaacttcactccaaccactaacggaaattctccctttattacctttgagaatggctaaataaaatttgctagatttaatatcctccaaattaaattttttcggactatggggactagcaaagatagattcaaaagctggattttcccatatttcgggattaataccttccccgtcttcttctccccaataaacaaaaacctgctctcctaatttataacgatttgtgtcactattaagtaaaaaatctaaagatttatgaaatctaacggcactttcaaaacctatgggagcgttaatatttctataccatccgtgagacttataagcatcttcttgaaaactactaatagcagcaccagaagtagcagcaccagtaacacctttaaccatcatgggcattttttgcttcataattagagtctgttcacctgttaataaacaaactccattaacggtatcttgtttactggcataatagttaacccaccatttttgaattacgggaattttggtgatttgtttaccttcaaatagaaacacaaatctatcccgacaccaatctgtattagctgctgtattagctgcttgtggataaatttctgttagctgggctgtaattttttctacagtggtgttagtaacaaaatcataaactgctttaactgcttcgtggttagtttcttgtaaacatctttccagaagttgtaaatacatttgatgccgttttccacctcgatcaccagcaccaaaaacatattctcccccatcatcaattaataatggttcatcaccattacgccgcaaatctggtactaatatttttctgccaaatttcggtttacctttggttgctgctgtttctaaaacttgaaaactacctaaaggtaaattaatttgccaatgacacaaacattcactaaatcctgtgggtgtgagttgattatcctgttctaaagcaattcctaattgatttaattcttgcaacataaccgcccatctcgcattataaagtgagcaaattctgtaactacatttcctttgacaaaaccttgagcagtacgccaagaaactgtacctttttgatcaggtataaagtgcatttttttaggcattaaacctaaatctatttccccttttaactctggtgctggttgatcttcttctgaaggaaaactaaaatgggctatatattctcgacagccaaaatagggttgtttaaaacattgccctttttcaattctccgctttatttgtgctgcatatttattagataaatcttcctctgtttgtaaatcaaaattaaaatccacgatataggccacatcatgcaatatgacatgatttctctgagcgcgatcgcccacagcagtgtaactccctataccatcatttctcatccaatctttagcatttttatagctttgtttggactgcaccatgttacgctggatggtaaatgtattaattggctttagtaccgtgatgtgattaatcttgtatttaatctctggtttccagaaaatagactctaatacacctacagccgcagtaaagggaattaccctataactgtgcggttcagctttaaactccggccttgtgaataatgcccattcaccccataactttaactgcataaactagacttaaaatttttcatcaattataactacaaatgaaatacttagcaagaattactacagattgtaaagaacaactactagcagcacatttacagaatgttgcggaaatgtctgcaagtgctgtaccgcaacaattccaagctgtagccaagtatgctggtttatggcatgatttgggtaaatatcagcaaaaatggcaggaatacttaaaaaataacggtaagcgggttgtacattctccccacggtgctgttgtagctttacaaatgtctaaaaaagaaccgcccgcaatagcttatatcattgctggccatcattctggtttatcagaaaagttgagattaagaggtagtgagtataaacaattagcagcaggtttagagaaatgtttagaaatagctagacaggaaatagctgattttataccgcaagaattaccagatattaatttacctaaattgcggcgagaatttgccattagaatgttattttctgtcttagttgataatgacagattagacgctcgcaaatttgaaaatattgaaaataaaggtgaaagctccatatatgtacaagatttggagctttctgcatataacaaaatgagtttcaatcctcattccttgtttccacaatcagcaaatgcgattagtgaagctagaaatgtctttgcccaacattgtatcaacaaaagtgaattacccaaaggaatttttagattaactggaccctgtggaattggtaaaaccattgctagtgcgagatttgcttatttgcacagtcaaaaacatcaaatgtcaggaatagtttatgtcggaccattaaaaagtattattgaacaaactgctgctgtttatcggcaattatttggagaaaatgcagtattagaacatcattcaggatatgaaccaaaattagcagaaaccaaagattataaattaaatacagaaagatgggataaaccagtaattgtcaccagtggagtccaattttatgaaagtttatttgctaatcatcctactaaatgccgaaaattacaaggtttaattaataaagttatcttattagacgaatctcaatctatacctagtgatttagtccggccaatattaaatgttttgaatacattagtcacagattggggatgtacaatagttttaatgagtgctacccaaccagcatttcacaaccttaatgaagatgatttaacagatgttgttgatattattcctgaagctgaaaccagcagaatatttcaacaacttaagcgtgttaattaccaatatattgctgatatttgggaatggaaaaatttagttgatagcattcaatcatctaaattaaatcaaggcttaattattgttaataccaaaaaattagccagggcaggatatgaaatattatctgctaaatttcccgatcattgttttcatcttagttctatgatgtgtcctgatcatcgttctcaagttttggacaaagtgcgaaaattattaaaagctgaacaaccttgttttttaattagtacccaagtagttgaagctggtgttgatgtggattttcccatagtataccgtcaacttgcacctttagattctatcattcaagcagcaggaagatgtaacagagaaggaaagcaggatcaaggtaatgtaatcatttttaatatgtcatctgccaacccaccgggatataaagacggaataagtattactaaaaaaatcttagaaaaatatgatataaatgatgatattttatctttgataaagatttactttagtgatttattgaatcagaatcatgatggaggtgtggatattcaaaaattaagagaaaagtatgatttcccggaagttgctaaagcagtaaaagtaattgataatgaacatcaaatagcggtggttgtcaaatggggagacagtgaaaaattaattgcagaaatgcaaaataaagaatatttaacagaagcagattggcgcagattacaaaagtttactgtgaatattcctcagaatgatcaatatacaaattatactcaagttggtaaaatagatgtttggatgggagattacgaagaaacgggaattagggttggttgagaaagtctttttgtggggataaggaatagagaataggtaaagaatttgctcccatcttcccagttcccagtcccctctactgatgaatctgcgttgctttgagcatatgataggtaatagatctgtccgaaaattaatatgcgtaacctgaaacccattcctagtgacaattcatgaattgtccctacatctttttcggagatgtctaatcatcaactgtgtcaacgctagggggtaactttgtcatgtttccccagttgtaccagcgattttaccaagttcagaattgatttcgcgatcgcaaatattctttaaataaggaaatattagtcctaataattatttttggttttgtttctctccagaagcacgaattaattctgcgataattgccacagtagcggtaatagaaattaacataatgctaagggcattaatatctggtttgactccagttctgatgcggctaaatatttccattggtagggtattagaaccgctacctgctgtaaaactggagataagaaagtcatctaaactgaggacgaaagctagtaagcaaccagatataataccaggcattaattggggtaagacaactttgataaaagcttgaataggggttgcacctaagtctagtgcagcttcttctaggtggggatcgaggttattaagtcgggatgatactactaaaccgatgtaggctaggcaaaaaactatatgtgcagctacaattgtccagatgcttaaaggtatggcaaaagcagctaaacaaacaagggtagaaactgcgatcgcaatatcaggaattaataatggtaaatacgatataccacgatacaatgttttcccaggaaaattataacgtgccaaccctacagccatcatagttcccaagactgcggaaacagcaactgcactacaggctactagcaaactgttttttacagctgataaaatgcgagcatctgtgaacagtttttgataccattctagagtgaatccttgccaacttgcgctgtaaggtgactggttaaagctataaaagcctagtaccaggataggcaggtacataaacacaaataccaatatggaaaaaactacctgccatgtcatagacttttttttacttgggtgagggatattcatgttgatatttagtgcttaattattgtatgagattatatcatcgtcaggagtcgtaggggcgacgtaggggcgaagcattcggaaaataacctgtgatcaaaattgataattgttcgcccgaatgcttcgcccttacaggaaaataacctgtgataaaaattgataatttttcgcccgaatgcttcgcccttacaggaaaataacctgtgataaaaattgataattgttcgcccgaatgcttcgcccttacaggaaaataacctgtgataaaaattgataattgataattgataattgataattcatcatttataatgaaaaacctcctgacttcttgaaattctgattccttaaaattactaatttacctctaaagtagaggaaaatatccctacctaagatagacaaaagatatcaaagatccagcataagattgtgaagcgagtaacagtattaggttaatatttactagttttttgtcagtgattttcaagtaaattcttaattgttagggggttaataatgagaattgcccaggttgctccactgtgggagagagtaccacctccagcttatggtggaatagaattagtcgtgggtttgttaacagatgaattagtcaaaagaggacatgaagtaacattatttgcatcaggagattctctgactctggctaagttagtatcagttcatccgcgggctttaagattggataatactgtcaaagattacagtatttatgaattgctaaatctagcttcagtttatgagcaatccgcagaatttgatattattcattctcatgcaggacacacacctttagcatacacaaagttggtaaaaactcccacagttcacactttgcatggtatttttacacctgacaacgaaaaaatctttaaatatgccaaaaaacagccttatgtgagtatttctgatgcccaaagagaacccaagttagggttaaattatatatcaacagtgtacaatggaattgatgtgagtagttatgagttttatcctcaacctgtagatccaccatatttagcattcgttggcagaatatcgccagaaaaaggcacacatttagcaattcaaattgccaaaaaaactggttggcagttgaaaatagctggtaaaatagatagagtggatatagaatattttgagcaggaaattaaaccccagattgatggtaagcaaattcaatatttaggtgaagctaaccacgcagaaaaaaatactatcatgggttctgcttatgccactttatttcctattacttggagagaaccatttggtttggtaatggtagaatcaatggcatcgggtacacctgtaattgcgatgcgaatgggttcaactcccgaagtaattgctgatggtgaaacaggttttttgtgcaataatattcaggagtgtattgaggctattgagcaaatagaaagattaaaccgttatgcttgtaggcgatatgtagaaaaccattttagtgtcaaacaaatgactgatggttatgaagcggtttataaacaaattatcaaagagaaatttgctcaagaaaatggacattttcggactactttagttcattaagttcattatcattgttgggtgagagtttccacaaaagccattactaacagtacaattgcggttggggctagggttaaggctatttctcctttcaagtttaatctgcgcctgagtgtgcgatttttcctttgtaatggttttaagctagaacgtttttggctcatgaggcttcaactacagctagttatatccactttaagaattaagagcgattgcgcggagcgcagcgccggaggcgatcgcatcttcccacgaatgatagacaatcttgaagttgcaggagatcaaggagtcaggagtcaggagtaaaattggcttgatagctgtaataactatttagcctcacaaaaattatgacatcgacaatttctatcaacgacagtcaaaagttacaactttcacctttagaagttcccaaccgtttattactgggtcctggtccatctaacgcccatcctgcggtattgcaagctatgaataccacacctttagggcatttagatccggcatttttagccttgatggatgaaatacaatctttattgcgctacgtttggcaaacggaaaacccccacactatcgccgtgagtggtacgggtacagcagcgatggaagcaaccctagctaacactgtagaaccgggagatgtggttttaattggtgttgctggttacttcggtaatcgtttggtagatatggcgggaagatatggcgcagatgtacgcactattacgaaaccttggggacaggtattttctgtagatgaaattaaaacagcgttagaaactcacaaaccggcaattttagcattagttcatgcagaaacctccaccggcgcacgtcaacctttagaagatgtgggggagttgtgtcacaaatatggaactttgttattagtggatactgtcaccagcttgggtggtgttcctattttcttagatgagtggggtgtggacttagcttatagttgcagtcaaaaaggtttaggttgttctcctggtgcatctccttttactatgagtccccgtgcaatggaaaagttgcagaaacgggagactaaggtggccaactggtatttagatatgttgttgttaggaaaatattggggtaatgaacgcatatatcatcatacagcaccgattaatttatattatggtttgcgggaagctttgcgtttagtagcggaagaaagtttaacaaattgttggcaacggcatcaaaaaaatgttgaatatttgtgggaaagtttggaaagtatcggtttaaaaatgcacgttgctaaggaatatcgtttaccaactttaactactgtttgtattcctgatggagtggatggaaaagccgtagcaaagcagttattacttgagcataatattgaagttggtggtggtttgggagagttagcgggtaaagtttggcgtgtgggtttgatgggttttaatagtcgccctgaaaatgtggatcggttggttgaggctttgcagcaggttttgggtaagtagggtgtttaaggtgggcattttgcccgccaagatcatgattttttcacattaagatccaaggaaggatgcaaagaggaaagactttttgatcccagaatccctaccctgatagagtagggaggatatcaaataagtcaaataattgagcagatgcgatcgcctggagtcatatcacatctgatttaatagttaagactccgtcatttccttgactaaccgctgatcagatgccactgccagtagttcttctacaatatcccaagctgctgcacattcacgagaagtatctcctttcactgcacaaattcttctagcttcttcccgtgcagcttctatctcatcctcaataaatatgggttttggattatcaaacaaatcactttttctgaggatatcagtaattgatataatccctaacaacttacctttaattacgggagcgcgacgaatacgtgtattggcaaacaaacgcgctacatactctacaccaagctcaggattgactacaatacaaggcttggtcataatctcgtaaactcgcacttgtttggagtctttaccataagcggcaactttatagacgatatcagtttctgttaccatgccataaggatcgttttctgtgcgtggttccacaactaaagaacgtaatcctttatatttcatcaaatccacggcttctgctactgttgctgaaccacgaattgtaatcacttctgtggtcattatgtcttctgctttcatcatatttttataatttcctgtcagtagttggttggaaaaattgttcgggttaatttgccgatgttgatgatttttttcactcattcctgagatgttttcagatttttatctttggtaaatgagtgtagttacctgtgcaaaaagtacaaagaaatgaattttgatgtttaatcttcgtaaattcttgcctctggagcgttgggaaattcttcacaatacatttcaaaagtgcttttgggattttccacaaagtcactttttctgaggatatcagtaattgatataattcctaacaatttacctttaattacaggagcgcgacgaatacctgtattggcaaacaaacgcgctacatactctacaccaagctcaggattaactacaatacaaggcttggtcataatttcataaactcgcacttgtttggggtctttgccataggcaccaacattgtaaacaatgtcagtttctgtgactatgccataggggtcgttgtctgtgcgtggttcgacaacgatagagcgcagtttattatctttcatcagttttactgcttctgctactgttgctgaaccacgaattgttaccacttttgtggtcattatatcttcagccttcatcatggttgaaatccttaaagcaatgagtatgaatctgtgggattttgatctggtaaatgtctaaaaatgaggctgaataaagtacactctctgatcactagcatttgctcctcacgaatctccgaaggagtattagatgtggtagaaggtttaaaactgcttggtattccaggtgcgtaagcttcaattacacttccatccagagagcgcatcaccatcaggtagtcacaaactagacactctgtacggataatttgattagctaaacaatgggtgtgagttaggtgttcatcagttgcaaactgacgctgtgcctcactaccgcaattaggacatcgaactatctgcgctctctgcataaagcaattgcctcaataatggttaaagtatattggttacagctgtgctgaatttttcataaggagctatcccaacaattttttccaataagtcaccgttcttgaaaaacataactgcgggaatactgcggataccaaattgtttggcaaaagttggattttcacccacgtctattttgactactttggcacgacctgtgtattcatcagcgagtttatccattaaaggactaaccattttacaaggtccgcaccaagttgctgtgcagtctagtacaactatttcgttatcacttaatagtgatttgaactctgtttcctggatatattcaactgttgtcatatcaactccttttttaatctttttcaattttgagtggtggttgtgaaagggaaaacagtaaaagataaggtgggatggcaatgagttaatttctctattgagaaaaagctgaggtcagaattgctgtaaccttgatgaaataaaagtttcagtcttttaatttttctttgcttacgcataaaatactcattttttcggctttgttttgctgttagtccgataagatttgtcgttctttgttgattagtcttttgctggtattcacagttttttggtgaattgttaaactcaaatcagaaaaagaagtttgtaaaaaatgagtcactatttccacagggcgatcgccattaatcactgttaaacatccttgctggcgataatgctgaatcacgggtgcagtctgctcttgataaacttctattcgcttacaaataagttcagggtggtcatctgaacgccccctttgtcgccacctttgtaccaaaacatctgttggcacataaaaactgaaaactcggttataagactgtcctaaagttgctaatagttgatcaagaaactgagcctgggataaattaccgggaaatccatctaatatccaacctcgttgagtagatgaagcagttaagcgttggcggatgagatcaaaaattaaatagtctggaactaattcacttttttctacatacgcttttgctttcaagcctaaagcagtttgattagcgatcgcctgacgtaatatttcaccagtggaaatatgcggaatttgccattggctggacagtattgccccttgcgtacctttgccactacccggcactcctagcaaaatcaatcgcattcaaacaccccctatcttgaaaagcctgaaaaatctaactcatttaccagcaatcaccagtaattgatgtaccatgttgacaaaggtaattaaattctgaaaacaatggctgctgaagaatcgaaagatcactccctctgggaaaaactcaaccaagcccggaaagcaaaagctgccagtggcggctatgctggctatggttcacccgcttttggtcagcaatcagttaatggtgaattagtagacaatcccgctgaacaacagattattgaattaattcgccgtcatcacaagtcaggaaaatcactaccacaaattgctgcttggctcaatcagcaaggatataccaccaagcgaggacatcagtggcaacctgtgtccgttaaaagggttttagacaggcttcatggcaaaatgcaacgaatttctggcatgggtgaggactgatgtagatattgcctctcaatagagccatatacctcatatctcttccttttcctctccagttatctggcaatcggcccttggatatcccagtttaaatctttaacgctaatttaccttttacagcttatagcctttatatagcaagcttttctcccatttatcttttacatctctcgtattatatatatattttgcagaatttaatatatttattgctaataaatttacaaaacttcataattagttttaccatttataatctagaccgaataatctatgcaaattgatgatccactcattggcgttccctgcctggaagatgcaatagataagcaaccactggtggttgcaccccatacttccctgatggaagttgtaaatttaatgaatcagacacgaggtaatagttgcttattaccggattttgatgcaggaattacctttaattccatgcaaggtacacgctccagctgtgtactagtcatggaagggagggaattattaggtatttttacagaacgagatattgtgagatttacggctgcgggtacggattttgctagggtaaaaatagctgatgtcatggcacatccagtaattaccctgtcagaaactgtatttaaggacatctttgccgcactgtttttatttcgtcggtatcgtattcgccatttggtaatcgtcaatgaacacaaagaggtattaggaattatttccccagaaagtattagacaaattttacgccccacaaacctactaaaaatgaggcgagtgtcagaggtaatgacaacccaagtaatccatgcaccaccaacaacttctgtactcaccttggcgcagatgatggcaactcataaagtgagttgtatagtcataaccaaaacagactcctggaataatattctgcacgctgttaagcctgtaggaattgttacagaaagagacattgtgcaatttcaagcattggggttaaatttagaccaaattgaggcaaaaacagcgatgagtacacccttgtttttgctaactccagaagattccctatggtcagcccatcaagaaatgcagcagcggcgagtacaacgattagttgtatcctgggattggggatcaaagttaggaatagtgactcaaaccagcttgttgcggatatttgatcccttagaaatgtatggagtcatagaaactttacagcgaaatgtagcgcaattacaagctgagaaagcagaatatctcagcaaccaaactaattccccagaaccacctcaacaaccagttcccaaggaaaacttaaataccctgatttctctgttggaaagcaggatagaacatttgatcaaaaacccgaatctatccacagaattacagcaaatgtatttaaatttagcaataacggacattgacaaaatgcgccattgctatcattcatcgacataactcctcaataccctgttcactggcatgaagagaattttcaattctgtttgatcttatactatttgaaaattgtgtagtcgttatactcaatactaaggttctacctgggaattgatgaagtggcaaaacaaaccacttcatttttattgtgaaaatggtgaattttcaatcattaactaattcatcgtgccatttttcccgttttgggcgtttctctatttctctcacttcaccgtcattcattctatctatataccaagttccccattttaaagctttttgtctttctaaatggtcaataaattgaattatgggttgatctaagtcaataggagattttaaattaaactgaatagtttgaaaaattttgttgtcgtctttgataaagtcttcagccacaaatttactcagccataaaaccaagcgattatgtaatctaccgaaaatacccaagcgttttttagtcattaatattgtcattatttctgctctacccgcttctattaaacgggaagcaaatataagatgaaattgtaaaaaatctaaactaattgtaatcattcctgtcatcccataccaataacaaagatgataatgaactggttttttataaaaaggacgaatcaattttattaaccaagagtctggactttcttgggtagtattggtaaaggtaatggcattttcattgagttcttgtttttcaaaattaaactctgatagtaatttatgaactgtgttaaaatgttgagcatcaatagcattaatcataaaaacattagggtgacagttggtgataaatcttgcactcaaagcactgtcagattcttccatttccaactcaggaataaacggtaaaggttgttgtggtgtttctcctgtccaaacccaaattaacccatatttttcagcagtaggccaacttttagctttaactttaacaggttcttctaaacaaggaatttctacacaaaaaccttcagaatcaaatttccaatgatgaaaaaaacagcgtatttcattaccttctactgttccttctcccagatgagcgccaaaatgaggacagtaagcatctaaaatcacagcttgtttatcttcaccacgataaattactaattctctacccaaaattgtcacgggtttaacttcaccaactcgtaactttttagaaggtattacccaataccaaccttcaataaaacgttctggttgattgaaaatcttaggttttctagtatggttaaaatttgctgaattgacgttcatttttagatttatacttatagtcaagggggtaatctagaaatatcacacccagcaaataaaaacggttattttcggtacttcattggtgattggtgattgggtaagattgttaacctattccctattccctattccctattcccattcttatgttatcatcaaaacaagagttgggaaaatctgctgtgttaattgaagataaacaactacttttaattggtcaggtaacagaaaaaagtggtgttcctattagaacaattcgttattatgaaagtttaggtttaattcaagcatcagcacgtactgaaggaggttatcgacaattttcgtctgatgtattaactcgattatcttttattaaaagagcgcaacatctgggtttaagtttagaagaaattaaagatattttggaagtttatgatcacggtaaacccccttgttgtgaaattcaagaaaaactccaagcaaagttatcacagattgatcatcaaattgagcaattattaactttacgctcagaaattaatcaattactttccggttggcaaaatacagaaatcaaacctgaagatactatttgtccaattattcagaaataaatttggtaattggtaattggtaattggtaattggtaattggtaattggtaattggtaattggtaattggtgattggtaattgggttattaaactccctatcttcctaccttcctacctctgatttactaaaaataaaccaccataattctaaacctattaaacctaaaccagcaatagttactgcaaattttaattctaaaggttgctgaataatttgaaactgttgattttgattatgctgtgaatgtgaataggaattttctgctgttgctggacttgatgttaataacattaaacaagcaagacttacccacaggattttgtgattgaatttttgattgaatttttgattgaatttttgagttaatgttttatttaacatttaattgactcctgcttgaaacttacgtaatcttaaagcattgctaactacagaaacggaagaaagtgccattgctgcacctgcaagaatggggttaagtaaccaaccgaaaatagggtaaagaataccagccgcaacagggataccaatgatgttataaataaaagcaaagaagagattttgctgaatattattaatggtagcgcgactaagttgaatagcggtgacaattgcttgcaaatctccagaaattaaagtaatatcacttgcagcgatcgccacatctgtacctgttccaatagctattcctacatctgcttgcgctaacgctggtgcatcattaataccatcccccaccatggcgacaattttagattttggattttggattttggattgtaatgattttacaatagcagctttttgatcaggtctgacttgagcgaaaacttgagaaataccaacttgatgagcgatcgcttccgcagtaggttgattatctcctgttaacattaccacttctaaacccatcttttgcaatgtttttaccgctgctgttgaggaaggttttaaagcatccgcaatagccattattcctgctaattctccgtcaacagcaattaaaatgacagtttttcctccggtttcccaagcaattttatattcttgcaaagcatcggtattaattgctaattcatttaaccatcgttctgtcccaatttgcactgaatgatgattaacaataccttgtacaccacaaccagcaacagctaaaaaatccgtaacttctgttaaattaacttgttgagattcggcatattttaccacagcttccgctagaggatgttcagaatttctttctacagatgcagctaattttaataaattcatttcattttgattagctgtacctttagcagtcacaaaatctgtaactgtgggtttaccttgagttaaagtccccgttttatcaagtacaatagttttaattttatgtgctaattctaaactttgggcatctttaattaaaataccattttccgcacctttaccagttcctaccatgacagaagtaggagtagctaaacccaaagcacagggacaagcgataattaaaacacccaccattgtaatcagagaaagggtaaaattacctgtaaaattaaaccaaatcaaaaaagttgcgatcgcaatagcaataacagcaggaacaaaccaccctgttacctgatctgctaatctttgaataggagctttagaaccttgagcttcttggactaatttcacaatttgtgctaaaaaagtatccttacctaccctagttgctttaaatttaaaactaccagttttattaattgtcgccccaataacttcatctcctggttgctttttcacaggtaaactttcacccgttaccatcgcctcatctaccattgaattaccatcaataacttccccatcaacaggaattttttccccaggacgcaccaaaattatatcattaataattacatcttgaataggaacatcaatttcttttccatcccgcacaactctagcagttttcgcttgtaaacctattaattttctaatagcttccgaagtttgtcccctagcgcgatgttccaaaaaccgccccaataaaattaaagtgacaaccattgctgcaacttcataataaacatgagtttctaaaccttgggaaataaaaaaaccagggaaaagcgtaaccactacagaataaaaataagccgcaccagtacccaaagcgattaaagtatccatcgttgcggtgtggtgttttaaagacttccaaccatttctaaaaaacgaacctccacaccaaaactgcaccggagttgttaatattaactgcaaccaaggatgatgtaaaaaatcaggaataaaaggtaattttaaccctgtcatcatcggtaaagaaccgacaaacaggaatgtgctaattatcccccctgtccataatttaagctttaattcttgttcttctgctattttctggacttgtaccacatcatcttcaccctgtgcttctaccatagaaaaagatgaataaccagcatcttcaatagcagctttaatttctgttaaattagtctgttgtggttcataattaattgttgcttgttctgcaccaaaattaacattgcaattaatcacaccaggaactgcaagtatagcttgttccacattattagcacaggaagcacaactcattcctttgagtttgagagtaatattattcataatttagagtagggaatagggaatagggaacagggaacaggtctaataaatttctccccatctccctaactattaagctggaggataaccagcagcaactaaagcttctttaatagcagtttctgaagcttgagtatcgacattgacaagtttggttttgggatcagcttccacattagcgttagcatctacggctttaactgcattggtaatattgttggcacaagcagaacaagccattcccggaactgtaagtttgattgtcataaccttaaacaagaaagtgaaaaaatcaagtgaacaaaaaattaagattcaactgataactgataactgtcacctgtcacctgtcaccttttccaactgctgcaatttctcaagttgggctgtttgcgttttgatgatagcttgagctaaattgcgaatttgtggctcattagcattttcagcagttgtctttgccatcttcactgacatttgttgatggtgaatcatcttccgcaaaaattcctggtcaaagttgggggcattttctaaagcttctaaactcatcattcctcccataccgttacctctacccataccacccataccacccatgtccatacaattcatagcaccagcgggcaattctgcgccatataactgtttgtacaaagcttgtaattgctcaatttcttgggtttgctcggtttttatctcagtagccaacgctattatctggggatttttcgccttctgtatggccaaatctgctattttcaccgttttctgaaaatgatggttcatcatgatcagaaaacgctgatcttcctgttgctggggcatggtatggggcatggtgtttgtctcaccagcaggggtagaaggcgaatgttgatgtggttgggctatggcgctattggtgagggataaagcggcaagtaaacctaaaataccaaagttgactgatttgttaagcatcacttttgctcctttcgcttcccaaggaaggtttagggcatttctgccaaaaatcagcaatttgttttacctatgttaccaatttttggctgagagtcctgttgtgttgtctaatttatcctaaaccctctagtccactagagagtctagatttattttacaaatctttaaattttagtaaatcttaattaaatcttaatttagacattaatagcccttggattattcaaatacacatattatcataaccagtccagaagtcaagacccttggaaaatcgttatctggaaaaagcttattgacagaaattctcagaattttggcggtaaaaatgacttgtgtaacttttttggcattttttggcaaaatgctatttaaataatttatatattggcgttgattagtttgcctattctaatcagatccaaaagcaactggcaaaatagcatcagttaaaattgcacctttgaggttagcacctgttaaatttgcacctctgagggttgcacctgttaaatttgcacctgctaaattggcatatttcaaattagccccagttaaatcagtattggttaaattagcctcactgaaattagcgcggaataagtaagaacttcctaaatgtgatttagttaaatttgccttataaaaattagcttgataaagatagctttgcattatttctgcttcatacaaattagcttctgacaagtcagcattaattaaattagcacccatcaaattagcaaaactcagattactgcggatgagtttactatctgctaaatcgacattttttaaattagcgttgtgaaaatcagtaccaattaaattagcgtctgtaatgattgcacagatgaggttagaggcttttaaatcagcaccaattaaagagacctgagataaattagcctgtgtcaaaatggcatcttgcaaattagcgagactcaaattagcttgagaaaagttagcttcgattaacttagcgtgagagagattagcactacttaaatttgcaccttgaaaatttgttctgaccaataaagcataacttaaatttaccttatttaaattcacaccttggagatttgcaccccgaaagttttctcctactaagttagcggtactcaaatcaatttcaatttccgggttttcttttctccatcctgtccaagtgactgcacctgattttaataaagttagatgttgttgatgtgccatttttattaatccttttattcttgacgctgactttgaggagtgcggcctggtacattttcaattgcggttaaagctccagctgcaccggctaaaatatctcgttccgttcctcctaaataaagtcgcccaaaactgccgacagcttgcacttccagaatattaattgcggctgctttttccgcttcattagctgccagtgcagcgtaagcagcgggttcaacttctaaaacatagagggtttgtcctgccagtagcagttgtccgcgacgggtacggttgatgagttgggtttggtaagcgtcaatgttgcggatgatctggctagaaaccacacggggtttaagacagtcttcttttctgactcccaacaagtctaaaatcgcttgtcctgcggctcgtgtttctccttgagaaccggaatgtatttccaaaagtccataaagtcgttctactatctgcactcccggacggacagaagcggattttaaggctacgtctgtaactttattgatttcaataccgggtgagatttcaatccacagggatgtatcccctggtaatggtaaaaaaccttgggctactgttcccatatatgctgcgtgttgcggttgcaggttgtctagaaatacgaaactgcgtaattctatgcccaaagtgtttttctccagttatgagtatgagtatgtaatatatgagtttaccgataaaggctgcatctgagaagaaggagatcaaggagtcaggagtcaggagtcagaaggcaggaggcaggaggcaggaggcaggaggtaaaagtcgaggcagagcctcttggtggcattcccagtctgagactgggaacgagataaggagtcaggaggcagaaagcagaaggcagaaggcagaaggcagaaggcaggaggcaggaggtaaaagtcgaggcagagcctcttggtggcattcccagtctgagactgggaacgagataacgaagtaacttctccctgccctttgctccctattccctattcccttaaaacggtgttactgtttgtaaatgcagatgttccccggtgtggagatgtttaaatgtgatttctctggcgtgtagatgtaatcgagtagcgttagcattgcaaccatataggcgatcgcctaatatattaattcccaatcctgctacatccgcagcatgaacccgtaactgatgagttcttcctgttaggggtttaaattctacacgggtgtaatttcctttttttccgataactcgaaattccgttacactgggtttacctttttcccaatctactttttgataaggtcggttttcaggatctccccacaatggtaaattaataatacctttttctccttgttctgtggtcagtgaacctgcaataatagcttcatatattttatgtatttgtcggttggcaaattgctgatttatctgtgcataagtgttttgatcccgtgctaagattaaaatcccagatgtttcttgatctaaacgatgcactgacattaattcccaatcatacaaatttcgtaaacgacttaaaacactgtcttggttttctacataccgccctggtactgataataatcccggtggtttattcactgcaattaaccattcatcttgataaataatttctaagtttgaaaaatcagaagttgcaatttttaaaccagatagcaaaaaccccatcaacggttgacatctttcaacacaagcaccataaaattttcctggaatcttatcttgaattgtatcctgaattgtatcctgaattttatcatattctgaagattcaccccaccaaaattccgccattgctaggggttttaagtgatgagttgctgcataatgtaacaacttgggagcgcaacattcacctgtacctgtaggtgttcctgttggtattaattgttggatagataaagattttccataaaaattagttaatttataagctgcgtgcatttggttttgtaattccctggatagctcttttctctgttgtttgagttctctaattctgttatttgtggctgttattttatcatgtaaaggctgtaaaacttcattttgactacgtttgaagtattttctttcaattccctgctgacggctttctgcttctagttctgctaaagcaagttctaacttttctcctgtgaggttttgttgatattgttgacgtttttcttgtcgttgttttttactataattatgttctaaactcatgttgtctaactgttgttgaaatttagcagctaaggtttcatattgttgtcgttctggaatttgttgaagttgaataatttcctgtttaattttttccaattctattaaagtttgcttttctgctaaagctatttctgctcttccgggaataggtgaaacccaacctgcaactacacttaaaccatttaaaagaccagaaaaagctttaataactctttgttcaccgttgggtaattcaactaatagaataccatacattttcccttcattattataaagttgattttcccgaagttgctgcattaaacttttagcaatagcttcacttaacgccgtgcgtggtaatttcagaagttcccctgtttggggacattttccctcatagtaatagttaggtggtgcaatttcaatctccatatctgggttaataaaatctgataaatgatgtaaaattaccatctgaaaattaccatctattttctagtgttttttatagtaattttaatgactattgaacatttattgaagatttaacttagcttattattgacgcaatactgtctctttcaaactctcttgcctttgtgtactttgcgccctttgcggttcaatcataagcaaacggacatgattttacaaaacaattaccaaagtttccttaattgtttactaaatacttaaatcatccatttcctaaaaacttagctttcatttcctccaattctttatctatagcatcgttattagtagtaacagaagattgttggttagcattttttgatggaactttaccacctgtaaactgtgttttgatttctagtaattctttctcaatttgactaggagtttgagaattaacaactggttgagaagtagaacgtttttgtttaactggttgagtaattattgtcggtgggataactgcggaagtttgaatatttaaattgttatttatgttatttaaatcttgcagaacttcctgagttgtttgataacgccgaccagggatagtttctaccattttatcaataatattacccaattcgttactaacgggagttggtaaattttgtcgccatatccaagcagcgttatgggtatcgtaactatcaaaaggcgatcgccctgttaataaattaatacaagttactcccaaactataaatatcactggcaaaaattgcccttccccgcatttgttctggtgcaacatattcaggactacctatacttgttcctgtatgatttaaagctgtacttgtaaaagattttgcagccccaaaatcaacaattactaacttattatcattaatacgacgaataatattttctggtttaatatcgcggtgaatgacttgtttactatgacaaaattgtaatacatttaataaatcattcaacaattgtcgaatttgattttcattaaaagtacctttgtttattaattcatgagctaaattttgcccatcaataaattcttggactaaatactgtctgtcatcttgagtacaataagccaacagcgcgggaatttggggatgtgttcccaattcatctaactgaatagcttcctgattaaataactctattgctttttgtaccgtatttgtaccctgtgcttggggaaaaaattgtttaattacacagggaggttttgagggtttatcctcatccaccgctaaaaaagtcctaccaaaaccaccttgtccgatgggtttgatagggcggtaacgttcttttaaaagtaacttagtaccgcaagttaggcaaaacttgacatcatcagggttttccggtttggaacaatgggggttaagacagtaactcataaaggcgatcgctcacttgtctatattatgccttgtgctttgttaaatgttaattgttaagattattcaagaaaagcatagtataacaaaaaaggtaaacaaattggactttgataatcatgaaaaatcaattttcttggactcaacaatggtatcctattagtcccacccaagtagcacaaaatttactttaggtctggtctgatcatagtttaacagcatttacagattgcacatccaaataaccagctaccattcccgacacagaactggatattaatgtaagcgactggtttatgtttgaagcaccaatatgttaattatcatcagcttgttagtaaaattactcatataattggcagtaatatcaacaattattgctgtttgtagttctttggcattttatttattagatgatcctagtaattatattgtgtaacaataccttagccattttcccgtaggttgggttgaacgaagtaaaacccaacgtatttgttgggtttcgttcctcaacccaacctacaaatcaagatatttttgattttggcaaaggtattggtgtaaaaatcagaattacctaaaagtttaaagtttaatttgcacaagtttttatattttttatattttttatattaaattgataaaatctttattttcttcaaaattttatatgttaagctaaccaccattacggtaaataaagtaccaaaactttttacagggatatcttcaagatataaacgttaattcatgcccagggtagataacttgaaataaaagataattgtccctgctgaattaacaatcaagccacatctaatccatgttattggtactcatacaggggcattttattagttggtgagcagtccagatagctaattatcaataataatcatagaccaaataaatttagcattatatctggactgatttagtagccgaaatatcaaaacctaattcactttttttaaactattgaggattaacagatggttcttactttgagaaaaacaattcgtgatattgtcttcagcaatcgccaattagcaaaattgtactactcagttagcttgactcaacctgttttaccacactgggtaggtaatgactactaccgcacaaaatcatcatgggaattacaaccccatctctgtccatgtgatcttgaattaatcgaatatttgcaaaaatataatattcaggatcggacagtgtttcattttggtacaggcgctcatcacattttaggattagaaaatcagaagttaacaaaacccaatgaaattattggtattactgcttctattcctgaacatgaagcttatgtgcaaatgtgccgtaaaaatcgtcatttggctaaattttacaaggtactttgtacagatatctacactctcacagatcgttctttaccaatgttagatgtggttgcactctttcatattggtgaattttatatggctgaagaagctccctttgtgcatcataatgatgaatcaatggttgatttatttctcagaaaattgaatcctcacgggaaaatactgttctatacacagtctgtaggttatgctaaagctgaagaaatcatcgaatcatttacagcccaaggtaaaatttacctagttgaaaaatacaagagtcttttggtttatgctcagaaacagtaagttgaatcaagcagtgatgtgatattaatttagaataggtaatatttagatccccccaacccactttttaaggggggctaataccaattctctgtaataatagtgattcaagcgtttttaatagaaacaatggtgtggtcataagatacggttgggttcttttttcttaaaacagtacgataattaagtgtttatcctaaagctgtatgaaattcagtaacttcagattgtcctaaaaaagattttatctcaacagctattttttgaccttccttttctgctcctaaaagtctttctgtttctaaatcaattctaaaatcaagaccatctactgtaaatattaaaggatcatcagtaattaaccaaccatctttttctaaagctaacctaactgcattgtgaaaaaaatcttttgctgacataagaagttaaagtgaggatgtttaattatattatttttcagtcttgtaattgtaattgagcaatgtgggaaaattccctgttagtaaatcatcagaatgcttctctttcaggttgttctaattgtggatgtctaataaatatttcatcttggatacaaccatacaaatcactcaatttcatggtttgttctttgggtgaatttttcttgatttgttgaattatctcttcctgttcttctgcgggaagttgtaagacaaggttgagaatttgctcaaaggttataagaagtgagtatgttttttgtgtcatagtattttctcaattattaatagctgaaaaatctctgtaaatcttgattcaggcatttaagcaactgcaaattctgtatattgtctgatatcggctggttggaaggctaaaacaatttgatttttaggaataccagcgttaacaagttcgttagctataccgtattctgttccgtctctttgaatccagattttatcgttgataatgtctatatgaactaagcaaccatgcacccgttgattattttcccaacctaatgttagtagtaggtaatggttagtgttttggctgattattagttgtctttctagttctccgtaagcgtagggaagttgggaatattccgttaatattttttgaatgatttggcgatatttatctaaggtatccattgcagtatttcctctcgttttggatcgaagacaagtaaacaaaggcgttgattttctaataatattttaccaattggttcttgaaatagttgtgatttttgtttcgcgcaaagaaaaaatgaaaaccgaaaccaaggtttttgtaatgttacctattgacaaatgataacggttacgtataatagtacgtaaatcatatttagattaaatcagcgtttctggaaaacgcaagtatcatgtcaattgcaatttttagcaatgcgttctcagatgagctagttacattacagccactgagttgaatcgtcaacctggacgaattctagacaaagcttatgaacatccaatcacaattactcgcaatgaccaatcttttgcgctattgcgtcgtgtagatatggcttatcttgtgaaaggggtaacacaaagtaaggctgtttttgaggtgttatcggttgcatttcagttattattaggacaaaaaataggttatgagcatccttatggatggttaagcgtatttgatgctgatgaattgcaagattttattaaagaagtgagtgaggcttttcgcttaactgatacttctaatgaagcttgggatttgattgatgctactattcatgaatggcatgaaagtgcgatcgcaatcaccagtcctgacctagcagcagcttttaatgatgaaaataaagagggtaaatcatgttaaaatttatgttcaaataatgataaaagttgcaattaagcacaatttaagttaaaataataactggagtttaagttaataagatgacttacataacatcaaaaagaatggtaagaagaggaagaatttttcctgaattgactatatcaccagaagaattagccagacgagaagcagaagatgaaatattttatcaacgttgtcgggcaatttttgagcgtgtccgtcctgaatatattgaaaatcactatggttggtatattgctatagaaccagatagtggagaatatttaattgatcaggataggatggaatctcataaaagaatgttggaaaaatatcctcaagctagacatttcgttttttgtttgaatgaaacggggacaactggcacaatatgatagagggttattttggagaaaatgggcaattattttttgaaattgaattagttaatgatagcttaaatcttcctatagatgccctatttgatacgggatttgcaggttttatggctattaatacacaagatttagatggattagaatgggtgtatagtggggaggaaatgttacggactgcgaaaggtgaatcaaaatttcagatttatttaggtcaagtgatattagacggaaagcagtatcaaattccggtgaatgttggtaaaggaattaatgaagttttattgggttctgagtggttaaagttgttgcgtttggtggtggattttccagaaggtattttgactttgggatgattttttatctcacgcagagacgcaagttctattactttggttaaataattttctgtgtgttttgttaatactgttttgactaatttaggataatttattgtttctataaaataatctcctgtttgatgggtggaaatactagcaattttaattgatgtcaggtatgatagtttcaatcttttattttcgtaggttggttaagcgaagcgcaacccaaagcagttaaattataaagatgttgggtttcgttcctcaacccaacctacgtaactaaaggttttatggaaaataaaaaaaggaaaataaaattaagtattaaggaatatattaggatcaaattcctcatcaaattctccaattagtgtttctcgaatttccgtaaaatcctgaactaagctaaaaagatcttctgttttttgtaacattggagaattagtttctttatcaatatctctcagctttttaatattatcaaataacgtttgatcagaataccatgcccttccaaatcgcacttctttaattttgattttattcttatcttcaattagctcctggaagtttttaagtgaactttcagctattgtgaaagcttcgttatgttctattactaccggacgttttctagctttacgattacgaatacgtttttgtttgccttgaatctgctcttttaatgcttgaattatttgttcagcttgctctttcttttgttcattaattttatttaatctctcctgtcttttttcactaggacttttttctttaggatatttttctagataagctgctactgcttgttcttgatattccttgatgttattgtcaattttaaaagtatttgcaaataattcgactaacagttgaatagtttctttattttggactgcccatatataaagtggcgtggtttgtgaatacttactcctaagttctgaaatattttcttggcgacttttaatatatgctttgtgatgtgtcatttcttgctgagagtatttacttgcttttttatgtattctgctgctagtttatcagactgaagatacagtttgtctatcttttcttgagcataatttcctaacttgcctgtttctaaagccttttctattccaataaaactacttttaacttgtataggaaaatagcaatcattccattgaattattacatcccatcgtaaaccaacatcagcgacactatcagatggagtttgagccgcagtaattccaggaagtgcattcaaagcacaacaaataacatcaacagttttttgtccatgttcatgattactgcttgtttctaaatagcctccaagaaattcgttacacatactcccaacaaattcaggagattgagaatagcatttaccccggataccatacaaattgcgatcaattctaccggaaagtacaaaacgatttttggcatcttgaaatagttctaactccccagcactttttgaaagttgtataagactggaaacaagtgatttactgtctattttagattctttaattttttgttgctgcaagaaaaccaaacatttttctagcagcaatttttgctgatcttttgtcagtgattgccaccatttattagtggcaattccatcatttatcccgttttgccactctaaaattacatcagggggaatggaaattggtaaattaaaatttaggatcataagataattctccagtattagataagtgattaaattatttcaaatcttgataaattaatataattaagaaactttattaatacaagttaatacaccatattagcaataaatacattaccaaaaaatatagattaattaactaaacatctgcaaaaaagccttcaaatcatttaatataggatgttcaaaatcccatatttctgatttattggacattgcatattcaaaactacattttttctcggcttgctttttttccttatttgaacaagtatcaaatcttaaatacatagaaacccaaaatttattaaaatccttaattttgattttttttccatgactttctaaacaatctttccaactttctaagcagtcagcataaatcgaattttctttcttaatcgtttttaaaactgtttccaactctccttctccattaacattcgtaaagtaacaagctagttgaaaattaaaactatcaaaatttatatccacaaaattattaatttttgtcaataattgtgttcgtggaaaaactgcttgaatgcaatcattaacaaaattaattctctcaatttcttgtttatcatcaatatcaataacaatacctattcgttcaactttacctttttgtatatccgcttttaaatcataaagagcttctttgagttttttaggatctaaccctttcattgatttataatcgtcctccgaaatcataatcgcaggagcaacttctatattaaaattaaggtaacgaataattgcctgtaaaaaatattgatcatttttactttctacaatcaaaatattgctactcacctctgacctccttattgtgagttataccatactctaaagtatctaaatctctcttaatagcaactattttaccagttttcacatttctagttaactcaaaatgagcagccatattttcatactcagcaccagcttcaataaaagatttaatcatttctaaactgtgagttgtagcaaatatttgtatgtttaactccctagctaatctgtacaaaatactccaaaaagcaacttgatttgagtgatgaataccattttctatctcatcaattaatataatactattctcattattcacaatccttaaaataatatccgcaatacgatttatggcatcaccaaacaaagctaaaggcaaccttttttttccttctttcttcacccaaatatttccttcaccaatagtcattgtctctatactaataatagcaggatcaataacttgaaaggtgctgagaagttcttgatctttatcttttaaacgagatttatcaaattcctctgccaattccctgctaccaactcttaagaaggaggggataaaaaaagcatctttaatatcaggaactttaatatctctggctataatacccttaacactagacatgattaatgtttcaaatgcttctccattattaattgttgtttttaggtgcattacagattttacagactcacttcctgaaaaaagactaataagtttttcgttatcatcattattatcctgttgatatgtatcttctaaattttggacagattcatctacaaatacttcaatttttttggatgaatcattttctaggatagcttcaatctctattggattatttttattttcttcaaaaaagaagtaattccaggtattttctggtaaagattgtctaaactttgatgattctcttcttatttgtcttagtaaaaaaatagtatctggtcttggtttactattaagaaataatgcttctaataatgcagttttaccaatattattttttccactaattaaattaattttctcgaaaccagatatttctaattcctcaaaatatctaaaatttttaatcctaatatttttaatcactgtaacctccatactatgtgatcattcccagttgggttatcggtttgacgttaagttgacaccaattgctaaacccctacattttatagacagggaattaattccctgtcgggttatgggttttactaataaattaagttccagactgccaagaattgatatactcaacctgatcagcagtcaaactatcaattgcaatacccaacgcttgcaacttcaaacgagcaatttcttgatcaacctcagtaggaatagaatacaaaccaggtgctaatttacccttattcttcaccaggtattcacaagctaacgcttggtttgcaaaactcatatccattaccgcgctaggatgtccttccgcagcagcgaggttaactaaacgaccttcacccagtacaatcacagatttaccactgttaagaatatactgctcagtgaaaggtctaacggttttgatttccttggcttgacttgctaagtatttcaggtctaactcaatatcaaagtgaccagagttacaaacgatcgccccatctttcattacgtcgaagtgttcaccccgaacaacgtgcttgttaccagtcacggtaataaacaagtcaccttggggtgcagcttcagacatgggtaatacccggaaaccatccattaccgcttcaatcgctttaatggggtcaatttcggtaacgataacgtttgcacccaaaccacgcgcacgtaaagcagtacctttaccacaccagccataaccagctactacaatggttttaccagccagcaaaatgtttgtagcgcggataatgccgtctaaggtagattgaccagtaccgtagcggttatcaaagaagtgcttggtgtctgcgtcgttgacgttcattgcggggaaggttaacacgccatcagccaacatagcgcgtaaacgcacaataccggtggtggtttcttcggttgtaccgattaaatctgcaatttggtgttgacggtgtttcactaagtctgcaaccacgtcgctaccgtcatcaataataatgttaggacgatgatctaaagcgatttgcacgtggcggttataggtggctgcgtcttcgcctttaatagcaaatacaggaatttcgtaatctgtgactaaacaagcagccacatcatcctgagttgataaggggttactggcaattaaaactgcatcagcaccaccggctttgagggcgatcgccaaatgggcggtttcggtggtaacgtgggcgcaagcaactaagcgcaaaccagcaaaaggcttttctttctcaaagcgatcgcgaatttgctttaatactggcatttcccggccagcccagtcaatacgttgtcttcccaagggagcgagagcgaggtctttaacctcgtgctttaatctgggagcggttgcggtcatgaaaattatcctctaaaaaatgcaacaggttgataaacctttacgtactttaacaatattttctgacaagtagccatattttccggtaaatactcattcccgattgatcagcaaaggtaatttttcattgctagatagtggaacaggcttctagcctgttgacgggcaagacttgtactgagtttatcgaagtatgcccatcccacattttatattgaattatgaccagctacttaacagtgagtagatttgattaaatcaatgaagccaaagtttgcatcaatagctgagattccttactcatgtcaccttgtaataaaagttgataccattgatgtaactgctgccgagctaaagtataaagtggatcatcaatacctgagttaaaaagttccattattgcctgtctttgagtttttccgcgtcctaaaatcctcagccataaagttgaaacatctataggcaattcactggtaacaacaatagtagtagagaaaattgcaggtaaattataaacccctgcaatatttatagcagatggtttaattccaaatcctcgaaaatggtcagggaaaatcgaggggacgatgatcaattgagttttattatcttcttcttttgatttttcctgatctgtatcttttaaagtttcattgacaggaataatcctaccatcagcttcacttgtccatgttaaaaaatgattgagacaagttcgtaattcccagatatttggtgtccagcgtagaggtgaaataatacacggatttgaagtaaattctcccaatagtcccaaggatgtcctagatttattgatgtcaggttcaaacaatacatctaccatttttgcttctgccaccacttcaggactaaccaatatacgcgggtgatcagtaaaaattgtttttatgtatgtactttcccagcctaatcgagaaggatgtttatagactctcaatttagggttacggggaataagttcattgaggaaaacattaccataattactaagtagtgcaaaaaggtaattttgggcaaaaatcacaaaagatggtcgagacatagacaatttttcccaaatattgtttctaatctgttctgcatttaattagccatattttatcataaatacctattagctattacatactacctatatcttcaacataagtaagattaagacccgatctaacttttggttttttcatctttctctggtaagactataggactcctatttaattatttgccaaaattctgtacacaagaggtcgtcaaaagtaaggggtttagcaatgctaaaccctgacatagatcatgaaacatctggtaaaaattatcatagggacaattcatgaattgtccctacaggggtttcgtggttatacacatttcatgaccacaaaatgtctattacccaaggaggtatttaagtgctaggtaaatttttagcgattacgggttcaatgatcatatccattgcacccatacctaaagctacagcccagacaccgaataatttaccacaaataccagaaagtttacataaaactacatttactaaaaaaacattaactcaaccacaacaagaaaaagaaaatcaatttttagaacaattggcgatcgcctctggtactaccatcgctatggtaatcatgagttggggagttcgtcgtttccaaaaacgtttaagtaataatttactcaaagtctctgactctgattcctcagaagatcaacccatcactacattactaaataaacagcaagagcgacatcttcaagaagttaaaacccgactatttcaacttgcacaagctggaatttgggtcagtggtagtttaattattttaggactatttcctgctacccaagccctacaaattgggattctcaccattgccaaaattcccattaaattaatagttgttggggtgggaacatatctaacagtaaggtttacctatgccattatagatcattttacctctactatcatcagtggtggagcattactaactccagaaacttccgaacgtttgcaattgagaatatccacattttctggggttactaaaagtatcactatcattatttgggtaggtgcaggaatcctaatgtccttaattgctttgggaataaatattgttcctcttttagctggtgctggtttaattggtgtggctgtatctttggcttctcagaacttaattaaagatgccattaatggctttttgattattcttgaagatcaatatgctttgggtgatgtgattactgtgggaaatgtgagtggtttagtggaaaatctcaatttgcgaatgactcaaatacgggatgcagaaggaagattaattacaattcctaacagcgaaattaaagttgtagctaatctttctagtcgctggtctcgtgctgatttaattattccagtttcttaccaaactgatattgatgaggctttgaaattaattgaaaatgtcgctatccagatgaatcaagaacctcaatggaaacgacaaattattgaaacccccagtattttgggaattgataattttggcgatcgcgggatgatgattcgtgtttggattaaaacccaacccctcaaacaatgggatgtagcgcgagaatatcgtcgtcgtctgaaaattgcttttgatgaagttggaattaatattcccgtacctcaacaatcaatctgggttaatgatgttcagttattgagttatcaagaaaatggttcatctttgcattaagcagatatttgactgacttaaaatgtgattcaaaccctgttctggtgtagcggtaattcatgaattaccgctactttcgttattttttgcgtaagtcctggataagtcaggggtttttcgctattctcttgcaaatttagtataaatgtactataataaattcatcgtgtccgacctgtaaacaatatctggaagatggattcaaggatattacaagggtattactatgatgaagcactatattctcaatcttaatccaactgccaagcatgaatgggatcgttgtattttacgtgatcctctgaccgcaaaacgtccagacatagcaaaattaattgctgaagcggtagatgcggatacgggtagttatttagtcagtgtcaatattgaagttacagttttggaggaagcagcattacctcaagctgaacaactttcccttccccttccagaagtgagtatttcttcgccaatgcgggaagcagcgtaattaaaagttaattaaacagtcctgggttgggtagacatcaggaaacccaacacctacaattgtaggatttttctaaaaaatagcaaaaatacccaattagattatacatataatcatagcacaaaaagtaaataaggattaatcaatcctgaaaaaacgtatttgcgttgaattattgataacattctcaataatcttgagaataaaggctgattattgtcaacaaggcgcaattgatctattttagcaaaatcaatatttaaaaaacttatatttagctaatatccccgacttctctaatatttaatcttcatcaaccagagatataaaatagaagtcggggatctgatcacctttttaacaattcttgaatttgctgattaataatattcacatcgaacttttgactagcactaattctagcataattagcgatattttgcatcaagtctttttcctgaacacaatgattaattacctgtgctaattcttgggggttatttggtgtgattaaaaaaccatttatcccatcttcaactaattctattgcacccccagctttagcagcaaccacaggtttaccgcatagcatcgcttccacaataactctcccaaaaggttcaggtgcaattgatgtatgtgccaccaaatcacaagttgacattaattggggaatatcatcacgaaaacctaaaaatttaactcggttttctaaatttaaagcttttacttgatggtgtaattcttgtacatattcatcctcaccaaataaagcatcaccgaccaaaataacattaacattttctggacattctgccaaagcatcaattaaaatatgctgtcctttccagggagaaagacggctaaaatgtcccactacaaatttatcctctaatcccaaatttagccttaattgccgaggttcattttcagaaacttgataatttttaatagcaaaaccattatagacaacttctacaaaatcagctttcccaccagcttggataaatgcagttttactagcttgagaattagcaattactaaagatgcaaagcgattaattaaagtaatagcaacccggagattagtgttactaaaatgttctaaagatagaatatcgtgtaaatgataaaccaaaggacgacgagagagaaaacttgctattgcaccgacaactaaagctttttgagtattagcgtaaattaaatcatattccctagcgcgtgtcacgactttattaattaaaggtgtgagttgtcctaaactagctaatgctgtaaataaactactttgttttttaactttaatagcttgagttgctaaaacttccacaggaatatgattaatttccagtaactttctaaaatcaccatcagcaaataaaccaaccaaagaattattagcaaagggtttagcaatatctaataaacataactcagcaccacccggtttaccactttgatctaaaaacaaaatcttcattattatctacctttatctgcgtctatctgcgtttaatttatcaatttttatcagctaaaataacttgtcttacttgttgagaaatatgattccaatcataattttgtactgcataattacgacattcttctctagaaggtaaaatgatttttcttaacattgcttgttctaatttatcagcaatgctatcaacagtaatagaatcagtaattaaatctggtgcaaaaccctgtaaaatttccggcattccccctacaggtgtgcataaaactggagtaccacaggctaaagattccacaattgctaatccaaaaccttcaaaagattgactgggcattactgttaaattagcagcttggtaagcaattggtagctgttcatcaggtaaaaaacctaaaaatttaacattgttttctagtccaagttctatcacctgttgttgtagtgaattttgaatatgtccacgtccagcaatagctaaccaaatatcaggaattgtgggtttaattatggctagtgcttgtaataacttatcaattcccatgcgataaactagacgacgggaggtaaataatattggtcgatcagttggccaagctagttgttttctggctgtgagacgagataaattatattgaaagtgattgatgtctactccaccggggataatgtgaattttatgccagggaacttgatattgttgatgtaaaatattaccaaaagcttggctgagaacaatgaagcgatcgcagcgattataggtatttttttctatcaaccgctttttcacccaaatacttagttttttatttacttcttcttccttactttctgaagcccaaggaccatgaaaattaaaagtaattggtacttctttcggtaaaagatccaaaatcggaaagctatataatgcgaaatgtagattaattgcatcaggttgatataacctagttttttggaagttagtccgaatggaccataatcttttccaaatttgactatctggagatgctaaattatttaactgaatatttgactgaatgggtgtattttttgcattaggtaaacctacaccacataattctattcggtctttatttagagctaatttttgagttagttcataaatatacctttctaatcctcccggtgttttgggaaaccaacctgttcccaaggtgaggatagacgcagaagctaattcctgagtttttgtcataccttccacctaattatctccttaacttcctcacacgatgaaacttatttaataggtaagtctgaaacgatacagttaatgctcataatcatcaattaacaaacctttagtttaatccggttaaaaatttgtaaatcaggtagtttttgaataaattatttttagatattgagtttactgagtacagggagtcttgggattttgtacttagtaaaagtattactgtgattattaatatcattgatatcattaatatctattaaatccgcacctttgataattaaatattttctcaagctttgtatctatctacagaattaggctgtgatgaatcctgtattataattaacaagttccgaggggaagataaattatttttctgaaaaagaataatattggcagatgagaaaatataaaaaatatatttttttgataaagttctgatgaaattacctaaaatgcaacatttatttgttagtttattgatatttagtaccaatgatgtttatgtgccttttctccgctacgttttcgctacggtttttagaaaaggaacaagatatcaaaaagcaaaagcataatttagcaactcatttttgccaatatgcagccatagcaattttatgaaaaacagattcacttcacaaattcaaaaaaatcaacaacagctaattcaagttatcaataatgtagttaggagtaggtactggcgacaaaatatagctgtcaaaattttactgtctgtcacttgtagcttaattgtcatctttgcgggaatgacaatggaaaaagccacaactcaaacagctacagcaccagtatttacttatcaaacatcttggcttggtaatactattggtaagggagaactaagggtacaaaactatatagaggcgatgtatgttacaggaaatggactggtttacactaacagtatttgggatgaagctggcatggaagcagctatctataaagatggtaaagtcataggtttcctggaagatttgcatggttggtatcgtcttggtgggaaagcggttacagccaatagcaaatatatttatgttgctatgagacagggaggaatgagtagtcaaaaagaaggttatccttctgagggtaaaacttggtactgtgtgagacgctatgatttaacgggaaaacctgcaccttttcctgggggaaatggctgggataaaagtatgttaattatcagtgacaaaagcgaagttactggtttagcaattgtaggtaataagttatttgtgagtaatgctgatgccaacattgtgcgtattttcaatacagaaacaatgcaggaaacgggaaaatttactgttaataatcccggaggaatagccgttgatccacggggaactttatggattattcaaaataaaaaaggtaatacaccggggaaaatagttcattatgaccaaactggtaagaaattaccccaacaaattgtagatgttgttgatcctacagcgatcgccatttataaacaagatagaatattagtagctgaaaatggcatccggcaacaggtactcatttacaacattaaaaaccaacctgtccaggtaggaactttcggaactaaaaatggaatttatagcggtgttcctggagaagttcaagacttaaaactttatggtattacaggcgttggtgcagatagtgccggcaatttctatatcaacaataatggctttaataattcaggaacagatttaagaaaattctccccatcgggaaaactgcaatggcaattacttggtttaatctttgttgataatgccgatacagatcctaaaagtgatggtgttaatcttttcaccaaacaagaagaatattggatggattacagtaaaccagcaggtaaacaatggacatataaagcttatactttaaatcctttcaaatatcctcaagatccgcgtctacatacatccccagatgctcctattttccgtcgcattcaaggaaagccttttttatttctgacacatatgttcggaagtatggtgcaaatttatcgttttgatccaaaaacagatggtgaaattgctattcccgcgggaatgtttgtgggaactaatgatcaaggtaaatctataaacggtaattggcctccgtatcaaccagccaaaggagaatggatctggcgagataaaaatggtaatggtgcatttgatcaaaatgaatatgacaacagtgaagattatccctacataggaggttggtgggtagatactaaaggtgatatgtggaaaactttgcgaacggaagatggtattcgccattatcctttacagggattagatagtcaaggaaatccgatttatacctatcgttccatgcaaaaggaaaagactcctagcttctttaaagatttgcgaagaattgaatattttcccgaaacagatacgatgtatttatcaggttttactgttgaacatcctgctattggtgatgattggggagttgtcgggtcagaaattgcccgatttgataattggagtaaaggaaatcgcactcctaaatggcgaactgtcattccttatgacaccactggtaaacgagaaattgctaccgccgctatgagtgtagcagtagattatgtatttacagtgacatctaaaactgcggaggttaatatctataatgccactacaggcaaacttgtaagaaaatttagtccaggtccagaagttggtggagaaagtggttgggtggatattccccacggtatccgcgcttttcgtcgtcgtaatggtgaatatttagtgtttgtggaagaaaattggaaaggaaaagtgattatttatcgtttaccaatttcctaaaaattaggttatccaacttattggattaagtgtaaaaatccagcatttaggattaagtatgggtttagcattgctaaacccgtacatgagttataatatttgatcattgacaatcaaataatgattgttaatgtgaacaaataaaattttttggtgtgctgattcatgtacaatttaatcttcataatcatagaacaaatttacaaaatcaataaatctagctgtttttatttaaatatgatgataattaaggctttgtactttgccttaattttcataggttgagactctgtttaaagaataaattaaaataaaagtagaggaagtaaaaaaatatgctaaaaacaaccttgatggaattacaaaaattaattcccagcaatttattaaatacagtccaatatattcatgctagtttacttgcaaaatttattttaggttggggaagtgaacagtttcaatttagtgaagcttctgcaatggttttttctccccatcaagatgatgaaactttaggttgtggtgggatgatcgctcgcaaacgggaacaaggaataaaagtagccgtcacttttttaaccgatggacgtggttcccatggtacagatacaaatattcaaaatcaaattattcaaattcgtaaacaagagtctttagaagcattaagtattttgggtatttctccttcagaaattcactttttgaataaaaaagatggcagtttaccagacttaaaccctgaagaaaaacaacaaaccattgcacagatttccgaactgttaaaacgttatcaaccaggagaagtttatgttcctcaccgtaaagattgtcatagagatcatgaagctacatattacttggtaaaagaggcgatcgcccagagtggaattaaagtacaactcctacaatatcctatttgggtattttggagagcgcccttatttatcctcttaaaattcaatgatattaaatcagcgtatcgcttatcaattacctcagtacaagaaaagaaaaaaagagcgatcgctgcctatccttcccaaatgcaaaccctaccaccaggctttatcaaacgatttttatcttcagaagaaatcttctttcataattaattatcgtgtattgaatcaaaagctcaaagctaaaatatcaaaatcttttgcctgatgaaatttttattaacaacaattgctgtggagaacaaataaatgcgaatactacacattacgaaccatgtccaaaaaatcggtaacggaattgtcaatgtcgcagtagacttagcttgtttacaatcaaaacaaggttttaaagttgctgttgcttcagcaggtggagaatacgaaaaattattagtaaatcatggaattgagcattttcaactcaatcaatcacgtacaccattaaacatcattaaagcagcttggcgttatcgagaaattatcaaagaatttcaaccagatattgttcatgcccacatgatgacaggagttgtactggcaggaattttgagaaataatcatgaatatagtttagtttccactgtacataatgaatttcaacgtagtgcagtattaatgggattagcagatcgggtaattgcagttagtcatgcagtagctgattctatgattcgtcgtggtattcccgccgaaaaattacgagtagttgctaacggcactttaggcagtcctcgacatagaaaaatccaagattatcaacccataaaactacatcatccagccataaccacagtagcaggaatgtatactagaaaaggtattggtgagttaattgcagccttccaaactattgctaaagattttcctcaagcccatctttatttagtaggagatggaccagaccgtgctatatttgagagcatggttaaaaactgcggtaaactacgcaaacgtattcattttgaaggtttccaaccagaacctcaaagatatatgttatccacagatatctttgttctcgcctcacattgtgaatcatttggtttagttttaacagaagcacgagaagctggttgtgccattgtcgctagtgatgtagatggcattcctgaaactttagatcatcgtcaagctggtattcttattccacccaaagatagccaaacattggctaataccttagcgcaattactcaaagatcctcaacaattacaaagctggaaattacgcgcccagcaaaatctagaaagatttagtaccatgcgagtaagtgaggaaacattggctatataccgtgagttaactagacaatataccgtcatcaacccaatacaaatgagagaattagtagtaggtaaatagtcattagtcatcaatatccattcatctaccttacctattctctatttattgctatatattaatcacttccttttgactaaaatacatggcaattcctttttcataataagcagcttcattgataaagagaggatacacaatagactctccctcatagagaatttcttcatcttcaaaagtgagaaaaattggatcaccaggatggagaggttgataatctctaaattgaagttggggatgaatcatcgctttaatttccccatcttcatttctaggataatcaaccgcacaaatagattgataaattgtcagagtgtgactattttgtggaattttaccttggttacattgttcaaaatagtccaacacagcataaattagttgctctgtttgttgaaacaattccccatttaaaataccttgagctacagcaccaacttctatagctaaacctaattcacttaaagaacggagaaaaccactgtttttaggttgctgatgaatatacacttttaccaaaggattaattgcactcagatgagccgccaattgcagtaacaaggggtgcatattacccaatataatacataatcccatgttggcagtagtcgtatgtaaatcaataattgcattcacacaatcttggttttgtggttgcaaaattgcttgaatttccttagcccttaattcttcataaatagaaattttgtcatcaggtaaattgtctccagtaaagcaacgatttaaatctttatcaatgtatctgcttccactggcaatagctttaggattaccgaataatgacaaagtttcaaaacttgatctctgaattaaatctggatatttatggaactttttgattagataaactccaattaattcattaccgtgactgcctccaacaattgccacacgattgatttgattcataattacctcatacatacaaaagatgaaattaccaaaaagcagctagattataattaattcagcaaaaaataaattagttaaaaatcagccttttttaataaaacatcaaaatgattatatagcatgacgcgattaaattcccgacttctctaagaaatcgggaattttgttctttacaagagaaactttgcgttctctcctttgtttactgttcaagttctaaatcctaatccaattaattacatcttaattacatcttcattccttgctgctgatagtatttatgtgctgccatagccatagccaaaaatccccacataatcatacctgacacacttaacatcccactataaataatcaactgagcgcaggaactgatcccaatagcacgagcagcactgacaaaactatctaactttccttcagtatagttactaacactaaaaagcattaataacaacccaccaagataaggtatagcaccgaaccaacccaaagtaaaaaacatatctaaaatgccgctgtcaatcacaataacttcaatttgtccagttttttcattaactttccagatatttcctaaaccattaccaagagcagtagaaagggctaaattgagatttcgatcataagattttgatctctccagaaaactagtatctttttgtagattagaaaaactttccaagcgagtagtcacaacttcagagataggttcaatatttagcaatggtacaacacacatagccattactaaaatgatcataattaaacgcatttgaatccgagctttgaccgaacccaaaatgataataatccctagaaaccaaccaccccaattagtacgtacttgtgaaagtaaaaatgacaaatacccaactgccgaagcaggaaaaattaatggaccagaactggtaaataataacaacaaaccagcctgcatcaccgaaccaaatggaccagttgagtgcagtgtactccaaactcgcattccaaaaggttcaggagcgccagcacttgtaaacatttttgattccattagccacaatctgtcccactcaggagcaactacaaattgatagattccataagctcctgtgattaaaacacaccataaaaatacccgctgaatgtgttgacgataactgggataatctcgccaatttataaataaatgaaatgcaaaaataatgggacttaaccagtctaaaagtccgcggataactggaactggttgattaaaaattaatcccactaaaaaaccgtagattaccccgataaaacctaaaacaaaaggtaaacctccttgacgaacagcacgaggtaaatatttgataaaagtggcaatagtcacaaataccactacataaggtgcaagcatcatttgccgggtggggtcccaaccaattcgatagtcaactaaccgagttaggaagggtgtgagaaaccaaatccaccaagtaaaaccaatgtaaagaatgggatgacgcaagtataaaaatacagcaactacgaaggaagaggcgggaaaaactaagcgtaataaactagcagcaccgccaaaatagcaagttgctgtgagcaagataaagccagcaatgactatccaagcttgtgctgatcttttttctggggaataattagtttgtaaaaaactattgaaaaggatctgtttggaaatcacttttttggtaatgggtaatgggtgattggaaaaaattacaaattacgaattacaaattatcaattatcaattatcaattatcaatttattactttgccatgcttgccaacgtccccgcaaagaggcttgtaattttttagtggcaattatgccttgactgggtaaaaatctcaaccattgcaatattcctaaactatccctagtgccgatgaagattgcccaaaataaaaagacaattcggcgtaaaggtggtaaatgttctaataaaactagggtttcattatgaactaagttagtaaaggcaatttcattaaagttttcccgctgatcttcatcaaaacgttgggcaggatagtgatctacggcaacgttaggatcataaataattttccaacctgcacgtttgagagctagggtaaatgccatttcaaaatgtacctgtgcgccagttcctcgcatccgttgatcaaatgttaatttccccattgcttgggtgcgaaaactcatattcacacctttaaggacatcaacttcacgaggttttcctactcctaaatgatggttgccaattactcgcccaaaccactgtacacgccctacttttgcacaagaaccgttttctattttctcgccttggtgtatccagtcacgtccacctactgcaccgatgcaaccatcgctttcaaagtgtgcagtgattttttctagccagtcaggatggggagcagcatcatcatcagtaatggaaactatgtctccgtttactgctgtcagtccggtgttgagagccgctactactcccggttgtgtaactgtgacaatttgcaatggtagcttgtggggcggaaattcgcccaggaattgccatgtttccgtatctgtatcccggactacgacaattacctgatccactggcttagtttgggcttgcagtgcggtaaggcagcgtgataagtcctggggacggcgataggtggggatgagaactgtattcctcattttgcattaactctgtaaataagtctaaataggtttgtgccattattgaccagctatgttgttcggcaatgttgcgagccgctttacccatttgttgacgcagtatattatctgttaataacaataaggcggcagataaagcatttatgtcatctgtatccggtaaaataattcctgcctctggtgtgactaattctgcacctcctgtagctgtggcagtgataacaggtaaaccggaagccattgcttctaataaaaccagactgcaagcttcatatcgggaaggaaaaacaaagaaatctacagcccgcataatttcggctacatcccttcgatatcctaaaaaatgcactcgttcactgatgcctaaagcatttgctaattctggaaagggactaccttctgtttttcctactactgctaaatgtaaattagggacttttactaaggcttgcagaattgaatctaagttttttctagttgtgcgaatgtctccagcaaataaggctaaattgagattttctggtaaacccaatttttgcctatgagaaataccgggagcaaattcttgtaagtctacaccattaacaataacccgaattttctcacggggtacaccaatgtttactaattcatcagctacttttccagatacagcaattacaactttactttctcgaaatgcctgtttttcagcagaggcattaatggcagtatatagccattgatataaaccatataaatcttgacgatgacgggaaatgtgtacaggcgatcgccaccaagaattatggacaaaatgtactgcatttacatcactcgcacctttagtaattgcaccattaactttaattaagtctacttcatggcgatgtttacgtaaccaagcaccacttttttgagcaaagataaaattgcgaataaattcagtaggatatccattgacaggaattttaatccaatttacccggctattttctgctagttcgggtgagatttcactggctaataatgtcaaatgatgaccacgacgaatggcttctagagcaacttcataatttactctgccctgaccatcacctttttgaattttatgggtaacaatgcaaagtttcactaataacctctctagttaattaaatgtttattaaacacccagtaatttctgcgtgaatttgggatgtgtaaaactgagagtcagagctattaaagttcgcaaattaaatttttgtctctgtaatgcttgccaaaaataagaacgtgctgctgtggtttgttgatctagcatcaagccaatgcctaaagttgtatgtgcttctaaccagagttttctaaaatgtgaatgaaactgttgcaaatgcttatcttccataaaggtttggtagcagaaaatttcacttttagctttacaaattttggactggatattacgtctaccactgagcatagtatcagtttgttcatgttcccgataatatgttaatttttcaggataatagtaaactccatgtcctgagatacaacataagtaagttaaatataaatcccacattcccccaacttctgaaggaatactatcccaattaatcaaaccattgcgaattacacaagctgctgctgtcggtatacttttatcgactaaaccaatttgttggaaattttcatgaactccataagcaattttattacgcttataactgcgggaattttcttcagttgctgctggattaatttgactttgaccatcaataatatattggtcacaaaaagccaaaatcaaatgaggattagtttctagatgtggtacaagtttagctaaaaaatcttgatgccacatatcatcatcatggagactagcgacatatttaccttgtgccattttaaaggcattcatttgattattgagcattcccacattttctggatgtcgccaaaatctgatccgtgagtcacaaaaagatgctagtaaattttcaggattttcaggactacaattatcagaaacaataatttcaatgttttgataagtttggttaacggcgctagtaattgcttgcttgaggtattctgggcgattataagtagggataattacgctaaccagaggttctgatatttgagtatttatagtcataattcaggttagttattttttcatttctgctattttttaagctaaaatcagcgatagttttggcgtaaattgtttctaatctctgaatgtgaagatccagagtaaattcttgttgaaaccaagcttgtccttgttcgcccatgcctcgactttgatggtaatttgtagctagttggttgatggcatctgctaattttcgtgtatcattagctggtacaaggattcctgttttcccatcttgcacatattcaggtattccaccaacaacactagcaattataggacgataatgagcataagcttctaaagtcactaagcccgcaggttcaggccacagactaggaaaaaccacagctaaacactgctgataaagtgttttaagcttgtctttattacaccaaccatgccaagtaatacgattacttaaacccattttttctgctaatttttccatcgtactttttatccaaccttcacctgcaatatcaagatgaatttgcggatgagttttggctaaagctttcagtaaccattcaattcctttgtcggggacaatgcgacccacaaacaaaatgcgctgattttgatgaatttcttcagttaaagatgctgtgggatatatcggctttttgacaccgcagtgaagtgtaattacttggtggggtgataaaccattactaataatttgttctcgtacataattactattagcaattacaggaatgttgacttttttggcagtgctaagaaaattatagctattccgcaaattctcaaatattctttgtggtctgcgactaccacaaccatctactaaatgtccccaagtacaacctaatgggtgcatattgcgatcgcattgtttttggcgatcggctaaatattttgtaccactgggacaataagtacaatgattatgcagtgtcaagactgctggacattccccagtcaattctaataagaattctggatcgtgaaggtgcagtaacttacattgactttgatctaaattcttaacagaattagtatgggtcttcatcactccattcataggaaaattgatcaaagaagatatgtaagtttccatccccccatttcctctgatatcaacaccagaacagtgatatattgtttcttgagaaattatgttttcatgtatggttaacattattttctctattttctcctttttagttgaaaatcgctgtaattaaatcttgctttaagaaaatttcccttaattgatgttgataaattgcctgattatattgttgtgaatttatcctcgcaacttttcccatttctcttctgatggattcattttctgctaaaaatctcaattgattagccatagtttgtacatctctaggaggagaaataaagccatttatgccatgatttaccacatccgctgcaccacaattagaagttacaattacaggtaatccacaagccattgcttctagtgcaaccaaaccaaaaccatcttctacagaaggtaaaaccagaaccgaagatttaccaaaaacttcagtaggatcatgttgactaaaattccaaaattcttgtttaatattggtatgtttgtttaatacttccgtcataaattgtcttaatccacgagtagaagcaccaccaacaatcaataattctgagttggggatatcagcttgtaaaaaagcctgaactagataaggcaatccttttctgggttcaatagttcctacataaagcactcgaaaaacttgatcatttttcacagtttgatgaaatcttctagtgtcaacaaaaggagtgataacctttactttttctggtgcgaatccggcttgaataaatgtttgtttagcaacttcagataaaacgataattaaatctgcttgttgacattcttcagcaaacctcttgagcatttggggatgcatggttgctacagtaggatcagataaaaaatctaattcttgctgaatttgctgctgcataaacggcagataattatttaaacaatataaccaagcttttgcaccttgagatttagctgctttaaatgctaagttagtttgtccagctactcccataattaaatcacagggataggattttaattttttacttacctgttgatcaaaatataagtcacttagcaatacagcccaatcattacgacgacgcaaaatgggggtacttaataatcttttactccaaggagaattacctacaggatatacagtaaaatcggtttttggcactgttaagccactacaaaatacagttaaatctcctagtttatttaaacctaatgcagcattctctaaacaaacaccttgtccaccagtgcctaaacttgtattacaagtaagtgtgattttcataatggatgattaaaagttgaggttgagcaaataaaatcgaaaattttgcagtagtcctgaaccaaggtttgataaattaattctttgtgttgaatgaatagaaaaaacgatcaaatttgctaaattttctcactagcagtcatttgatattgcattttgtgatattgccaaagcttacctttttgttctagaagttcctgatattgaccttgttcaacaattcttccctgttctaaaactacaactttatcagctttagcaatagtagaaagacggtgagcgatcgcaattacagttctacccacagccagcttttctaatgaatcctgaattaatctctcagatacagaatctaaagcacttgtagcttcatccaaaatcaaaatttctggattacgtaacaatgcacgagcaatagcaagtcgctgtctttgtccaccagataaccgtacacctctatctcccaattctgtatcaaacccttctggcatttctaaaataaattcttctgcatttgctagtcgcgcagcttctcgaatttttgcctctgttgcttctggtgtaccgtaagcgatattattccacacagaagtattgaaaataaaagtatcctggctaacaacagctatcttccgacgtagagaattaatttcaaattgccgcacatcaatttcattaacataaatatagccttcggtaggatcataaaagcgaggaattaaatcggcaactgtggttttaccagcaccagaagcacccactaacgctgtcattttacctttttcaattgttaaggtaatatcatgcagcacttgttgattgtgactatagccaaaatttacagatactaaatcaattgatcttttcaaacctgtaaattcaattgtcccattttgaaagtacgttttatcctctcgtttcaacaagtttttaatattctctgccgaaccttgaagagtgttaagaaaagctctagtgccattaatatcttgaatgaatggtacaagacgaaacagtacaaagaaaaatgtcagcaaagaactaacttgtaaagtcccattcaccacaaagctactaaaagctaaaataatcatacctatcagcacagtagtagctgcactttcggcaatgggttttactaatgtccaaatgagaataactttagttgaactgctgactatttgattactagctttgtagtaacgctgacgctctgattcttgagtaccagaggcatgaaccgtgcgaataccattaataaattctatggctattgatgtaaaattaccattcgcaactgaagtaccaaaactggattctcgcactctagcattcagatttgataacccaacagctaacaaagtaaataacaatatggcaattagcgtcagttgccatgaaagtaaaagcattgtaatgaagtagacaacaactgtcaaacctctagtaaataaaaatgctccgccgctaaaaccctgtttaatcttctcaatttctgtagtaattgtgttaactatttccccagaacgagtggtactaaagtaactcagagacaaagattgcaactgttcaaaaatttgttttcttaacctgtctccaagatataattgacaaaattccgtgtatatttgagagaaatagttaaaagcagcacgcatccatgtacttaataaaatcagacaagatacacgatataatctgctaattgctgaggtattaactcctaatatccactggtcaaaccaatctattcctatttgaatgggtgcagcattaggattagttaaattttgcaaaaatgacagtaagaagccaatacttataccttcaaaagttgctgctaaaaaggtaaagactaaggcaagtatagtcaccttacgaaagtgtttaaactctcgtaaaattaaatgattgtcctgccagaatttagtggttttcagaaaatagcgaagcggattaaaaaaatgagatttcattgatattatctagcagtattgatcgatagctgatttagttgttctgcattttctaaacttaggtggactccatctgttaaaacccaacaacgagagccaatcaaactcatatccccacgcagtacattgaataacttaggtaaattctccagaccatatttacgcatcaaaacccctaaaaatgagatgttatgtttttccctggtacaaaacttgagcgattgaaatagtttacccctctcaccaatctgccactcataagaaaaaataaattctggggattgtaaccacaaaagtatagttaatcccagcattaaaggactaaccaatagcaacaaaattaacgctaaaagccaatcagttattctttggatcaccctgaataattgatgactttgttttgtgaattgattcatagatgatgggctgatatatattggtttttgagcttttttacaagcatttgcccaaaattttaatgcagcattacctagttgtggatctatagttactaaattaacaggagaatgttttaaacactctactaataattcttcgttatctagagcaggtaaatatggttgttgtaaatttacacgagacttcactaatagctgacccatacgccactgaattgtgcagtattgtaattgataattttttggggacaactgtgatacagtgctgtgttcttgtaaactaggaaaaattgaagttgtcataggtatttgcgtttgtacagtagccaattactgacctaaaaatatgagttaacctttgtgcaattctgtagatatgaagatgtacagaaagcaacaaaaacagttaagcaacagcaattaagataaatagagatttaggaaacttggtatttactctaggtatatgtagagtggaattacctttaggaacgctcgctaaattaatttaattgactctacttaatactgttgtagctatcacaggaatactcgaatttcagtctggtgaattgttgtcttcaattcctagaatataataaaaacgagaattaactaatgattaaatcaattctttattgagtctttaaatagataggttttttcacacataatgttaagctatgatgaatcaatatcttttcgtgttaaacatcatacataaattctgtaatttaaaaactaataccgtttctgtatgaaaatgcaataatcaaatttttgtcaaattatacattgtaggggcaattcatgaattgcccctacggaaatatagggcaacctcacatagaattggtataactaattggattagtcatataattacaagtaactcaaactaaaaaaactcagatccagatccccgacttctttaagaagtcggggatctatacactttttatttgacgataattgcaaaattatttttggtattttgggaaaaaccctcaactctcaattcttgtcttttcatgataaaaaaaggcaaggataaaaggattaacttccttaaccataacctttttcatatttacaaaggtaagcattcagccttcagccatcagctatcagcaaaactcacaaaaacacaaatttcagcctgtgaatttatctactcaaagcctggtaatctagtaaaattatgattttattaacagccatttactgattaatgatagctgaatacttactcacaaagaaagtattgttgccacaaaaaggaaccgtggaaatcattgagctatttttccacaaattcttttagcactaattgttgttgtttgacataaggaacataagtgctatcagaattagatactccattagccacaaccccaatcagatttaacttgctcaacattgctgtagcttgggctaaatggttgcgtgtcaccctaccaatgctggctaccataaccacactccgacaagatgaagctgtcagcattgcatccaccataccgataactgaaggagcatctatgagtatcaaatcatagttttcttcaaatgctgccatcagttccatcatgcgtggagaactcaaaagatgagccggatctacaggtattggaccagcggttaaaatgtcgatataggatgaaccggagtatggaattcctatttgatgaggaaggctaacatcactggataatagagtggacaaaccttgttcattaggaagattcaactgtttgtgcaagctaggatcacgtaggttagcatcaattaaaagcacctttttatgtaacctggccgcactcatagctaaacctaaagtgaaagctgacttaccttcatctggcaatgctgatgtcaccatcaaagattttaattcagagacattgtggagaagttcgatatttttataaatcaagtctagtgattcccaacgtggtggagattgtaagacttgaattgtccaaggagcaagaacttcaggtttaccaaaaggcaatttgatgattgattctttcggtttagctggtggcaatttgggagttgttcccaacaaaggtagagcaacttgtttttctaattcagcagtagtgtgtacagaatcatccgatgcttctctaataaaggctgcaacaccccctaaaataaatcccactactgcgcccaacaaaagattttgtttgagatttggtcctaattgtatgcctctttgtggttcttccaccacttcccaattaaatccacctttggcaagttcttggcgcaattgttgttctgctcttaacagttgctccaatctttcccgactaaattctaattggggaagtatgcgattgtaataagctaagagagagggaaacctttttagttgcgctcttagttctttctctttttctgccaaagtttgatcacgggcgcttaaagaaactatattggtttgagtttctactaattcacctgtgaggttaaggtcaatttctcccagttggccttgttctagcagattgtctgcaaaactgaatgcactgctagactgtctccctaaagttctactaacttctttttgcaaaagttctttttgactgttcaactgttcttggagcttctgcacatcgggagtatcatcagtaaaacgtaaccgttcctgtgctaaagctaattctgttttttggatttcgttgagtaagccttgataacgtgtagactgactgagacgggaggaaaccaaggcattctgaggagaacgattcaactgttcctgcaaagacctctgcttggccacagcttcttcatattgagaacgagttatttgtcgctctttctggatattatttaaggattcttcaattgctttggcctgcaactctggattaattaaattctggtttctccgaaatcgttgcaaattggcttccgatgcgttcacctcatcattagcttttcgcaactgctctctaataacttgcagacctctttttaaacgtatatcctgctgttgtttgttatattcaacataaacttgccgaatggcagttagcactttttgcgttttttctggatcaccatcactatagtcaacttgaaaaattttagtagcgatattatcttctggagtcttgatttgactgacgactaagtattttttaacttcctctgctgtgatatttggatattccgacttgagtttatcaactgctttttggattagtccagaactccgcatcaaattcaattgtgtcgctgtgtcaataacaacgttagaatctgtaaactgacgttctactggatctactccttcttgtttgccttgatagttaggttctactaacagttgcattgtactttggaaggtgggcttggtctttaaagttatgattcctgccaaagctgtagaactgagaaatattaacacaacccagggaaatctcctgacaaatacagccagcatttgtccataacctggttcttgatctgctactggagttatctggggatttagactagtttgaaccacttttattatccttctgtgggagacgctatgcgtagtttgctaccctttatcaattggtaattgataattgataattgataattgacaattgacaattgacaattgacagttttttcatttgctccagaggtaattgtcaattgttcattttccattgtttaagggtcaagctaacaaggtaaatattcagccgtcagtaatcagtaatcagctattatctgggatttataagcattttcagtgaggaattaggaattgattttggtgtcagtctcccctaaaattcctggaaaattagcctgaaaagcagttttagctgactgctaactactgatagctgaatgcttacctaataagttaaataaatgagtgatgcacaccagcaaattgaacaagaatatcctcaactttagagaagaatgcttgttctgaaaaattacttacggcatgattacgaatcgtttcgtaattccaagatattcctctagcctctaataatgcggcttgtagagaatcgggtgtttgtctcttaaaaaaaactcccgttttaccaggtatttgagtatctaacaccccaccggctccataggcaattactggagttccactagcatttgcttctactggaactaaaccatagtcttctaaggcggcaacaataatagactttgctgtggaaaataagtctttacgttggctatcactaacatggcctaaaaattcaatattgcctaatgctttggattttaacctttctagttcgggtccgtcacctgatattaataaattccaccctaaccaattaaaagcctcgactatgatatcaagacgtttataacttatcatccgcgccgatgccaagtagtattcctccttagtatcagaaaaaacaaactgattggtatcaattggatagttaatcacaattgcttgtttaccgtaaattttttgaatgcgacgggcaacaacgctggaattagcaatgtagaggtctggttcttgagaatatttcagatctacatttctcatcattgcaaatattttttcaattaagggggcaaaatagcgatagtctccatactcccttaaataagtttctgtatcccataggaaacgagtgacattatgacagaaacaaatgtgctttgcctgtggttttttacgcactgctttggcaaaacttgtactactactgataattaaatcgtagtcttctaaatttaaggctcgaaaggcaggaaagtaaagaggagccatcacacgaaaatacttggcagcaccgggaatattttgtaagaaagttgttttaactaaacgttcacccagatcaattgttttttgaggatcatacaaggatgtgaaaatgtcggcttcggggtagcgtttacaaagcaattcaaacactcgctctgccccaccgcgctgggttaagtaatcatggactagagctattttcatggatgatgccttatatgatagtgttgactatttgactaaattattggctgttgcatcagggtgtacagatgttaataatctctatgtttatagcagtattatgtctgtactaaacccgtccttaggtagttacaagctgcaacgtcaatgtagcaagtgtctgatagctttggttaatctagctatcgcactgctaatttgatgaatggcaaaacccacaaggtttgtacattcaattacattacttaatcaggcatttatagtgttagtaattagtacaaccaaagggatttgacaataccattagccaaccacgaaaaatctactctatagcagaaatgttgatatttcgcctttggtgttttttcaactaggtagatacttgttaataaaaattttaatttttcggatcaaactggaagttgtaacagaataccaggtcaagtctgattgatttgctcggtttgaacaaaaatatcaatttgttcaaatcttagtgataaaaaattttcagcccccaacacaagggggctaaatttaagttttgatgtaagtattcagctatcagtaatcagctattattgatgattttcttctttttcactgactactgaatgctgacgttttgtggttaattttttactttatttgacacctgctaaagttttcgcaggagcaaaataagctgtttgttcagcgcgtaatctgtcacaaagtctaccttctggtagttctacatcatcataagaaatgacttgatctttctgaatatctcgctttaagcgacatccttctgctatccccattggtagtaaattttctcgctgcacaatttctgaattttcacattgtccataggtcatataataaccaatgccatctagtgtttctcccgcttttaaatcaattttggctgtagcaactacatcaaccactggaccagctaggggagctaatacagcatcatgaaataatactgcacgcgcaacggaaaggggtacttcaaaatggcaaaggtgatagggagtatagaaactataaaggggtccttcacctaatttataaagattcagataatgtctttgtttggggtcttcatgggtagcaaaaacaaatactccaggactgggttttgttcctactacatagtcaacaataccgcctaattctttgagttgatctatgtcatacattttggtcatttcatcaacatgacctgtgtattcatagcctaacattccccgttttgcaactttcattcctgtgccgttagcaacaattgcttgttcaaaggaaatttttgtaccgtctgcaaaacttgtcaccattgcgggattttgtccccaacgttgagcaaaaccggcttgagttgtagggttacgataggggtcttgtaaacctttaatgttgccacacaataatggtgttaaaccgatacttttaacaaagcggtagaggttcatttctacccctggttgatcaccatcacaagctgttaaaattactccagcgcggtctgcatgaactttgagaattggtccaattgttccatctaattctgcattcattaaaatgatatgcttttgatgggcgatcgctctcatcactaaatgagcagcatattcaattgttcctgtgacttcaataattgcgtctatgccttctgctgcacacagtaacattgcatcttctgttactgcatatccaccttgagcgatcgcatcttctaaatctactacactagaaacagtttgaaaattctcaattcctgcttctaaataagcttttttcgctgtatcaatgtgtctgtttgcaatcgcaactaattccattccgggaacagaattaataatttgattggcaataccccgacccataaaaccagcgccaatcatccctacttttacaggttttcctaactctgcacgggcttttaaagcttgatcaacaataatcatcttaaactcctattaaaatagattccaataaaggccaattgcgatctttttcagatatttctgttacttctaaaggccaagaaatatctaaaagtggatcatcaaaacgcaaaccacgctcataaccaggggtgtaaaattcacccacttgataaacaacttctgctccatctgttaaggcttgatagccatgagcaaacatttctggtacatataaagcgcggcgattttctgcactcagttctacacctatatgcgacaaataagtaggagattcaggacgcatatcaataattacgtcataaattgctccctgagtacaacgcactaattttgtttccgttgcgggtgcaatttgatagtgcatcccccgcaatgtaccttttttatgattaaaagaaagattgcattgggcaaccgttggttttaacccatgttcagcaaattcttgagcgcagaaagttcgagcaaaaaaaccacgatgatctggtttttcttctaagtcaataatgaatgctccaggaagatttgtttctgtaaaaatcatagtttttcaaaaaggtaatgggtaatgggtaatgggtaattggaaaacataaaattgattacccaattaccaatcaccaatataatttactaacctttttccacagcttcagggataaattggttattgggtttgatgaaagtatcatcatggtattgactacaaagttctggatgttttggtgggttagcagtgtatacaaaaaatacagttgaacgttcctcgcttctgacagtaccatgatgtaaaacatttctgggatctacaaaaatcacagttcccgcttttgctgtacaatatttccattcgtttttaggaataaaatttatcatttgttgatcattaatccctaaaaaattagacttccataaagcataatctacccgataataattaaaaaattctctaggactttttgccaagggtatatattcaaaagcaccatgtttctcagtcacatcctgtaaatagataatcactttcatcatccggcgatcttctgaatctttatgccacagtaatgtttgtgattgctgctcattgggaaaatcttttctgacatgaacaccatgaaaagctataggtaaacctatatagttttcgatgatattttgcaaccgtttttcaatgccccaggtaaaaaattctggtaagtctgtaactgtataaatttggggtaaactataccctgattttacacttctaggacttttcatggttgctgcataatagttagcactctctaacatttgtgcagttgatggtaatcctaaatcttctaaggaagtaatgtaaacaccttctctttttagggtttgggcaattaattgatctccagaagataacacaggtaaattgtgcttatgtttagctaatgctactcgataatttaactcagaggtgagcgtatttattttgtttttaagagtttctaacatagtcatgataccgaattattctttctgcgaacaatttgacttgatgtttgatgatgacattcagcaatttttacttcaggagcagccataacttctacagcagaaatactgactacagctaaaaaaggaacaactgtttgaatagcagaaattggccatcttctcaaagcacccaagaagacttttaaattaacttgttgaaagttctgtaccatcatttgggcatagaatcgtttagaatatccattttcgtgcagctttaaaaccacttcgggaatatgtttatactgcattaacagcgcagatttttcttctttttgccaataactgacaccaacaatacattctaaataagtctctttactaactattactttgccattagcagcacaataaccagctaaatatgctaaagatatccaattattaatagcatttggccaaatttgcagagcgcgttttactaagtcagttctgtaaattgaggatgacaaaaaaataactgctcctacacttttagtcaaacaatattcaaatatcgttttaccatctcctgtaccatcttcattatcaacatcaaaccaacgattaccaactattgtcggtggatgtactgcttcaccagtaattttatttctgccagaaaaattgagaaataataatgataattcttgatgttttttcagtttatctagcacataaccaattgctctatcttggattggatcatcatcgccaattgtccaaacatatttagtttttgcagaaattaggcagtacatgatatttttcattacgcccaaattctcaatatgtctattagatttaaaattaacatttttgatattttcttgccatttttgaataatttcctgagtgtgatcactagaacaattatcagaaacaaatatctcacactcagattcataacctttaatagcttgagataaccactctagttgcttatctagtaaatctgcacgattataagtgggaatagcaatagtcagtaatttattcatggtggaatatttatcctaaaatcctagtttattattgacagcacagatgggaaatgcttataaaattccgaaccaaaaatattgattcggaaatttaagttgattcttaatacatgcctagtttatttagtagtccagaaaaaatcatgatcaatttgttgagtacgaattaaatactctaattgctttaatctggtaaaccctctaaacaaaaaagtatcttcagtcatgtcgatttgccggaataaatcaaataactgttgagcgcctctttgagcattccaatcacacttaaatcctggtaagatagtgttaattttttcaaaagatactcgatagctacggttatctgaaccgttatcaccaaaggttaatttacaaccagggaaagtttccgcaataatttcagcgatttctttcacccgataattattttgtgtatctcccacattaaaaacttgattatggacaatatctctgggtgcttctaacgcacaaacaatggatttacaaatatccaaagcgtgaactaatggccgccaaggtgtaccatcgctggtcattttaatttcttttgttgtccaagctaaaccagacaaattatttaaaacaatatcaaatcgcattctgggagaagcaccaaaagcggtagcatttcgcatgaaggtaggagagaaatcatcatcagctaatggtttaatatctctttctactaatgttttacattctgcataagctgtttggggatttacaggtgattcttcggttacatccccttcactagctacaccgtaaacgctgcaagaagacatataaataaagcgacgcactcccattgttttcgctaagttagctaatcttacagaacctaaatgattaatttcataagtaatatgaggtgctaattgtccggtaggatcgttagaaagttccgccatatgaacaattgcttctacaccttctaaatcttcaggtgcaatattacgaatatctttgttgagggttttagctgtgatttcagttccgttatatagccaacctaccttataaaaacctgtgtctactccgataacttcatgaccttttgctgttaataagggaggtaataaagaacctaaatatccttctgttcctgtgactaatattttcatggcttttaaattttttcagttgtgaaattatgttttttgctgaatttagagcatgaacatgaataattaaccgcaatttaatctagaaattaatctagaagttaatctagaagttaatctagaagttaatctagaagttaatctaaaatgcgggttaattgagatgatttttccaaaaatcctgatctggattttaagcaactaagcttcttaaatgagcttgttctggaatttggttaactactgctttaccaatttctaaagaagatgtagctgcgggtgagggagcattgcaaacatgaacagagttttcaccttgaatgattaaaaaatcatcaactaaagaaccattgttcattaatgcttgagcgcgaactcctgcatgggtagggactaaatcttctgcttgcacttcgggaatgagtttttgtaaacttctcacaaaagcagctttactaaaggagcgaattatttctttaattccttcatctgcgtgttttgctgctagtttccaaaaaccaggataggtgattacttctgtaaagtcttttaagtcaaagtcggtttttttgtaaccttctcttttgaaacttaaaaccgcattgggaccagcatgaacactgttatcaatcatgcgggtaaaatgcacacctaaaaagggaaattctgggttaggaactggatagatgagagttttgaccaaatagcgtttttcgggggtgagttcataatattcgccccggaagggaacgattttagcttcagggttagctttacctaattttgcaatgcgatcgctatgtaatccggcacaattaatcacaaattttgtttcaaaactcccctgattagtttctaatatatgatttgtaccactccgggagatttccataactttggtattgaggcgtaaatctccaccttgattgtttatcagttcagcgtattttaaacaaacttgtttgtaattaacaattcctgtggaaaataccctaattgcacctacacaactcacatgaggttcaatttctcgaacttcttcaggactaattcttttgacttctatgccattttctaaacctctttggtaaagtttttccagacccggtaattctgtatcatcagtggcaacaattaccttaccacaaatgtcatgatcaatattatgcttttgacaaaattcaaccattgagcgactaccatcacggcaaaatttcgccttaaagctacctggtttgtagtaaattcctgaatgaattacaccgctattattaccggtttggtgaaatgcccattggctttctttttctaatactaaaattctcgcatcaggatagcgtgaacctaaagccatcgctgtagatagtcctactattccaccgccgataatggcaaaatcatacatgattaattgttccctaatcgaaaatctacagtcaggtgtcaggagtcaggagtcagaatatttatttgtcccaggaatccacagaatcaagttttttcatcaatgaaatcaatgatcaaaaatgaatcaaaaactctaatttattctgcatcctgtattatcctgaatatttacccaaaatccaaaatctaaaatctaaaattcttattcccacactttccaaggagcttgattatttttccatagctcctctaaatattgtttatctctcaaagtatccattggttgccaaaatccatcatgtttgaaagctgataattgttccatttctgctaacttctctaatggttctttctcccaaactgtggagtcatcagcaataaaattaattacttctggttcaagaacaaaataaccaccattgatccaagcaccatcaccttctggtttttctttaaaactggtaattttagtttgttcttgtcctaaagaaattgctccaaaccgtcctgctggctgtactgcactcagtgtagctaaacttttttgttctttatgaaatttgattaattcggtgatatttatatcgctgacaccatcaccataggtaaagcaaaaagtgtcattaccaatgtgttctctcacttttcttaaacgtccaccagtcatggtattatcacctgtattgaccaaggtaacacgccaaggttcagcatatccagaatggatactcatctggttaaatctcatgtcaaaagttacatcggacatatgtaagaagtagttagcaaaatattccttgatgatgtaacctttgtatccgcaacaaatgataaagtcattaataccatgagccgagtatattttcatgatatgccaaagaattggcttacctccaatctcaaccattggcttaggtctgatactggtttcttcactgaggcgtgtaccaagacccccagccaaaattactgctttcatgcaatttacctcaaaaatttgccaataggtgatgatttgagttcgggatgaagagaatgtacaggaaatagagaaacaatgaacttctgtaagaattcaagattcatgattttgagcgttttagccgcaacacatctaaaattctcgttctggaatttgaatccttacgaatttttatatttttccctagaaagaatctaaaattaatttaactgtaaaatgctgaataattatgaagaacaagtaaatttaaaacaatttatatgtaaaaaaatcatgaattacagtaagaaaaattttagttttatacaatccaaaaaatcaactaatataaaataactagcatcagacattgcctacctccagaagtatgatttcttcttaacaaacaaaaaaatgctagtatcacaaaagtcaggagtctgtaggggtttagcagtgctaattagggtttgctgatagcgtagcgtggcgtagcacctgtcacctgtcacctgtcacctagcctaatttggtttttttctgactagctacttaaacccctacaggagttaggagtcaagagtaaaaatctcttattttggaagaaaattttagcgatcaattgggtcaaaaataattgagctttggaataaagcatcacattttttggctaccattacgcaaatgttactcagggcttgctgatagttatccatgtcctcttgttccaggtaaatttgagcagatttttctaaatcttccatggcttgtgcatgattttcttcaactttactttccccgtattgagctaattcataataaaccattccccgtttgaggtaaactttagccatctggggattaatatttaatgcttgattaaaatctgcgatcgcctgattgtattcttgatcataattactgctatattgggcaaattgataacgagccaaaccgcgatggaagtaagcttctgcttgggaagcattcagttgaattgcctctgtaaaatcagcaattgatttttgatattcttgttgaaaattattgctatatttagctatttgagaacggacaataccccgtctaatataagcttccgtgtcacggttattgatgttgatagcttgattaaagttttggatagctttctgatactcttggtcaggatcattactatactcggccagcatatagtaggcattgccccgatttacaaatgctttaacttcctggggattaatttttagggcttggttataatctgccaatgctccttcataatcattcagattgtagcgagaattacccctatggatatacaatctagaaaaattaggattttttttgataccttgggtaaaattttcaattgcttgctcatagtctcgttttcgataagcagcgttaccacgatcatagtaatctaaataagacagattttcctcttgaggatgattattttcttggcgagaaatcaagctttgttgagtgtaaggattttgggaaacaaagggacgagtaaatttaatcattaagtccaaataccccaataaacccaaacccaagaggctaaacataatagtataaaaccttgacttttgagtagtcttgggaggttgataaatagaaaaattctgggtaaatactggttgccaatgatgtagcggtgatgcagaaatcacaggtcggcgtgaacgaggattttgtgtgtggcgctttttagattttcgccggggtttgagatgttctttagaagcgatcgcctccagtgatggaaaaggatcacgtccacctaaacgcgccgcacgttcacaccaaggacacttgtcgagatgattatggtagcgatgctgggggttagcagtacaagtaacaagactctcttcagcggtggttaaaactgacaaccaagtttgagcagcaggacgcaagtgagggttgtgatgcccatcctcaaaacaacgcacaaacaaatcccgtaaaccgggagcgagcatttcccaagcaggtgctatgggggtaggtaaatagggaacttgttgcctttgactataagtaaaatgaccagcaacgattcggacttcgtaagttggtggatcaaactgaccttgaaaaatcccggaaaatgggtgagtaccttccattaataattgaaatatcagcacccctaacccaaataaatcatggtaaatttcccgatcatagtcagcaaaagttttattctgtagttctggtggagtatactctggtttaccaactggacaacgataaacaatgttttgctgtggatcacgaacttgaaatgaatctgtatctaccaaagtcactaaggcagtatcactaactaaaatatttgactcattaacatcaccaatacaatactggctcgcgtgtaaagctgcaaaagctgcggccaaattacgagcagtcctaagtaaatactgataattaaataaaggacaatttaggcgacgggttcccggatgataaaggtccatgatcggacgcatcccccgaatccggggcattaaaaagccgacgatactaccgctaccatccgcagcttgtaacaactcctgaggccaagcaatggaaatatgccccaaattagctgttgggttttctggggggttggcaatcatggtctgaagtttgtgagcatgggtcagaattggcttgtgatatattttggccactaaattttcatctgatggcacggcatagacacaggcttcacccccacgtcccaaattgaccgtgagattgagaatttcttgctgcccaagagaacgaagtacctgcatagtgaaatgactgttaacagtggttattgaaagggaatggggattgaagtacagacgacctgatcggtcgtcaatacgaaattaagaatttaaaaaacgctgaatctgaaactgacagtctggactatcaaccctacccaataaacattgtttatgaattgcttagtgctgctatgataagagtcaaatcatcatctgtgcgattagtaattctttcagagcataaaaatttgactagttgctctttggcaacgaccttatcttcagcattggctacaaagtcgaataaaggaaaaaagaatggtttgtggggttcaccaacaagcatattcaaagccagcatttgtagtccatcagtgagaacgccgatattaactatgtgctgacgcaaaatttttatctgggttgtagttaaggcatcaggtgaagtcaaaaatgtggtttcgttaatgtattcacccctattagggattgtcagcgcctgtaagttacctgtactatccttggctacagctaaaccatcaccgatttgggctactgctacaacttttggtgtggcgatcgcaataattaaggtagttgctaaatccgatgactgatgtttgcaggccactgcctcatcttctactgcttttttagcagctaacatggcatcagttaacaaattacgcaaaatagtatcctcagtaaaggtgttgtgagtaatttcgcaatttgaaatatgttctattgctgtttctacagcaatcatcgctcccacttttcccaaagttgctgaaccagccccatctgctgctgctgtcactaagacattatttggcaatatctgccaatggtgagcatcctgacataactgctggtttttaatgtggctagttccacataccgaagcggctactatccgccattgaggaatctgttttggtgtgttcataaattttttctcacagctatagcaggtgataggtgacaggtgacaggtgacaggtgacaggtgacagagtggaaagtctgcttgtatattagttttgtcaatggcttacgccatgctgggctatcagttcgtgaactaccacctgagttgttgctataactgctaactgataactgataactgttaaacagacccccaaccgattggtggtagtgctacttgttcgtctaacttggaatgggaaaccgctgacatacttgctgaaagccaaacaaacatttcaataaagtttaaccctttaagtttcagtggagtacgtacagctatttgacttaaacggttcatgttagcattttctactcctaccgtaaaaaaggcaacacgtttattcgcctcatctccttgtagcctctgtactgcttgttctataacatcatctagctcaccttgtggctcaccatctgtaatcataaatacccaaggacggtagtaagcaatgccattggcacgatactgagatttgcgttcttgaattatttctaacgatttattaattcccgcccccattgtcgttagtccttgggctgttagaataggtgggttgaattggtctgctgttacaaagtcttgcacaatattgacatgactatcaaaagtaacaattgctacttctacccttctagctgccaatgaattttttagtagctcatccttaaaactcagtaggccttgatttaaagcctcaatcctttctccttgcatggagccagatgtgtctagcaatagcacgcacggacaacgtggttctgggttttctgcaaattctacaacttcatctagttttaatgtatccagcataaccttttgtgttatgttatagtccaaagcgttactttcccttgctcaaagtatcatagtctcccagactagtacaactacaagtatggtattttgcggtagatggataaaaattcatccatgcaaattattccgatcaaattatctatttcaggaaacttgaatcaccatatactttagttaaagctaattaatcagggggagaaacattatttttgggtagataacctatctatcatttatatccaaatcattaagaatataatattcaatatatacatttctaagaaataaaaatttaaagattttatgtggaaaatttgctaattattaaccaatcaggaaacacagttaataccgcaatgggaaaatatgtaccctgtaataatgagaacagaaagttttactcttctggaaaatagtaaaatctttgacagtctagtattattatgtaattcacggaggattaattgatatagctggaggtagatttatgatatttcatcatcaattagttggttgatagagagatatgaaaataagtgaagggagaaaaacctttacctttgacccaaaccaacttactaattcccatttcttgaccgagcagtattgagacatatttcacctaatccagaaattcattattgctccagactcaatcaatagtaaagcaatttttctttaaaaactgtaaaaatatgaataatactggcacatttaccaaattatctcctaaacgtttattaagacagttaagcaattcttctgacactacttgtttacaagttttaaacaattcagtgctatggtcaatatacttagaccaaggcaaaattatctatgccactcattcagtagaaccctttgatagactggaacggcatatacgtcgtctaagtcagcaaattcccgtactgagtaatgaaattcgtgtacaattacgcatgacgtttgaacctgactggcaaactcagttaattgaacgtagtgatgatgaacaccaacaaccgccggaatatcaagctatttattggttggtgaatgaaaaacatttactctctcaccaagctgcgttactgattcaagagttagtaaaagaggtaatcgaatcatttttgttgattagagaaggcacgtttgaattaacagcagcaattaatagtctaccgaaaatttgcaaacttgatgttgatagtattatggaacactgcaaaaatcggttgcaaaatttgcagtctttcgctcctcaaatctcttctccttatcagcgtccatacctgttgattaacagtaaattttatgacaaacaattaccagaattacagcaaaatatcactacctggatgaagggttttagtctgcgtcatttggcagtaattatgaatctcgatgaggtggaactggctcgaactttatacccgcatatccttcagggttcgattattttgcatgaaccggatcctccatttgataaactgcctaaaatcttggaagatttttcattcgctcctaaatacagcacactcagaattaatggaaaatcatttcagatagaagcatcaccatatattattgctgatactatttcacctgataatatttcagaagcaggatctttagttcaagtttctgctctaccaaaagaaaaacttggactatcaaccatacccaataacataccaaccgatggagaaaaggtaaacgctcgcactaccgctaaaaagccttacaaaattatttctgtagatgatagtcccacaattctcaaagaaatcagccgttgtttggaagatgaaaatgttgctgtagtaaccattaatgatcccattaaagcagtgatgtctattattagacataaacctgatttgattttattggatctgaatatggcgggaattgacggttatgagttatgccgcattattcgcaataattccatgtttaaggaaattcccattatttttgtgactggtagtaagggaattattgataaggtgaaagcaagaatggtaggagcttctggttatttaactaaaccttttactcgtgcggaattgttaaagatgatttttatgcacctggcataattaatttttgcaattgtgtattgattttacgacttacgcaaaaggtcacgaaagtaggggtaattcatgaattacccctacgtaaaatagggttttctcacaaaggactaagatccccgactttttagagaagtttgggatcttctggtttttaatgatttttaatgatttttaatgatttttaatgatttgaatactccgtttttgatattatagcagttgaattgcggattagtatagaaattaattttacaaaagaggataaagaaatgccagaaacaccagatttttcgacaggatggataattgacgcaactgatgatagagattattttttagaaactgttatcagcaaattaccaccacaggaaatagaaacagaaggaaaaaatattaaacttgaacgagctttatttgctcaagatgatgattcacctatattaagaagggcattgcgtttagtgccggaggaagaatggagggcaaaaagatacagatataatcaaccacattatttatttttacctttagctaaaaagaagaaatataaaaaatatcgtgcatctttggagagtaaagatttatttttacctgaatctgttgatttaagaaggtggttttctccaattaaaaatcaaggcaatgtacaatcctgtacagcctgtgcaggagtggctttgatggagtattttcaaaaccgcatgaatggaagtgtgaataataattctgatgctaaagataaaaatgattctgctgaaccaaaacaggaaaatctttcttggatgtttctttataaagcaaccaaagaagtgatgcgattaacaaaaaataatgaagacccaaaggaagataaaggagctacaattagagatacgttgaaagcaatgagattgtttggtgtagcacctgaaaaatgctggaattcttctatgaagaatctgaatgatgaaccttcagcattttgttatgcttatgctcaaaattatcaagcgacgcattattttagattagataaatctgaactttcaaaagaagaaattgtagtgcaaattaggattgcattatcttctggtttaccagcaatctttggttttcgtcatgctgagattctgaaaaataatattaccaatcttgttaaacgaaaattggagaataccaagatattagggcaaattgatgtagtgaaaagcaataattcggaaactaaagaaggtcatgctctggtagcagttggctatgatgataatatggaatttgaaaatcctgaacatcctgaacatcctgaacaaccgttaaaaggtgcttttttggtgagaaattcttggggaatagataactggggagataaaggttatgcttggcttccctattattatattgaacaaggtttagctactgattggtggtctttattaaatgctgagtggattgattttcgtggttttgggttggaagttgatataagtggaagtggtttattaaaggagcgacaatgttgtaactgttgtggtttaggtttaagactttgcggatgtaagggtgtcatacgttgttgttagtcgaatctgtcacaacaataattattaaaggttattttgacaaatactgtaagtagtctgaacatcttgattattcggatgactaacaaaataatctttactgaaataacaagcatatttcaataagtcttttaacgttgggttatgctgatttattttatttttttcccacagccaaattctaatagtttcatcttgactagaagaaactattatagatggattatttggaacaaaattgatacctttgatttcttctgtatgaccaagaagttgttcatccggttctttcaggggttgattattttcaagttgtgacaaactccagattttaataccttcatctttatctctatgggaagaagcgagaaaatttacaccatccttattcttagtcagagctaatccataaatactatctccagtatttatttcaccttttaatatataattatttgtgcttgaagtatcccatatttttatattgccatcattactagcagatgctagtaacttgccatcagaactaaattgaattccagttattaaatttctatgtttatttactaataattgtggttgttgattgtctttccaattccatatatataccccaccatcttcatatccataagcaagaatatctgatttaggatgaaaatctaaacgataaatatgatatgcactctgatattcagtaaagtccaaagctctaatttctcctattttagattgagagcctgttttttcccggtcccataatctaatgattccatctgaactagcaaaagcaataattttatcatttgagtgaaaactggcatcaaacaccatcgcgggagtttgttgctcaagtatttgttgatatagtcatttaacttaagaatgagacattaagatacacaataatcacggatgatttcatctaagggtgtatttgaaggagcatacattctggctctctttaaggcactaaaatcatgctcaatatc

SEQ ID NO: 4 - DNA, 114970 bp, Sphaerospermopsis sp. LEGE 00249
  LEGE00249_13
tagtgcaagggttttgaagggtataccggaaaaagtgtgcatttttggggatttcaagagatggcaaagaaattttcaaatctcctcctgactcctgactcctgactcctgactcctatgccctcacggaaagactttctcagcaacccctaattatatttttattggcgcatttacctaaattaaaatttgtaaaaactcaatgaattaataacgagtaataaattttgctaatttatgaataacaccaagaaaaaattgccagcaaaaaaattcctaatcctgaaatatcgccatatttgcgccactgacaggcaaaatgcccgtattacacctcatgctacagagcaaaactgaaaactcttgggtgattgttgtttaaaaccatgaagttaagcctgagaatgagttaagatcaaatacattaagggttaaaagtacagccgagtccccagacttcctagaaatgccaatgactacaagtaggcaactaaaacaaccgcaattaacgctggttttgcagtacagtttattacaggatggtaatcaggaaacaccaccaagtattcaccaggtgaggaaaaatccagaaatgtttaacttctatgaagtagacatgatctagcattgccctaaaaaagattaagctcaactgaagcagtaaccattggtttataacccaaaacttccttatattgactaccaccaccgagtccttgtgagattgggttgttgcaatagttcaccaagcttgaaattgaactctttagggtatctcttaccgggttaagacccaaattttcacaagtttaactacgttgtttaaaaaggcagaagtagtacatgctacaccgcaagatttatcaactgtgttgcgacgggcgggaggtatgtgtttttttgcgggatcagcaacgctggatagagcgggcccgcattatagatatagagggtgatctagtgactctacgctatgaaacagacgaagaagacgaagtttgttcttgggaagagatggttcgcctagaaagcattggctcggtaacgcaaaaattagcttccgtaccacggggtaatgtagaacctctcatgactgaagactgtcctgagtcggaacgtatccgtaaccgttttactgacttgaatcccgactaataactctttgtctacccaaaaattaccatttagggactagggaaagaaaattttagattttagattttagattttggattgcaagtaattcaaacacaatccaaaatccaaaatccagccatcctgactcctattcaggattctagatcagataaacgttcaaaggcaggacaataaccttccagggtaactttaaagttatacaatggggctgcaggattccaacaccgttgccccctctggtatttgcacgtaccacaacactctaaatctgaccaggtataggggtgcttactacgggctgcatctaagctattttgattcagcagttctcgttgagacaaacctcttaataccagttcttccccttgccaacgggcttctattaaaccagtatccgcaaattgctgccaacgcgaatcctctgtaattgcttctggtagggtgattgtaatcactgtttctaattccgttaactccccttcataattagtttctggggcggaaggctgtaaaaatgtttcaccaatgggcaattctaccacaattcccgctgctggggaatgaagatgataacgattttgtaactcgtctaaactggttaggtcagctaaataagcaggagaaccgtggataaaaaccacgtgctggggtcgtaaattatgaattaattgggttgttcctggtccatcactgtgttgagctaaaagatagctttctatggtggttgctgcgggatattctgaattaactttgatatctattttttctggtaggagaatgagccaaggtcctgtgttgagttgacaatatttacttaaatccgctgtggagtcagtgaggacaatacagggtgaactgcctaaagtagtcaaatcttccacttttaaacgccgcacacggggacgtactctttcatcccaaaataaaggctgatgacgggcaaaattttggactgaggcgggaagatggggtaaaagttctaaataagcatcacaaccagcagctacattaccatcaacccaaatatctaaatctcgtccagtaaaatggtgatgagagcgtaacaacatcaacaattcttgacctaagcctaaagccggtgtgggtaaaataatagaacagtgatcagctatggcgcggttaattctttccgctagttgattttcttggttgcgacggtggggatgacgagatgttccataactgccttcaattaagagaacatctaaatgtaaacctcttaactcttctaagcgcaacccatctactaggcgagaattggagaggaaaaaatctcctgtgtaaagtaatttatagtcacggcgcggggtatggtaggtgaggagaataaccacagcaccgggaagatgacctgcgggaaataattcgactactagattttcttgtatttctataggcgatcgcaaaggtaacgcctgacaaaaggaaggaatttcttccggtgcttgttccggccaatttaacggtaataacttgctagtcacctcactagcataaataggcataagaggaaaagcttgattaagtgccagcaaacctctagcatgatctgggtgagcatgactaaccaacactaaatctgctggcaatgatgaactacccttctgtgcagatttagttatgtccctagtcagatatgaaatatcccccaaaccgcaatctaataaaatgcggtggggacccatgcgtactaatagacaaacaccttcatcttcatgctgaacactatagggcagacattctaattcattagctgcatccccaggatcaggacgagacgatactgatagatcatccctcatacgctctaactctggttaatgtgcaaattaatgtgcagaaccgttgccatgatagttatcggaatcataaaagccattttttgtaccgaaaaataagcacgcaaaggtaaagataacagtgaatcctactaaaatcagcttaacatccatcggtttaccctcgttgattcaactcatttttatagtaatagtgtgattatctatttgggcagaatcgctagaaaatctttactttaattggtaattggtaattggtaattggtaattggtaattggtaattgctggttaggaaaactcttacccagtcaccagtcaccagtcaccagtccccagtcaccagtcaccagtcaccagtcaccttaaaatacaacttcctgacctcgttctgtaaagcggacatctttgatgttccattgggggttactggtgagggttttacggagactaccaaacaatgcaaactgctcacaactagaaagagaaactatttgccgctttgaatcaggagcaattcgtatatcaattgttgcaactccattatcaacgttaacacgatatccgactaggctaaaatcggctgtatctcgctcttctaagattttacctacagcttcgttgactggttcatctgctgacactgaagtttgtttggaaatataatcttgacattgagcatcacttgtgtatagggtgacttgagtagttttaccagaaacagcttgagaagttgcatcgggagagggttgattggaaaatggttgagatgttggagaattttggggagttggggaaactgtgttgtttggtgttggtgttgaagttgtattatcagaaatatcgctagaagtacaactgctaatactggcgcaaactgctaataaaattacgggtaaaataggttttatcttagtgttataaatgttcatattcagagattgtgcaagttctcagatagatacattaactctaaaaccaaatctggggctattagcagaaatttttatttttattaattatggagaaatcaatataaatggtgcaaccgcgcaaacaatttgctcaacattggttaaaaagtgaaaaagcccttaacgctattgttaaagcagctaattgtcaagaagatgataggattttggaaattggtccgggtacaggaattttaactaagcgtttattacctttagttcattctttggttgctgttgagattgacagagatttgtgtaaattactggtaaaacaactaggtgaaagagaaaattttttactgctgcaaggtgattttctcactcttgatgtagcttctcaattaacagcttttcctaagtttcaacagcaaaataaagttgttgctaatattccctataatattacaggtccaattattgaaaagttactgggtactattgctaaccccaatcctcaaccctatgattctattgtgttactaattcagaaagaagtagcagaaagattatatgctaaaccaggatcaagaacttttggagcgttgtcggtgcgggtacagtatttggcagattgtgagttaatttgtacagttcccgctggtgcattttacccaccaccaaaagttgattctgctgtggtgcgcttagtcccccgacagagagaaattaccgctaatgaccccaaaaagctagaaaatctggttaaattagggtttggggcgaagcgaaaaatgttaagaaataacttgcaatcggtaattgagcgcgatcgcttgacgcaattactggaacaattaaatattaatccccaatctcgcgccgaagacctcagtgttacacaatgggtatcactggtaaatatggtgactagggactggtgactggtgactggggactggggaaaaaaattttagattttagattttagattttagattggagttaacaaaaacaatccaaaatccaaaatccaaaatccaaaataaataactcctgactcctgactcctgactcctgactcctgactcctgactcctgactcctgactcctgactcctgataacttatatgcgttcttatagcttaattgcacctgcgaaaataaacttgtatttagaaatcatcggcaaccgccctgatgaatatcatgagttagcaatgatactgcaaagcatagaccttgcagatcaaatagatttacacgctgccagcacagaagcgattcgcgtttattgtcatcatccccaagtacctacagataacagtaatttagcatacagagccgctgcactaatggccaagcaatttcctgatgcttttagtaattttggtgggattgatattactgtgaaaaaaaacattcctgttgctgcgggtttagctggaggttcgacaaatgcagcagcggtattagtgggtatagatttgatgtggaatttgggattaactcaatcagaattagaagaattaggcgcacaactcggttcagatgtgccattttgtattgcgggaggaacagtaatagctacaggtagaggtgaaaaactttctcctttacctagtttagatcacatatatatagtattagctaaatatcgcagtttggaagtttctacagcttgggcttataaaacctatcggcaagtatttggtagtacctatatgacaaatactgaagatttagcggctcgtgctagtgcagtgcattcggcagaaattgtcaaagctatcgtcaataaagatgcagtagaaatcgccaagaaaatgcacaatgatttagaaaaagtggtattaccttcttattctcaagtattacaattgcgggaattatttgctagtcaagaaggggttttaggcacaatgatgtcaggttctggaccttctgtatttgctattgtggaatcaaaagcacaagcagaaatagttaagcagaaaattagagaagcaattcctgatgaggatttagaattgtttgtaactcagacaattagcaatgggattcagatattaaagtgataggagtcaggaggcaggaggtaggagtcaggagtcgtaggggcgaagcattcgggcgaaaaattatcaattttatgaaaaggctattttccgaatgcttcgcccgtacaggagtcagaaggtaggggaagctaataacccaattaccaattaccaattaccaattaccaaatgatgaacaaacccaaagttaaagaaaaagaaaaagagactcccgaacaagttccaccaacgccattaaggtgtataactggggcggtaatgtcaggaggatttgcatttgcaatgtattctttaatgattgcgatcgctaccacttttgctaataaacctattcattctgataaccaaatagtcctcaatatcgcctccgctgttcgtaccttagtggtgggtgtggtggctttgggaacgggaatatttggtatagtagccttgggtttgttagcgttggcaatacaattattaatccaacagtttacaacctctaaaaattgataattgataattgataattgacaattgttttattcaggtttgaaaactgatcttttcccaggacaagaaagaaaaaaatttctatcttctaatcctctcacttccaggtttggtaattgtccattgtcaattgtcaattgtccattattctgatattaacaagaaacaaggtttgttaattgagaacgagatttgataaattgcaatttggcagatgcggaaacctgaagtaattgattttgttttctccaaagagtcggcgacaatttgtgatggtgactaaactggcgagaaaaatgacaagaattttgatagcctattttggtagcaatttcttcaattgtcagattcgtactttttagtaaggaacacgcttcggccatacgacgtttaactatccaagtattaacactttttcccgtttgtttggatacttggttagttaaataagctggagaataaccaacagcttcggcgacatcagataaagtaataccttggtgataatgagcctcaatatagtcaaaaactttttgcaggtgggagatattagggaagattaactctgaatttcctaatgtagctggaagttctgaaacttttggcgaaacttgatgagagttctgactataccaggatctgagcaaagattgtttttctaatcgaatagaaattgcttttagcaactcatcgacagtagcaggtttacttaaataatcatctgctcccaactccattcctgttctcatagaagccttagaattacttgctgtgagaaaaataaaaggaataattgctgtgagaggattttgacgtagcttagttaaaacactgtaaccatccataactggcatgagcagatcacaaattaccaaatcaggtaaattttcttctgcttgccgaataccaacttgaccattttctgctcctatcgtaacaaaaccttcagcttcaagactgtctaagaagagatggcgggtaatagcatcatcttcaattacaagaattgttttcgacgattcgcgtatcattgtgaaaccaataaaagttctaacagggaatgattaatagcaattgataattgataattgatacttgataattgatacttgataattcatcctgcaaaagactctttcccttttttctatgaactgggaaatataggaactaatggtagaactaaagtaaatgtagtaccgacacccactttactaaccattgtgatttgacctccatataaatcaactagatttttgacaattgataagcctagtcctgttcccgaagtattatcaacattgctacctcgataaaacggttcaaaaagtctttcttggtctatttcgggaataccaatacctttatctttaacctgaaactgtattttttcctggtgacaggaaacaattaagtccaccacactattagggtgagaatatttaattgcattgtctagcaagttattcaaaattggtttcagtattttttggtcaatccatacgtctaaacagttgccttgactctgaaaatcaatatatttattactattaatgattaccatttttgtaattaaatcttgacaaaaattcacaatattaaccttttgctgctcaactataatttgcgctgattctgctttagataataataaaatatcatctaatacctgattgatttgttcagatgctgtttgaatgtgttcaataaatattaatttcttgtctgtttcccatttatctatatgtcgcttgagtaagctattggaaaatgaaataacatttagtggtgtccgaaattcatggcagagtatacccacaagattagctcgaattttactgatttcttgtgcttgttctaaagcctgatgcaattccaattgtgcagatttataatctgtgatatcagtagctgtaatgacttcaacttcttgaccatcaaaatctatccctccatcaaagcgagtcatggcaacatctaaccatcgttctttaccatctttggtaataatatttatctcctgatattcaaattcccagttagttgtttctggaggtttagatgttcgacttttgataagttggttaaactcaaagtctgctaatagttccttttttgtataacccgtgagtaattccgcagcagaattgacatagtaaatttttgtaccttgaattaggaaaataccagcctttgttgcttctagtaaggtacaaaatctagactctctgagttgcagtaagttatcaatatgttgatgttgaattttatcaccttcctgtttattactttcctgttgtaatttctttttactttctctaccttcattaatccatttttggacacttaattctactaagttattattttcccgaataaacccgcagcaaaactcgttaccttgatactttatacaagtaagatttagttcagctaaaaatattcgtccttcctttgagcgatagcgacatttaaaggagaggtgatctaaatttttcatattttgccattgttctgaccagttatgtaataaaaaatctatattcaaatcactcagattcatggatagtaattcttcccgggagtatcctgtgagcgtgcaggtggcattgttgacataaataaactgcgcgttttctcctaaacaaaaagcagcatctatagtttgattaatgagaaaatctacaattttaaacttcaagcttggctgtaaactccattttgagttgacttttgctaacccggaatccccagaatacatatcaagatttactcctaagtcttagttcataagtaggtgagcgttaaaaattttcgttatgacaggcaagaggcaaaaggaaacaggattttggttaatttactttgatgatgctatgaatttgtcagtccgattgaatttaggtttaatcttaacaataaagaaatcattatttcaattttgttgcatatataagtgtttgttattcctaaattaagtattttttggtaaaaataaaataccatactttcaattgtgaactttaaaagaatcccaggtaagatttttagtgaactcccccacaaaatttgttaaaaatttgtaaaaatttgagagtctactggtaaggctacattcttggaactataaaaaacttttatatcaaatgtaatagatatgtagtttacctagattatcgaaaaatcggctggaaaaccggacttcgtgcaaagtttttgcagccgcttataaatccccatgacagaaacagcctcttctgtctgcgttaagtttcagaaatttgctcaattgggaacattatctaagaatgtaataaatttaccatggaaaggatctaactatatctcaatacgcccagtcatcctccctatggaagagatttctgtaaaaaaacctgtaagcaacgaaacctcttaccaaagatatataaattgtaaagcaagaatgtgttgaggtacacaaaatataaaatactgattccatcttgatactacccacggctaaaagccgggggattcttgaatagtccacaaacgaaccgtcaaaaattatccttagaaatacaagctatcagagtgaaggatcatcaaaaaaaatgcaagagcgaaaaaatagacaaatcgatcaaaaaatagttcatttatccggtgtgaaactttgagtaggcttaatgaaagaggtaacttctgcaagaggttgaatctgtattggtggttttagctatatatctcttaaccaaacagctgctctagctggttcagtctacccccaaccccaatcaaaacagagaaaacccttgatatatgtttataaatttttcatcagcaggtgtttgtctcagcatgatctactactactacttccactgtgctgagatttttgaaatatgaggaaaagctgccaagctattgattgaatttcattcacaaataggagtgcataccatgagtcaaaacgttgctgattataatagacaaattaataggaaaattaatactgaacaagtagaacaaatagttaaggcaattatagctggcaagtattcctgggcttgtgttttgctattgcgtttttctggacacaaccctattgaccatataccctaccgtacttatatcagattgctcaaaaataattgcctacttggtggctctagacaagagcaaactgctactaaaaaagaggtagaaatgtttaacctcaaatccagttggattcatttataatcaagccagaaaatgaagctgggtgtgggtttactagaagtattttcaggcattatatatgtttggtaaacccacaaatttacacattaattggcacattaaattgataagcattttgaatctcatatccaagaaaattagattaaaaaatgttttgttatcccagccatattgttcataacttactgtaagaaaaacgaaggtgggaatttcttaactgttaactaataattattaattcattctcatcatgatttacccaatttccatgtctaatagttctctgcaacccatactcagagagattgtatggcagaaaaagctagaagttgcacaaatgcaacaagaaatgtctctcgcgtctttgcaacgtcaattaactgcggctcccactgtcagagatttttttactgctttacaacaaagtatttataaacctagtttgatcgcagaggttaaaaaaacattccctaatcaagatgtcactacacaagattttgatcctttgtctatagctaaatcctatgaacgcggtggagcaacttgtatatctgttgtgactgatcaaaagttttttcatggtggttttgatcatctgcggattattcgacatcgcataacattacctttgttatgcaaagattttattcttgatccttgtcaaatttatttagcacgtgcagcaggtgcggatgcaattttattaattgctgctattcttactgatcagcagattaataactttttgcgggtgattcactatttgggaatgaatgctgtagttgaagttcacaatttgagtgaattagatcgggtgatcaagttagaagatgtccgtattatcagcattaacaaccgcagtttagaagattttagtgttaatcttggcactactcagcaattaatggcagctaggagaacacatttacaaaacttaggtattttggttgtcagtgaatcgggaattgaaacacctgctgatttatccctaatgtcagatgcaggtgtgaatgcagttttgatgggagattctttactcaaacaagaagatttagaaactgctgtcagtagtttatttaaatccaaaattccaatctataaagacttagtgaaaaaaggagtttaataggtgacaggtgacagtgaagaaagcaggggaagcaggggaagcaggggagaatattaacttttacctcctgccttctgcctcctgccttcgttaaaacatctatactttcactacttttaaagtttgcaaagttgaatcaacacaaccgctaataaatccccctaaagactgaattttttggagatattctatagctggttttgtgattagttccccaggcattaatacaggtattcctgggggatagggacatatattttctgcacaaattctatttactgttttctctaaaggtaggatttcactatcagcaaaaaaagcttcacggggcgaaatgcacataatatgatctattatggcaccgtttctatatttacatattttgtactgacttgtcaattgtggtatctgagttaatttttttaaccctgttactaattcaccaatatctgatttattgttacctaagctaataataaaagtgagatttcgtaaggatgaaaattcagatgttacacccatttcattaagcatatcttcagcatcaaaacccgttaaacctaagttggcaatattcacagtcaaccgggttttatccaaatcaaaaaagccatttttattaatttgggggatctctaaaactgataaactgggaatttgactaatttcaattcttgcaatttccgctaactgcaaagtttgagacatcaaaatttccccattaactgccatttggtgacgtgcagcatcaagagaagctaaaagaataaaactcggacttgtagattgaactaattgtaatgctttatttaatctattaatattaattctatttccttgacaatgtaacattgatgcttgagtcattgcacctaatgttttatgaatagattgtatggttaaatctgcacctgcggttaaagctgagataggtaaatggggatgaaaatgaaaatgtgcgccatgtgcttcatcaacaattaaaggaatattatattgatgggtaatttgggcaatactttttaaatctccacacacaccgtaataagttgggtaaaccattagcacagctttagcatcaggatgtttggctaaagttgctgttaaattttctggtgtaatgctgtgtgtaatatctaaattttcatcatattcaggattgataaaaataggaattgcaccagaaagaattgaaccagcaattacagaagaatgcacatttctgggcataattatcttatcattcatcctgcaagtagcgataattgcggcttcaattccgctggtagaaccattaactaaaaaccaagttttttccgcaccaaaagcctctgcggctaattcttgtgcggctaaaattgcgctttcaggagtgaataagttatctaattctgccagttccgttaaatcagcgcgaaagacatctttaccgattaaatcggttaaaattggggaaattcctgcaccgcgtttgtgtccaggggtgtaaaatggtgcatggggacgagagatggaagttttgagagcatcaatgaggggggtttgattttggttgagcatttttgggcaaaatgaagcgtttagagcttcaggtaaaagggtaacttgtaaggtaacttggataacgatcgcatctaactcaataaatatgatcactttaaatatgatcactttttcaattaactaagcttccccacccctgctaaatccaaaatcggcgcgatcgccttcttcgggggcaacgatcgcacttaacctgataaatgcgattgcgttaaaattcaattacaccctgatatttctgattttaaatatgataaattctttccagcgatcattactgtctgtggttcatagtgatcccgacattttaggaggaatccctgtttttgtgggaactcgtgtgccaatgagaaccctacttgattatcttgaagctggtgattcattagaggtatttctagatcatttccctagtgttagtcgggaacaggcgatcgcaacccttgaattagcaaaggaaatgctgacagcttatgcgaatcctgcttgatgaatgtgtactaagacctctaaagcgtgaattttctgattacaaaatacagacagttgatgagtcaggaaggattcacaattttgcttactactgatcaaaatttgcgttatcaacaaaatttacagcaagctggtgtggcagtcctcgttctcatagcactgagtaacaagctcggtgacttacttcctctgataccagagactcgtaaggtgttttgatcagcgatcgcacctaatttaataaatgcaatcgctatttattctaactaactttctccacccccgctaaatccaaaattggcgcgatcgcctcttcttttttcactgccataatatgcactccctgacacaaacgccgtgccatctgcacttgttcggctgcaattttcatcccttcctgtaatggatgtttggcttttgctaacctctcaataatatgggcaggaatattcacaccagggaccatcctattaataaactgggcatttttcgcagattttaaaagaaaaattcctgctaaaattggtttattgtaacgagatgcaatttgatccatgaatttttctaatttttcaaaatcagtaattaattgactttgaaaaaattgcgcccccgcttctattttcttttcaaaccgactttgtaaacctgaccaacttttagactgtggatcaactgctgcacctgcaaacaaatctaatgcgccatcatttagggttttatgattaaaatcaaccccctgattcatgtttctaattaactgcaataatctgatagattctaaatcaaaaacagctttagcatcgggatgatcacctgcttttacagggtcgccggttaaggctaaaatattccgaatacccaaagcatgagcgcccattaaatctgcttgtaatccgattctattgcgatcgcggcaagcaaattgacaaattggctcaattccatgttgcaataaaattactgaagctgctaaaggtgacattcctaacacagcgcggctaccatcggtaatattgacagcatgaactctccccttaagagtcgccgccatttcaatggtatgggtaatatctccccctttgggaggtgcgacttccgcagtcactaaaaattctcctgcttgtactgctttgcggaacttgtttaatgtactggtgctatgactatcctgcataatgcaaatttaattttgagttttcaggttttcttcaagagtaaaacaaattacctttctagcttaaacagatccccgacttcttggagaaatcggggactttatatcctctcaaaattacaaccgcgctgtatatcctaacgcagctttcacatctgctaaagtttgattagctatagcttccgctttttctctaccatcctttaacactgattctaaataacctttttctgccattacctctttatatttgtcctgaattggttttaaagcatttatcgctgtttctgtcagtaaaggtttaaactgtccccaacccatatccgcacattcagccgctactgcttccttagtcttcccagacagcagcatatacaaagttaacaggttattacattccggtctttctggatcatcaaaggttaaaccgcgtactggatcagttttacaacgtttgattttatttgtaatttgatctggtggatctaaaacattgattctgcttaactccgaaggatcagattttgacattttctttgtcccatcggttaaactcattacccttgcgccttcttttctaatcaaaggatctggtaattttaatacaggtttatccttagcaaattgatgattaaacctgttaacaatatcccgcgctagttctaaatgttgcttttgatcctcacccacaggaactttatccgcttgataaagtaaaatatccgcagccattaaaacgggataagtcaacaaacccgcaccaacgttttcaccttgtttaagtgccttttccttaaattgaatcatatcttgcaaccaatttaagggagtgatgcagtttaacaaccaacaaagctcactgtgggcagaaacgtgagattggacaaaaatgttagaatgttgtaaatcaatgccacaagctaaatataaagcagcgatggtgtaagtatcagccgctaaggtggcggggttatgtggtactgtgatggcgtgtaaatctaccacacaaaagaaattttcatactggtcttgaatttctacccagttacgaatagcacccaggtaattacccaagtgtaagttaccagttggttgaactcccgacaaaacgcgctgcttacccataattatttcttagttatctcctcttccccgctttgttaggtggcggttacatgatttattttagtagtcattggggattagttaataaaagttccacatctacatcaaaaaaatcagctaaagcctgagcttgatttttattgattggtaattgattatcaataatttcatacactatattaggtgatccaaccactgcaaataaatcttcttgggtcacattttgcgcttccattaagtgcagtaacatagaatgtggtgttccttgaggtatgggataattttcttcttcaaatttggaaattaatgttaccaataattccaatagtgctttttcctctggagtgagatgggaacggtgttctaaatcctctacaatagcgatcgctttctcattttcttcttcagttgtgatcacctttggttgatattgagcaagtaaagctgcgtaggactctgggttaaaagtaaggatcatttttccattttccttgatcgtattcagcatgagttaaaatatactttatataaattctttgactagcatagacaatatcaactattaaacgatagttatttcctttaatgttaaaaaccgtgaattttcctactgattcagcacttttataaaatgattggacttcaattaagttttgccattgagctttacttgctactctataccagtcataaattgcatcgcaggaatcagcatggtttaaacagaaatatcgcaaaattttccgactaataacattcactcctgtttaaatccccattttttttcgatagctgagataattataataccttgtccatattttgtctatatataaattaaaaaatctgtacctccagatggataaaagctaactcatccagcttttatagttcaagactaaatgggtatttagacataaagcaaatctgggggatatgcttgatgaaagctttattaatatggccgatcatgcctaattctttttggtcttatcaggaaactcttgatttggctaatttacgtgctacaaatccccccttgggtttaatcactgtagcagcaatgctaccaaatgactgggaaatgagattagtagatcgcaatgttcgtttagaaactgatgcagattggcaatggtgtgatattgtcattatctcagcaatgattattcaaaaacaagattttggtgaattaattaaaaaagctaaaacattaggtaaaaaagttgctgtcggtggaccatttgccacatctgtaccagaatttgccctagaagcgggagcagattatttaattttagatgagggggaaattactattcccatgtttttagcagctttagcaaagggagaagaaaagggtattttccacgctacagaaaaaccagatgttacccaaactcctataccaagatttgatttattagatttagatgcttatatagcaatgacggtacagttttctcgcggttgtccctttcaatgtgaattttgtgatattatcaccctttttggacgtaaaccccgcacgaaaacaccagaacaaattttggctgaattagaagtattatatcagatgggttggtggcgttatgtgtttattgttgatgataactttatcggtaataaacgtaatgccaaagtatttttaagggcattaattccctggatggaagaacgtaattatccctttgctttattaacagaagcttctttgaatttagccgaagatgatgagttattagaattgatggttaaagctggttttgtccaggtatttatggggatagaaacccctgatgtagaaagtttagcgggagtaaataaagagcaaaatactcggacttcattagttgaatcctgtcacaaaattaccaaggccggattacaaattatgtctggttttattttaggatttgatggtgaaaaaacgggtgctggtaaacggattcaagagtttgtggaagaaacgagtattccccaagcccatctcagtttattgcaagcattaccaaatacagcaatgtggactcgtctgcaaaaagaaggacgtttaatggatggtttaggtaaatattttacttctcagaaagctttgatgaattttgttcctacccgtccgatgtcggaaattgttaccgagtttattgatactttttggaatctttatgaaccattaccatatctaaaacggacttttcgccattttatgatgatggaaggttggcgggctaaatatcaacgtactttaacaaaagcagagtgggattttttaaaggctatttgttggagacagggaatattacgttctacaagatttcatttttggtggcaattaatagtcatggcatggcgtaaaccaaatttattatatgattatttaattgttttaggtgtgggtgaacatttctttaagttccgttatgaagtaaaagctgaactagcagcagaattagtattattacagcagcaagaattggagaataaagaaaccgcaagtttacaattagaagctgtgagttaagaaactgtaaattaattttaacaaagccgagtatttgagcctgagatatttcacaaataagatagaattgctatagtagcttatgataaacatagcaatagccttattaataaaaaatgtcccaggttttagaacaatcaattaaaattaatgctcctgctacgttggtagaacaatgtttaactgatttaactttaatgcaccgttggcttaaccctgttctccgttgcgaacctgtgggagaagtgtggagtacagaactaggtagtcgtagtcggtttatgattcaaattccggtgattaaacctactttaaatactgtggtgattgaaagacaaccgggtttgatagtttgggggtttaaagggttttttcaagggtgcgatcgctgggaatgtcaaccatttcctaaaggtacacttttaattaaccgctttgagtttaaaattcctaaccctgttgttagttggggttttaatacttttgccgcatcttggacaaaagcagatatggaagcacaactcaagagatttaaacgagttgcagaagaattagcacgctctcctaagtatgctaaataggaggcaggaggcagaaggcagaaggcagaaggcaggaggcaggagggaaatatttttacccagtcaccagtcaccagtccccagtccccagtcaccagtcaccagtcaccagtcacctgtttagcaaattctaacgcttcctgggctgtattaattttaccctcagcttgagcgatcgcaatttcactcaagattttacccacaagtggcgacgcaggaatatttagtgctaagattacctctttaccactcactaacggtgaggggtgagctaccaaatcatcagggttcaagtaacggttgattaaaggtacataaacgcacagcggattatcgccagacatcgcccctactacaagatcatctgctaaggctaagacagttgtagcactaaaaacaactcccacgtcctgaaacaaaaaatactgttctcgtaaggacatataactagcttttttgaattgcgggaacagtcgcagggacgtagttacaccccgaatttccgcacggctataggttaattcctgtaattcgatttctgctatttctgggttagggtgaagtaaacacgcgagtttagcaatagctaaccaagtggttttgatagtatcacggacaggtttttgtagttcttcccctaactgtggatatgtttctctgatcaagttgtatacctgatcaactgcggctaatttctccaagctttcacggttagcatttgtaaaaaaactagctaataaattatcttcccaagcactttttaaccaaggcgtaccttgataactatctaaaagataactaatttctacccttactctttcggatgcaactttattaatatctgcggctaaggtgcgaatagtggtttgggtagttggttctattgtaaatcccagttgtgcagcttgacgataggcacgcattaagcgcaaaggatcatcttgcagattttggggtgatatcatccgtaatagacaggcttctatgtctgcacaaccttgaagggggtcaataatttcctgggtgtggggattataggcgatcgcattgatggtaaaatcccttctttgtaaatcagttaataaactatccccttcctgttgggcaaaatcagcagtagcatgaggaaaaaccacacgggcaatatttctttcagcatccagtaacacaaaaccagcacgataatgtttggcgatcgcccttgcaactttcaccgcatcatctgggatcataaaatctaaatctaaatattctcgacttctacccaaaatcgcatcccgcaccgcaccacccaccatgtaagctggttgtggcaaccattccaagctaaaaggccaattttgggcatctagaatatcaacaattgaattattcatctactgatttaccaaaaattctgactcctgactcctgactcctgactcctgactcctcaattctcactattgtaataaaaatcaacccactaactaatgctgaatattttgtcctaagctacattaactatatagggtttgctgaaaaagtctcttcgttaaggcagggaatagggaatagggaataggcaagagtttgggtgatctgttagtaaccaattctttgaaatttcacccggaaaatgcacgcttttaggagtatactcctgaaaaatcctgcactgatttcctaatttttcacctgaaaccattgatttatcaaggttttgagtttattcagcaagccctatatataaaggttctaggagttggttctattatgtgtatttgcgtgaactgccactatgtagaccgttgtgtaacctacaacgcagtagaaacacaacaccaacaaccccacttaacagaaaatcccgattttgaccccaatgaaccctcgattaatgttaatattcgcacaaaagatgacattattgaaatggaatgggatgttgttggttgtctcagctttaagaaagaaataggtaaatggtctaaattacgtcctggtgaattagtacccacttgaattttagattttggattttggattttagattttgtttgatttcaatttgtagagatgttttctaaaatgtctctactttatatttgtgtaatttattgatgatttatggagtaacaaaccacagaggacacagagaaataatgtttttatttgatattatattataatttactttgtttatttattttcaatcaactaccttgaacaataatctagaaactctaccggaaaaaaaatacgctttagcactgcacagtactacaccggaattaggtttagtaattagcaattttgcagaggatacccgcgcccatgtttggaatttaggacgtgaggtatctagtcatattcatcaatatttaattgatttaattaaacctcaaacatggcaagatttacaatttattgctgtggctaagggtcccggaggttttacaggtactcgcatcggtgtggttactgctcgtactttgggacaacagttagaaattccggtttttgcagtttctactttagctgcatttgcttggtatgaaaaaagtaaaaatccagaaattcaaccaattttagctatagaaatgcccgcccaaagaggtcaagtttttggtgcaatttatcaaattaatgctgataattctggtattattgctttattagcagatactgtttttacaccagaaaaatggcaggaaactttaaataattggcaaacagaatatcaattaattcaagctacatctggtttagcagcaactgtcaccagtattttagaattagcttatttagattggcaacaaggtaaacgtcctcattggtctgaagctttgccctattatggtcaacatcctgtagatgtttaataatagaattaattaatggttgaattagtgggttaaacattatgacgctgactcaagatactatcaaacctgtgcaattaattccacctttggaaaatggtgatagacttactcgttctgagtttgaacgtcgttatcataccatgccagatgtgaaaaaagtagatttaattgaaggaattgtttatatggcatcacctgtaagaattagaagtcatggaaaacctcatgcttatatcataacttggttaggtttctatgagtcagctacaccaggtgtagaactcggtgataataccactgtgcgtctagatgcagataacgaacctcaaccagacgcactattaagaattgaaaatgggggacagtcgcggataagtgaagatgattatgtggaaggtgcgccagaattgattgtagaaattgcggctagtagtgcggctattgatgcccatgataaacttaaagtatatcggcgaaatcaggtaccagaatatttaatttggcgagtttatgacggtgagtttgattggtttattttaaaagatggagaatatcaacggttagaagctaatgctgatggggttttttgttctcaagtgtttcctggtttatggttagataaatctgctttgttagctgggaatttagcgaaagtattagaaattttacagcaaggtttagcaagtgtagaacatcaaatttttgtggaacacttaggataattatcaattgataattgacaattgataattgtttgatttttcacacttaacgaaaagtcttgaaaatgatgtagaaaaattcgtaattgataatcctaaatttacgaattacgaattacgaattacgaattactaattatctaggctgtaactttagctaatgccttttctactgtgtgtaatgcttgattgatgtctgtatctgtgacaattaaaggaggtacaaaccgcacgactttaggacctgctggtactaataataaaccttcatccatcgccgctttcacaacatcagccgcagttaaagaactatcttcttttatttccatcccattgattaaaccccaaccccgcacttcggaaatatgatgaggatatttacgggcaatcatttttaacccttcccgtaaatgtgcgccttgttcttggacgttctctaaaatattctctttttccaaagcttggcacacacttaaagctacaccacaagcaaaaggatttccaccaaatgtactagcgtgttctcctggttcaaaaatatcacagaatttcttactcatcattgcaccgatggggataccaccacctagtcctttggcactggtgaaaatatctggttctactcccagatgttcataaccccataatttaccactgcgtcccatccctacttgcacttcatcgaaaatcaataaaatgccggtttcatcacaaatttcccgtaatctttggaaatacttcttatctccaggacgaactccgccttctccctgtaagggttcaattaaaattgcaccgacgcgataatttccttcatccaactcagtaacagccgcttccacctctttaatatcgttatatttgacatagtggaaaccagggactaaaggatcaaagtttttttgatactttggttgtccggtagcggtgacagtggctaatgtccgtccgtgaaaactggcatgggcggttaaaataatggggtgggcaatttctaaaacggtgtgagcgtattttctcgctagtttaattgctgcttcgttggcttcagcgccagagttgcagaaaaacacccgatctgcacaggaatgatctacaatccatttggctaattccccttgttcgggaatatagtataaattagagacatgatgcagtttttgaatttggcgtgtgactgcctctaccatgacagggtgggcgtgtcccaaagtacaagtagctattccggccacaaaatcgagatattccctgccttgggtatcccaaacgcgacagccagcacctcgttctaaagctatgggaaagcgtccgtaggtagacatcaccacttgattaaaactgtctgcactaaaggcagtcatatttgagggatgtatcggctgttcaactaaactttggatactcactaccgcacctcctgaaatttttaattctataatctatttagcaggtttttctaaataattcaaaatttactatagtatgaggaagaagtttttttaacttttaatttttaagttttaatttttcagtcagcatttaactttttgctgatagcttaaggttgattggttacgataattaaccaatttatcaaaccttctgactcctgtaagggcgttcgcgaagcgtgctggaagcatcagtattcgggcgaacaatgagcaattttatgaaaaggctgttttccgaatgcttcgcccctacttcgcccctataacttctgactcctgaatttttacaattgtcattacctgtgtattctacccttgagcaaaaatataaacgtattcaacaagagttaatggctggggctgtagccctagtctttgtgttccttagtggcactttatggtattggttggtggagggctggtcatgggaagatgcggtttacatgacagtcattactttagctactgtaggatatagcgaaactaacccgctagagagtcggggacgtttgtttacaattgtcctgattttaatgggtgtaatcaatctcggttacattgtcaatagatttactcaagcagtaattgaaggttattttcaagagggtattcgactcagacaacaaaggcgtttaatggaatcattaactggacattatattatctgtggttttagtcggactggacgacaaatcgctaaggaatttcaggctgaaggtgtgtcttttgcagtgattgattctgattttgaatctgtgcaacaagctcagtcagaaggttatattgtctatcagggtgatgctaccctggatgatactttgttgaaggttggtattgaacgggcaatttgtattgtggcagcgttgccttctgatgcggaaaatttatatactgttttatcagcaaaaactctcaatcctcatattcgggcgatcgcacgggcaagtacagaagaagctgtacaaaaattacaaagaggtggggcagatgcggtgatttccccttatattactggaggtaaacgcatggctgcggctgcactcagaccacagattttagactttgtagatgggatgctttctggtgcagatcgtcaattatatatggaagaatttttattagatgcggcgttctgtccttttgtggggcaaactttacaaaaagcgaaattgcgatcgcaaactggcgcattagttttagctattcgtcgcagtgatggtaatctcattggtggaccaacgggagacactgttttaatgtcaggagatacgctaatttgtatgggtacggctgaacaactgcgaagtttaaatcaaattcttggtcctattaattctcagcaactaagaagaccaaaacaaatttaagatttgggttaagatttgggttaagatttgggttaagattgggattttcaatagttgtcactgcttaaataatatgggagcagaattaactaaacatcaacttccatccatccatgtaaaggagcgatcgctttcattaccgataccataatatctggtggtgctgccgaaagtaacacactgggataaacagcagcaccccattgaggatgcaccagtacacagcatttgtttttgatcacaggataatttagtaaagctttagcaactgctgtatcatcatggggaataggaccgggatgggaaagtaaaggataacctgtacggggatcaattaaatctgtgacataaccgcgatcgcgcaaattaaaagccacatcacaaccgaaccgcataaacttttcccgtaacctttctttttctgtttccgtttccgcagtaatttctaaaagtgggtattttgattgttgtaaaacaaccaccacccacaaaaactgttgctgtgtccaatctggtaatatctgttcacagttggcacagatatattgactggggttatgaatagaaatttgtacagcttgtcccgttttgccaactaaattaatgggatagcctggctcagaagtgcaaacactggaatagttcaccacatttaatctgtttttgcaagtttgtttgattattccttgcttatgataataactctgaaaacttctaaaaaatcatcaatatttgatgtcaggagtcaggagtcaggaagaaacagatttgaggttttatcaagcaactctaaattaattgagttttaaagcattgactggaacttcatcccaagaatttacagtacgtaactgtgcaacccaaccatctgctttttgcttatcagtcaaccctttttgaaaggactcatgacaatcttgagcttgactctgatcacaacaagcaatacaagcatgaatcattcctgatggatcaatttgctcatttacccaaatagtcatagctacctctttttaaatcttgtggtaaacttttggtaaaactgttatatcatgtccatctgaaaacttatcatatctatagtgatccaatttgattcctgaaattatttgtttaggcagacaagaggcagtcatgcaaaaggcaaaagggttttagagaatttcggtgtacggagttttgttcaataatcaaataggagtcctatattacggcaggtaatagggaataggataaacagaggagaaaaattaaaagcaaaattaaataacttctgcctcctgctgtgattcaaagtaaggcttgttggagtgtttccagtttgacaggtttagagataaaattattcatacccatagccaaacatttatgacgggtttctgaagaaatatcggcagtgaagccaataatagtgagttgttggcgatcgctgtataaagtccgaattctttgggttgtttccagtccatccataccaggcatttgtatatccattaatatcacatcaaaatgctgatgttgcaatatttcaattgcttcttctccactatctactgcttgagcttggtatcccaaacgtttcaacatcaataaggcaaatttgcggtttacggcattatcatctacaaccaagacttttgcagaattcaaggaacttggttgaggatttacatctttcaaagctggtgactcaaccttcttggcttgaatatcaaaccggaatttactaccaacacccaaggtactttctactgttaattgtccacccatgatttctacaaacttgcgactgatcggtagccctaaaccagttccagtttgcgatcgccttcctgcttccgattgtccaaaaacttcaaaaatagtttctatttcttccccagcaatacccacacctgtatcttctactgcaaaaagtaagtgataacctttatccaatgattccatattttccactactagggtaatacctccatgctcagtaaacttaatagcattacccaacaaattaatcagcacctgacgcaacttagcatcatctgtaataatgaaatctggcaaattttcccccagttccaactccaaagataatcctttagattctgcttgctgtcttagcatcttcatcaaagtagttaccaactggcgcaggtgacaggatttttcatttaagaaaactttccccgcttcaattttggacatttctaacacatcatcaatcagtgaaagtagatgttcgccactttgattgatggtgttaataaaatccctttgttctgcttgtagactggcatctttttctaatagctgactaaatccaataatggcatttaggggagtccttaactcatgactcatactagcaagaaactgacttttggcacggttggcagtttcagctgcctctttggcctctacaagttcacgtctagcttgttgccgttctagatgtgccgaaatcgctgctgctgctgcactgagcaagtttacctctgccctttcccaaatttcagcagttgtacaattatcaaacccaataaaaccccaaaactgaccattcaccaacaagggtaagactaagatagccaaaattccctggggttgtaaaatttccctttctgcattgggaaaatcactaaccacaccattgataatcttgccactagaaagagtttttacccatctgggaaagaactggccgtagggaaaattttgcaagttagggttatcaatttgtgaatcaatgccttgattacaccattcagatttttggcttgtcaacaaattaccatcagcatcatcatgattggcaaacagataaacacgggatgcagatgatgtttctcctaaccattgcagaatttgtgtgtagtagttagtgtcaaattcattaactaacaggtaattctgaacatttaccaaagttgaaagataacgttccctgacggctaaggctgcttctgcaagtttacgatctgtgatatctcgacctacatattgcatttctacaaagcgattttcttcatcgaaaatcatccggttattccactgcatccagcgtacttcgcctttagcaagaactcgattttcaattgtgacaatgggattttgtagggataaatttcctacatttacaaatgctgaatcctgtttatctggcaaaatcaatggttggtatgtatgccctaaaatatcttcagaatttacaccaaagtaacgacaaaaagcatcattaacgaaagtaattttaccatcagcatgactgcgggcaattaattctgtttgcaattcaacaatggcacgaaatctggcttcctgatgacgtaattcgacagttttagccgcaatttgtttttctagcgcagcattatagttagtgataatctgttcggtttgtttgcgatatgtaatatcctgaaatgtagtaatggcatgagttatcatcccattatggtcaaaaattggctttgcccatactgctgttggttttatcttgccattgctgtgaatttcaatttcttcaatttgtatatactctccctctaatgcccgcacaaatggtaatctatctttaggataaagttggtctgttcccattacataaagttgatcaaccgtagccaaattatctaagtcttgctcactaattgtttctattcctagtaaggatttagtaacttggtttaagtaaactacagaaccatcaatttgatgaatcgctactcctatgggcaaactttccaaaaattggttaagttctgctttactctcagtcaattcagtaaatgattgctgtaattgttctgccatttgggtaaatgaatcagacagttcacgaacttcaataatggaagtcgaaattggcgatattttctgaaagtctccttgagcaatttgtctagctgctaaatttaatttcagtaatggttgggcaattaactgtgtagtgaagaatcccattgctgtggacaataaaaaagctacaccgcacaagaaaatggttttttcagtagcagatttaatttctgccataaaatttgattctggcaaaacgatcactatcaaccaatctaaaccaagatcatcttgccaaggagaaatgagaacaaaatatttttgatgtttaattttgacttgtatttgttcctcattgacaatatttgtgaaactgccccattttttatgaatttttgtccccacctgccgaataattaagtcttgactgttagaaacttgcaatctttgtgctttaccattaagcatttgaaatgggctttcttgggtagaactggcaactagcattcctgaccgttctagaataaatgctttacctaaagattctggttttagctgttgcaaaaaattactgatgtaagttaaacttaaatctgtgccaagagcgccaataaattttccttgacgatcataaagtggatagctggcagcaattgacataacttctggatttgtgtcccaattgtagattttgctccagattggtttacctactttcactacttgagaaaaccaagcttcgtttctgggttcataagcttgcacggcaactaattttgtgcgatcgcctgccaaatttgtattatatttataagactttccctgttctttccctagaggaatttctgcaatttgcgctattccagtaccgtaatcaccagcaccaatatattcgcctctcgctgtagcaaattgaatataactagctccaaatgttcgtaactgtttgacaaaatacttaccggtagctgaaaaattcaataagttcagttgtccagattcgtaagcatctacatttaattgattgatcttaacaggtgtttccaaataattactaattttctgctcaatgcgatcattaatttctaactgtaaatcaacaactagtttgttaactgccaaggagccgttttgataggaaaaatatcccactagggcaacaacacagacaatttgtaaaacaaatggaactattagtatccgtcgtaatggtgctgtccctaattttttaataatccactgttgatcagtatggctcttcatgttttcaacagagtacaaattctttgattatgattgtcagatgctttagtctgacaggttgtttcagatggccgtttgctaataataactgaatgcttaccatcaaattagtttgaggcaactatcccagaggaagtctcaaaaatctcaacctactgctgggatgtaaacactccagactcaatgaagtagtctatctctagttcatttttccatcttctatataaataatccgatctgctatatctaaaatgcggttatcgtgagtcacaagcaaaatggtacaaccttgctctttcgctaatttttgcattaattctaccacatcccgtcctgattgtttatctaatgaagcagtaggttcatctgctaatactattttaggatgactcactaaagcacgggcgatcgctactctttgtttttgtcctcctgataaactctctggatagtaatctacacgatctcctaacccaacttcttctaacatggaaatagccttagtattaatatcttgatttaaatattctttatgcaactctaaggacattctcacattttctttagctgttaaaaaggtcatcaaattatgcgcttggaaaatataaccaatttgacgacgcaatttagttaacttgcttttacttgctccccgcatttcttgatttaatatttgcaaacttcctgcttgagcagaacgtaacccccccattaatgataataaggtggttttacctgaaccagaaggaccggtcataatcacaatttccccggctttaatttctaagtttatatcaaataatacttgtttttttaaatttccttcaccaaaataatgattgagttgagtaacatgaattactgtatctgaagcaatttttgattgagtattaattttgaacatggtttgttgtgagtattttgtgatggtttgtagtcagcaatttattgcctattcttgctgaatacatcaggactaaagtcctgactacgaactttttagcaactttaaaaaatgtccgcagggtcagcagaacgaagttttttcagggcgatcgctcctgaaacactacacataattaccgtcataataaacactgtaattgcccgatctactttcatgtaaatgggtaacatagtggctgcaaaggtgagttgatataatccaaaagaaagaaaaaatgccggtaaataacctaaaatagctaataataaagcctcttgtattaaaactcctaacagataactatctgtataacccattgctttaagagttgcatattctggaagatgatcggaaacgtcagaataaagaatctgataaacaatcacaataccaacaataaatccaactcctacacccaaaccaaaaataaaaccaatacctgtaccattagcccaataattcttttctttttgggcaaaatcttctggtgttcctatttctacaaagggatttttaggatctggatttaatcctattctcagttgtgttttgattttctccacatctgcacctggttggagattaattaaacctacttcaatttgatcgggtttacgttcaggaaataattgcaaaaaagtggaatcactcgtaatcacattaccatcagcagcaaaggaagcaccattactaaatacacctttaacactcacagatttattattcagttctgtttgaaaattgcctgttttttggaatatttcacctacagcaccatattctggacggccagcttgatcaaacatcacttgatttagtggtttgagagcatcattatttttttgcacttctggaaatttcaatcctggttgattcggatcgactccccaaactaaaatagctcgatcaattcgtgtttcaggattgcgccattgtcctgtaccaatataaacagaattaactgattttactccattaaaacttaatgcttgatatagtttatctctggaaaacctttttacagacaacaaggtattaaactgaggattaatcaatactaaatctgcggataaattgcgatgtggttgaatagctgcatcaaacaatgcactttcaaaccccatctgaataaaaatcaacatatcagcaaaggtaattcccgcgactgcaacagctaaccgcgttttttctttcattaactgacgcaaagcaagaggtgttttcagaaatagttttttagtcattagttgttagtcaggagtcaggagtcaggagttagaatttagaagaggaaaacattttaaccaattaccaattaccaattaccaattaccaattaccaattaccaattaccaattaccaattacccattaccaattacccattacccattacaattcaattgctgtttgtacttgtaagttggttaaacctgcaacttttttactatcttcaggagtgagtttaattttaacttcaataactcgactgtctaaattttcccctggttggttactaaacacattttgacgattgacttgtaaaccaatttgggcaacttctccgagcagttcacctgtaaatgtaggactgataattacagctttttgtccaatctttatcttactaatatcagtttgataaacttctgctactgctaacatttgttctgtttgtgcaaagtcagcaataccagattcacttattttctcaccgacacgggtatgaattttgagaatttttcctgtcatgggagcgcgaataaatgctgcttggagttcggtttgggcgcgtttaagatcagcgatcgcactttcaacttctgtttgtgctaagttcacatctacaggacgaacttcggcaatactgttaagtgtagctttggcttcgctaatttgtttattgctagtagtgttaattctatttaatgctacttttgcttctgctaattgtttggttgctgtggaatttatacgttcaataactgctttcgcttcacttaattgttgtttagcagtttccacatttaaccgtttactatcaattaaagaattagaaattgcaccctctgaatataactgttgataacgttgatattctgattctgcattatttaattctgcggttaatttattaatagttgcttgttgggcaattctatcaccttgccattgagcttctattctggcaatattttgttgttgggcgtttttatccccttcatactgggcttttattctttcaagattagctgtttgtgcttgaatttctccagttttagctccagcttttatttgctcaagtttagcttgggcaactctcacttgtttctcagcttgttggacagcattttctaaggcataacgggatgttaaaatcgctattacctctcctgctttcactatattaccttctttaaagaggattttttctactctatctccatctaatgctaaaggtgcagatagcttaattacttctgtttctggttctaatcttcctaaagctgtcaccttactaggaatagcaccagtttctgttaattctccagtggcggcattgccaattttactaaaattagaaataccgtaaattacaattcccgcagttatagctgtggctgctaaaaccaaaacaattaacccttgttttcctggtttcaataataatttataactcatttttttgactccccacaataaaaaaatctgcgtttatctgcgttcaattaatgatatttaccttttctttgtctgtaaataagctgttaacatttcccctaaaagttggcattgttccataaaatcaattgtttcatcaccccataatttttccagaattacaccgttgacaaaactcaatacaaatgatgctacaacttgatcttcaatacccaaaaattcacaagctgcttgttgatatcttttgttagcacgtttaaaaactgtgctattattcagcatggtttttgagtcttgattttgacaaaaatcaacccaaacataagtccatttaattaggtaatcttcattgttgacaagataattacccaaagctgtcatcatttctgaaatgttgtttttccctcctaattctgctaaggctgcaatcacatcttgctgactaatttcttctaccagttgctcaaataaagcttgtttactggggaagtaatgataaagcgtacccgtggaaacccctaaaccgttagcaatttgccgcatggtgatagcgccatatcctttatcggcaaataagtcaaaacacttgccgagtaattctttgcggtattgttcatgatccacaattttcggcatagttgatgttttctttttgttttgttgtttttttatatcgaacggtcgttattttaaggtaatatcaaagataaaattttgtcaaggtatcagcttttaacaaaccgctatccggtttcccgaattttcaagttgggtaggtcttgtatagtgaaatcaggtgagttgctataatcttaacagattttataaattttttggaaaaatttacatttgtaggtgtatctcactaaatagggtttgctgaaaaagtcccttcgttgaggcagggaatagggaatagggaatagttttagctatctgttatccccagattttctaatttatcagacccaaaatgcacagtttttaaggtatacccttcaaaaatcttgcactttctttcctcctgatcagcctcaaacctttgatttacgagtattttgggtttattcagcaagccctaaatactggtgctgattaataacagctaaaaagttgaccctgctggaattgggcaacaaaatctgccaaaaaaatatctacattagtaacaactctaaatatcctttcagataaagaaatgcaaaaccaacctcaagacaaagataatctgttaaccaaaagccatgatcatgcgccttggaaaaaagcagcggcttctttatccttggtgttgctgggatcagggatgacttttgcaggaggctatttagcaaataaccaacagcaagttgctgaaactgcatctaaactagctgtacaaagtgtaaacgcagcgccgccattaccaggaaacatagatccgaattttgtgactcaggttgtacagagagtcggacctgctgtggtgcgaattaattcttcccgtacagtgcaaagccgcctgccagaagaatttaatgatccctttttccgtcgcttttttggatcacgattaccgcagggaggaaaccgggtagaaagaggtgcgggttcaggtttcatcataagtgcggatggtcgtattcttaccaatgctcatgtggttgaaggtgcggatagggtgacagtcactttaaaggatggacggacttttcaaggtaaagtcgtaggaaaagatgaattaactgatgtggcagtggtaaagattgaggcgaataatttaccgacggtgactttgggtaattctgatcagttacaaccgggacaatgggcgatcgctattggtaatcccttgggtttagataatactgtaactacaggtattattagcgccacaggacgttctagcaaccaagtaggtgttcctgataaacgagtagaatttattcaaaccgacgcagcaattaaccctggtaactctggcggtccattgctaaatgctcgtggagaagtgattggtatgaatacagcaatcattcagggagcgcaaggtttaggattttcaattcctattaatacagcaaaacgaatttctgatcaattaatcactacaggtaaagcgcaacatccatatttaggcattcagatggtagggatcacacctgagttaaagcaaaggattaattcagatcccaacagtggtttaactgtgaatgaaaatcaaggagtattaatagttagagtcatgcccgactcacccgcagcgaaagctggaatacgtgctggggatgtgattcaaaggctaaacggtgaagcagtaacagaagcatctgctgtacagaaagcggtagaaaaagcacaagtgggagggaatttacgcttagatttacgtcgcaatggacaaagtattaatatcgctgttagacctggaacttttcccacaaatctccaataattagagtgggcaggaggcaggagttatttattttggattttggattttggattttggattttggattttggattttggattgtttttgctatctccaatctcagaggatgttggaaaagtattataattcatggagatacacccaacctcccttacaaagcagggcgttttcattctctaaatttgcgatcgctagaaccgtttgaccatcaatatttgggcttgtttttcatattaattaatcaaaaattagaaaaaaaagcctctattgacctatggaaaagggttttggggaaatgattttgcaatttacccccgatttggaaaatgccctgctttttcagggggataatggggaatctgcgggtgtcaaatcccacacgaaaaagttttcaaacaacctctaaaatctaaaatctaaaattattttgcctcttatcttttgccttctgttacctgttacctgttacctgttacctgttacctgttacctgttacctttccaaacagatatgataactattcaaagagaggtgatatagtaggaaaagctaagagcaaaaatagctaaaagcacaggaattatagtattagattccagttggcgatttttgaggattttgaagcaagatatgggaataattaccggccagaaaatggtagtgattacaaacataacaaaggataaaaatttatcctctggtgtatatgtagggtgaagaagggaaaactttaaccaattggtaaaaaaatagcaagtcattagtaggtaactaatcactaatgttaattggatctgggtcactatttgcactcctaaatgattttttggttctgattacttcctctcatacattttgcgccaagtcttgcacaatggacaattatcaattgataaggtagttaggatagcaattatacatataaatgttaatcagctattccttttttggtatagcacaggtctaaaaaagtggcaaataaaatgcagcatcagctacatcctcaatagatgtactagaaccagttaatttggaacagacaaaatagctgggaaaatgctgacctcaaaattcaggagtgaggagctgcggttttgagatagatagggatctaaacgctgcaattaatttatcgcgtctggctaaggcgtgaaagtctactgaaggataactgctcccatgctcccgttgaagtagaaagtaaagtctagtattgtctaggttttatatagcagtcagtagttaaagtaattaaatgggaatttaaagttgggaagtagacgaagaccgataagtataaccgacttgagaatctttttgaatgtactgtttaatactgtcgaaatcaatgaaataatcagccacatcaatcaggctatcactggtcatgctttgtagaccaattacttctactctagatcccaagctggtaactgcattgacagcataggctaaatctccatctccactgactaacacagcggtatcgtagtagggagctagagtaatcatatccacagcaatttccacattgagattgggttttttaccattctcggaaactgtaagtatatctttggtgactacacgatagccattgcgacgcatccacaacagaaacccctgttgcttttctttgctggcatcaacaccagtataaaagaaagcccgtaaaagcctagaggtttgagttaaacgacaaagtaatttaacatagtcaatttcaatgcctagttgcaaggcagagtgaaataagcttaaaccatcaataaaaatggctactctaccgcgattaagatcatcaccaatgctcatatcgttaatagcctcttgtggcttgatatctcgacctttgacagttgtttttattgcagctggtccttgccaatgtggtttttctttaagttctttatattcgtttgtgtttttgtgaagattagtaaaattcattgatgcctcgagattttaaattgggatgtctttgataaattgctattatctagtatagtcgctgctaagttcataacctttgtagtaaacttagcaagaaactctctccaaagacgagttgcaaataaacttaacttacagcacttacagcagaatttaggagtccacagagacgtttggactaactgtctgtacagtaagtagtgaggagtaaaccagccttgatacttgattttgaatcgaaatttgggaaaattttgtacttcatttacctgcactggtgtatttggacttatggctgatattgaagtgataacccagaatttgggagtatttcaagatccctgttggcacagggacaaatattaaaaaaatattaaaaaattctgatcatttcaggtggaagttacttttgtattttcggtgttttctatggtaagaggcatgaggccttgtatggtgagaacagagcaataagcatgatgtaaaacgtagttgctgacgctgcctaataaaacttcactgatgccagtacgtcccctgcgaccgactataattaagtcagctggccaacttaaagctaattcacagatcactcggcctgcatcacctactgtttgggtaaattcagttttgacacctgccttaattgccgtttgagttagcgatcgcatccaatctagtctatcttgttttagtttatcccaagcttgcatatattgattaatagtttcagtatgcaaggtaggataaattgtttctggttgcaaaaatatgggattgatgtaaggatcttctaagggggatagaacgtgaagcaacatcatttctgcctcacttgcctgagccaaaaatagagcttgatcaaaaatatactgacttctttctgagttgtcgagagcaactaaaattttgtgaaacatagttagtcttccttggggagtattttaaatctatacctattgtggtttttatctgatataacttcggctatattggccatgttaatcaatttttgggaaatatgcaggaataaataataaatcatcaactcgctgagtatcaatattgtaaacttgttgtaagaattcaggagtcaggagtcaggagtcaggagttaggagtcaggagtcaggagtcaggatcagaatttttaaatcaggaattaggaatgaactgattcgagattttataagaaaataggctgtatctttaacagtgcaacaaggatcacaaatttaaaagttttctgtctgttacgaagatttacaaaaatcataggtaatagttaggggaaaagattgattaccaatcaccaattatcagttacccatgcaaaatccttgcagctaaaatccgaaatccaaaatcagtatcaggaggtgatggtgatggtgttaagatttcgcaaccgtaaagaagcaggaaaaatgttagcgcaaaatttgaccgcttatgctaacgaagaaaacttgttggtgttagctttaccgcgtgggggtgtgccagtggcgtttgaagtagcgaaagctttaaatgcacctttagatgtttgtatagtgagaaaattgggtgtacctggtcataaagaattggcaatgggggcgatcgcttctgggggaataggggtactaaattctgatgtgataaatacgttgggaatagataaagaagcgattcaggcagttgcggctgaggagttgcaagaattacagcggcgcgatcgcacttatcgcggggatgctccacctctaaacgtcgaaaataaaactgtgattttgatagatgacggtattgctactggttcaactatgcgtgctgctattgcgattcttcaacaacaacaacctcaaaaaatagttgttgctataccagttgcaccggcaagcacttataaagaattgcagtcagaagtagatgaaatagtgtgtttgcaaattccagaaatcctctctgcgattggattatggtatgaagactttgcccaaactactgatgaggaagtgaaagaaattttagatttgagattttagattttagatattaccaatcaccagtcaccaatcaccaatcaccaatcacttaaaaggttaaaccaatgaaagctcaagaatctgggaatgttttagagcaaatagttactattgaggtaggactactaagactcaaaggagaattagttgtaccgccagaagctcagggaattgttgtatttgctcattgtagtggcagtagtcgctatagtagccgcaatcattatttagctcatttgttgcgtcagcaggaaggattggcaactatattaatagatttattgacggaagaagaagatgcaattgatcagcgtactcaacatttacgttatgatattagttttctggcttcgcggttaattaccgtcacagactggttgtttgaaaataccctgactcgtgatttaaaagttggttactttggcgtaaatagaggtagtgggtcagcatttttagctgcattagctcgtccgatgaatgtgggggcgattgtttgccgtagtggttatactgatttggtaattgaaagtcttggttatgtacaaactccaactttgttaattgttggtggtaatgattgtgcgataattgccatgaatgaggatgcaatagcagaaattcccacccagcataaacaattagaaattattcctgaagccagtcacaagtttagcgaacctggtgctatggaggaagtaggaagattagcgagtcaatggtttaaatattatctttcacctgtggaggaaaaggaattgcatttacacgcaatgtcgttattaattgataattgacaattgataattgataattgtttcattcaatgttaaaaacctcccctaagttcattcctcaattaaattcaattatttcacttagtctctgattgaaaacacttatagttaagattcagctaaggaaataagagtaaatcaatagttgatataattaattgttttaattttccaaattccaacccaaggcagatgcgacttgaccggctaattctagaggattaaatggtttggcgatcgcacttttcatacctaactgagcatagcgacgacgatcagcggcttgaattttggcagttaacaaaatcacaggaatttcttttgtatttggatttgcttgtaaatttgcaaaagcagcaattccatccatatctggcatcatgacatctagtaaaatagcatctggttgatgattttctgcttgtactattccctctttcccagaactagctgtcagcacttcccaacctgcaacagtttctaaacaaattttagctacttcttgaatatactgctcattatcaactactaaaattcgctttttgttcataatttctatcccctgataaattttggattttagattttagattttagattttggattttaggtcagctaacagccctcagctatttaccttgaatattgaaatacaaagaatgaaaagaaatagatgtagataacattcatgaaatcaaaacttcaaaatccttactattgcagctattagctgattactgattaatgatagctgaatacttacgattttagattttggattttagattgggaatgtgagatactgacgttgattgtaacatcattttcatgctctgactcctgcctcctgactcctgcctcctgactcctgactcctgactcctgactcctgactcctgcctcctgcctcctgcctcctgcctcctgactaatgattatgggtaattctttgtagcagatccatcacccgttgttcaaattcttgggtagtaactcttcctttagtcaaaaattctgtatgtcctaattttagtcgatggcgttccgaatcatccaaatccttagcagaataaacaactacgggaatactaaaaagttgattatgttgttttaaccaatctacaactgtaaaaccatcactctctggcaagattaaatcaagaattagtaaatcaggatttaccttttgactgagatgaatagcttctctaccagttttagccaggaaagtttcaatatcatgtctagcaaacaaagttgctaataaatctgccaaatcatgatcatcttcaacaattaaaatcttaactttgcgagaaggttcagatacaaattttctcaaggaatttaacagggaattttcctctactggcttgcttaaccaatcaacaaaattagcactaggttgattatttttattgggtttgtagacactacaaatcacaattggtatatcctgagtatctggacgtttctttaatagtgccattgtttcccagccattcataccgggcatgactaagtctaatacaatgatatcgggatgttgagcaacggcttgagcgatcgcctcttcaccactatctactgtaattacccgatatcccccttgttccaataagttttttaattcaccacgaattaccgcatcatcatcacaaactaaaaccaaaggagaatgctgattattaatgataatttcttcagtttcttcagtggctaaattttctaattcaagtgtttgatcaatctggcaaattggcagtgtaaaataaaaactactacctttgtttaacaaactttttacccagatttgtccgcagtgctgctgtacaatactcttacaaatcgccaaccctaaaccagtaccatcgtggttgcgtgaatctgaagaatcaacttgttgaaatcgttcaaaaatactatctaacttatcaactggtattccccttccagtatctgtaactgtcaccagtacctcatcttcttttaattctgtcaacaaagaaactgtagccccagatgtggaaaatttaatcgcattactcaacaaatttgttaaagtttgaataatccgatccggatcagcccagagttttacagatacactagaaatagataattttaccccagctttattggctagaggctgcataatattcacagccgagttaattaaatcttgtaaattacaagtttcccgttccattttgactttacccgactcgatgcgctcaatatcgagaatgtcattaattaatcttactaaacgctcggtgctatcagtggctatttgcaacaagcgtttaccctgttctgaatctgttggtaataaaccactagctaacattcctaaagatccgtgaattgatgttaggggagtacgcaattcatgactaacaacagagacaaattcatctttcattttttccacttgtctacgttcagttatatctcgcaatattactgtgtaaacacattcttcacccacttctaatttagaaatagaagcttctgcgggaaattcagtaccatctttgcggcaaccaaatatttctcttctttctcccattctgcgagcagaacctgaagatttaccaaaatcaaatacatgatggcgatgttgttcagcaaagcgcataggtaagagtaaatctagtttttctcctagcacttcttgagcagagtagccaaaaatcttttctgcaccttgattaaataaagtaattttttgattactatcaatagaaataatggcatcatcagctatacttaaaatgccttcaaatcgagtttgagaaattcgcagagcttcctgtgtccgtcgtctttcatcgagttgtgattgtaattggtgattaacagtaattaactcggctgtacgttctgctactcttaattctagttcgtctttagctttgtgcagtgctaattctgtttgcttgcgttgagtaatatcacgagcaaatatttgggctgctgattgaccttggtaggtgagagaagcaaccactatttctacatgaattttcctaccgtctaatctgacaaacttaacttcatgcagggaaattgattgtttattgatttggatattttgcagttctttgttcatttccctttgaaaatcgggatgtacaaagtcaataaatttcttacctaataattctgctgttgatgtaacaccaaaaagtttcattgtggcactgttgacaaagacaaatttatcttgactgacaatcaaaattgcttctggataaacttcgactaaattgtgataactttcctgaataaatctactttgattttctaggttattaacttgcttgtttcgattttgcgccattcttcttaacagtttcacccgttctaatctgttaataatgcggttaactagctccgatcctatgatgggtttgctgacaaaatcatcagcacctgcgctaaaaacttgattcactatttcgacatcgttatggacagtaagaaataaaattggtagttcactaccttggggattgttgcgaatcatttgacataattcaatcccatttgtaccaggcatttctatatccaaaattagcatatctggctggacgctttgccaagtttgccaaaaatgcaggggataattaagtggaataatttccattccccaaggtgtaagtaatgtttgtaataatgctaaaatttgtgggtcatcatctacgactaatattttggctttagaggttgtttggtctaatggttgtggtaaatttaaagaatgtttatggttattattatggcagggtagattttcctgatttttgctatcaatttcttgacggagtaatttaacccaatttttgagattggttgtatcacttgtagttagggttttaccagatttgagtaatttttcaatttttctcgctaattctgaaccattaggtaaaccaaaagtgcctaaagatcctgctaaagtgtgggcttctttaatagcctgtgatagcgcaagtgatgaattttcagtttgcacttctgagtttaagcttgaatttaagcttgaatttacaatttgttgtactgcccgttctatgatagtaacttgttcctctacccgtccacgaaatcgctgccaaattgccccaatagctgtaagagtttgctgagattttaaattgcttttctcatcctttaatacccctgtttctcctgtttctttcgtctttttatttcccctgtttcctaattgctctccttcatcttcctggggtttaagacgataaccaataccatatactgtttctactaaatcgtgaggagctcccgctgattttagcttcatacgtaaacctttaatgtgggtgcgaacagcttcttctcccggtgtgtcttcataggaccaaagatgctctaaaatcatgccacagctaaagactcggcgattatttcgcatcaagagttctaacaaagcatactcttttggtgtgagtgatagaagattttgctgatatgttacttcacagctactgggatctaatcgtaaatttccccactctaatacaggttgcgaggcgatgcttccccgtcgtaataatgccctaacacgagctataagttcttcttgattgaaaggtttaactacataatcatcagcacctgcatctaagccaatggctttatcgtgagagctatcacatcctgttaataataaaatcggtacttgccgaccactagagcggattttcttacataaactaataccgtccattttgggtagtataacatctaaaagaattaaatcatagtcgtaagtttcgactaaatcccagcctgcatcaccatcattggccacttctactgcataattttgctcagtgagaaaggtggtaagtgcataggcatttaactggtcatcctcgatcactaaaatcttcatattaaaagcttccctaatctagtagctttaaaagctggtaatagtggaaaacaacttaatattaaattatgttttcctagatataatttaaacaagtttaactctatacattaaatagtaacatagtaacattgatgtagaaatataaatttatatcaagctgaaaatatatattctgtaataattcggtggtaacaagtcagaataattgataaatcagtagatgatgaaatataaattaaatataaattaaatataaattaaatataaattaaatatagcgtggcgttagccatacggtacagaatctaaattgaaacctatacacaaagccagttttactcctgactcctgctgtaattaaccaatttctcagatgaatactgactgaattaccaataatctatcctcacaagttcctcaaattgtttgcctataagcataagtgtaaaccaagtcacagggcaggtgtgaaaaattaacgaattgtgaagattagtgtcaagaaatccaaatgaaataaacatattttgactaaccaagaatctagaaagcagaaagagctattttcaataattggcgagctaagatggaggtagcaatgtttaacaaaattttagttgcattggatcgctcggacatgggaaaacaagtttttgaacaagccgtgtctttaacaaggttaacatcagccaaattaatgctattgcacgttatatcacctgatgaagacggtattcatgatgtaatggttaattctcagatggattactatccaggctggggtgatgacagcatcaaaaggtacttgcaaaagctggaagtgcataaagacgagggtttggaaatgttacaaaaattctgcgcccaagcaaattctgagaacattaatactgaattttcgcaaaatgttggtagtccgggtaaagtaatttgtaactttgccaaagaatggaatgcggatttgattgtgattggacgacgtggactttctggaatcaccgaatttttaatcggtagtgttagtaattatgttttacatcatgcaccttgttctgtgtatattatacattttgagggaatagggaatagggaataggtgacaggtgactggggactggggaaaaaattttagattttaggttgaagttaatgaaatacaatccaaaatccaaaatccaaaattgaatcaccaattaccaaatatcaattacccaatatcaattatcaatgattatgaaaactacagattcacctcctaagaatcatccgagtggagataaacgtttgaaaatgttggacgcaactatcaaacggcatcaatatcaacaagatgcactgattgaaattctccatcgggcttcagaattattcggttatttagaactagatttattgttgtacattgcccaccaattaaaattaccacctagtcgggtttatggggtagcaactttctatcatttattttcccttgcgcccaaaggtaaacataattgtgtagtttgtacaggtactgcttgttatgtaaaaggcgcacaagcaattttaacaagtttagaaaataccaccaaaattaaagctggagatacaacacctgatggggaaatttccctgttaactgcaagatgtttaggtgcttgtggtattgcaccagcggtagtttttgatggtgctgttttaggaaatcaaacttcagaaacagtttgtgaaaaagtgggagaatggcagaatggaactaaatgaattattagaaattgccagaatagaacgttctcaggcgaaacctgtacagattcgttgttgtactgctgcgggttgtttgtcttctggttctcaaacggtgaaagataacttagaaaaatctgtaaaagctgcgggtctagaggatcaaattcatgtttctggtgtgggttgtatgcggctttgttgtcaaggtcctttagttcaggtggatcaagaaaacaacaaagaaacgaaactttatgaacaagttaccccagaggatgcagcaaaagtgattgaggctatgcagggtaaagaaacagatttaaaagagcaagatttgagccaaccattttttacgaaacaattacccattgtgttagaaaatagtggtaaagttgacccggataggattcaatcttacattgtggaaaatggttatcaagccctttaccaagtgctaagagaaatgaaacctactgaagtagtagaaactattactaaaagtgggttaagaggaaggggaggtgctggttatcccacaggtttaaaatgggcgacagtggcaaaatctcaaggtgagaaaaagtttgttatttgcaacgcggatgaaggtgatcccggtgcatttatggacaggagtgtattagaaagtgatcctcatcgagtattagaaggaatggcgatcgctgcttatgctgtgggggcaagtcaaggttatatttatgtgagggcagaatatcccaccgctattaaaagattagaaactgctattcgccaagcccaaagattaggacttttagggtcacaaatatttgaatcaccctttgattttaaaatagaaattcgtattggtgcaggtgcgtatgtttgtggtgaagaaacagcattaatggcttctattgaaggtaaacgtggtgttcctcacccccggccaccttatccggcggaatctggtttatggggttatcccaccttaattaataatgtagaaacctttgcgaatattgccccaattatgagaaatggtgcggaatggtttgcgagtattggcacagaaaaaagtaaagggacaaaggtttttgcactagctggaaaaatccgcaatacagggttaatagaagtacctatggggacaactttagaggaaattgttcaagaaatgggtggtggtgttcctgatggtggtattgctaaagcagtacaaactggaggaccttccgggggatgtatacctgcgtcaaaatttgctacacctgtagattatgaatcattgactgctttgggatcaatgatgggatctggtgggatgattgtcatggatcaaaccacaaatatggtagatgtggcgagatttttcatggaattttgtatggatgaatcctgtggaaaatgtattccttgtagggtgggaactgtgcaactccataatttattagtgaagattggtgatggtaaagctgcacaagctgatttgcaattattagaagaattgtgtgacatggtgaaatataccagtttatgtggtttaggacagtctgcaccaaatccagtttttagcactttgcgatattttcgagatgagtatttagctttgataattgataattgacaattgacaattgatagttactaattgcaaaatctaaaattcgtatgacagtaaaaacattaacaattaacgggcaaatgattagcgcccgtgaggatgaaaccttactagaagcagcacaggaagcgggtatacatattcctacactttgccatttagaaggtgtggaagatgtgggtgcttgtcgtttgtgtttggtagaaattgctggtatgaatagacttttaccagcttgtgttaccaaagtttctgaaggaatggaggtgaatacaaatagcgatcgcctccaaaaataccgccggacaattatcgaaatgttatttgccgaaggtaatcatatttgttctgtttgtgttgctaatggcaattgtgaattacaagatttagccatagaaatgggcatggatcatgtacgtttagaatatcaaaatcctcaatgttctgttgatacttctcatgatagatttggcatagatcataatcgttgtgtgctttgtactcgctgtgttcgtgtgtgtgatgaaattgaaggcgcacatacttgggacatggcaggtagaggatcaaaatctcacgtaattactgatttaaatcagccttggggaacttctcaaacttgtacttcttgtggtaagtgtgtaaatgcctgtcctacaggtgcgctgttctatcaaggttctagtgtgggagaaatggtacatgatcgaggcaaaattgaatttttagtcactgccagagagaaaaaacaatggaatgtttagaaggttgggtatcggggaatatttcctaccaattaccaggaggtaaaaccaatgttaaaccgtattggcaacatctttttacggttgctattcctggggatctggacaacattgatattcctgggtttaggcagtttcaccttccagactgcaattgctgttgttacgcaaatagaagaaactccaggagaagttctttatcgctcacaaacaaaattagatgataacttaggtaaagtttggcaagttgttttgtttaaacaagtttaccctgggcaaacatctaatattaatttgcgcttagttggttttcctggttctgcggaattaattcacccccaaccgttaagaattacctcaaaaactggtcaaatttggaacgctcctgatatatttttagatgaagcaccagcgcccacaattggtcaatataatttcactgaaatattgccccaattaccgaccgaacctttaaatttggcaatacctttacctggtgcgaagtctattgatatttcagttccaattaatgttgtgaaagaatggaaaatattacttacaagtaacaaataaaaaataaaaaggtacaaagatggataaaataaaattagcaacagtatggttaggtggatgttctggatgtcatatgtcctttttagatttggatgaatggttaatagatttagccgcccaagttgatgtagtttatagtcccattgctgatattaaagaatatcccgaaggtgtggatgtggtattagtagaaggggcgatcgctaacgaagaacatttagaattggtccacaaaattaggaaacgcaccaaaacaattatttcctttggagattgcgctgttactggaaatgtaaccgctatgcgtaacccaacaggaaatgcagatgtgagtctgcaattagcttatattgaaggtgcagatgttaatcaacaaataccccattcacctggtattgttccacccttaattgataaagttgtacccgttcattacatagtaccagttgatatttatttacccggttgtcctccttcagcctctcgcattcgtgcggcacttgaaccattattaaaaggagaaataccagtaatggaaggacgggaaatgattaaatttgggtaatccaatgttcaattttcaattttcaattttcaattttcaatttagtccgaggtgaattatgttaaaagcagcagatgtaatgacaaaagatgtagcaatgattcgcggttctgctacagctaaagaagcaattgatttaatgaaagctagagactggagggcgttaattgtagatcgtcgtcatgatcaagatgcttatggaattgtaactgaaagcgacattgtttataaagtcatagcctacgggaaagatacaaataaagtccgtgtttatgagattatgactaaaccttgtattgtcgtcaatcccgaactaggtttagaatatgtagccagattatttgctaattatcgtttacatcgtgcgccggtaattagtggcgaattaataggaataatctcattaactgacatcttagctggcagcagtgctttagaaaaaccccatgcaattttgttagaacaagaattacaagatgaaattagaaaagctcgtcttgtttgttcagaaaaaggaattaattcccccgaatgtgcagccgcttgggatgtggtagaagaaatacaagcggaaatagcccaccaacgggcaatgaaacctttaaaaacagcttttgaagaatactgtgaggagtttccagaaaccgaagaagctagggtttatgatctctaggtgattggtgactggtgactggtgactggtgactggtgactggtgactggtgactggtgactggtgactgggtaatcaattttatgttttttaatcagcaattcccaattcccaattctcaattcccaattcccaattcccaaataatatgaaaaaaatcgttattgatccggttacgagaatagaaggccacgccaaaattagcatttatttagacgataacggtcaagtaaatgatgcgcggtttcatgtgacagaatttcgcggttttgaaaagttttgtgtgggtcgtcctttcccagaaatgcctggaattactgcaagaatttgcggtatttgtccagtaagtcatttattggcatcagcaaaaacaggtgatcaaatactggctgtcactattcccaaagccgcgacaaaattacgcaggttaatgaatttagggcaaattgtccaatctcatgctttgagtttctttcacctgagcgccccagatttattattaggaatggacagcgaaccagcaaacagaaatgtgtttggtttgatagcagccgacccagaattagctagaggtggtattcgtttacggcaatttggacaggaaattattgaactattaggaggtaaaaaagtccatccttcttgggcagttcctggtggtgtcagtgatcctttaacccaagaaaatcgcactcatattcaaaaccgcattcctgaagcaaaaaccacggttttaaatgccatagatttatttaaaggtttactaaaagattacgaaaaagaagcgcaaacttttggtaattttcctagtttatttatgggtttagtgactcctgatggtctatgggaaacctacgacggacatatccgctttgttgatagtgcaggaaatattgttgctgataaattagatgctgctaattatcctgaatttatcggtgaagctgtgcaagctgattcttatttaaaatctccttactatcgtcctttaggttatcctgatacaagggatcattgccgtttagatagtggaatgtatcgcgttggaccattggcaaggttgaatgtttgtagccagattggtacaccgttagcagataaagaattaaaagaatttcgcagtcatggaactggtactgttaaatcttctttcttttatcactatgcacggttaattgaaattttggcttgtattgaacacattgaaattttactggatgacccagatattttatcaactcgtttgcgggcggaagctggtattaatcaattagaagctgtgggtgtcagtgaagcaccaagggggactttattccatcattataaagttgatgaaaatggtttgatggcaaaggtaaatttgattattgctactggtcaaaataatttagcaatgaatcgtacagttgcccaaattgcccgtcattttgtcaatggtagtgatattcaacagggaatgttaaaccgggtagaggctggtattcgggcttttgatccttgtttgagttgttctacccatgcagttggacaaatgcctttattgatagaattggtgaataaagatggaaatgtggtaaatcaaatttgtcgagattaattacattatcttatatatccccaaattcttggagaattcggggatcttttaattgtataaaaaataagcggctgatatagccgcctcaatatttatactgttattcgctcatcttgatccccgcttgcattgggtcaaagttgtggggaaaatgggtgttatggttacagtcagcattctctaaatgggttccctgcaagtcagcttgacgtagattcgcagaaaacaacattgcaccccgcaaatctgcattctgtaaattagcttgactcaaatcagcgtagctaagatcacaaccgcgcaaattagcaccgctaaggttagctgtacttaaatcagcataactaagatcagatccttttaagtcaacatcttgtagattagcatcacttaattctgctttttcaaagtctcgtttccccagtgcgtattcttttacaatagtagcagcactattaattggctgttgaaaattgacttcaggcataaaacagcctcacaacttatctaaatttttttaactgtctttattcagttaccgcaattgattatacaaccaataatctataaatcacatttattattaacataagtttgtgtttgttttcgtggagtttcttcacaaattcctcaagttttgatgctattttaaaaaaaattaatctgttgctaacgagaacaaaattttccttggtatgaagaactatttgtattaagaacttttaattttcgtataatttattatgttgtcatccttaatttcataacatatatgataaaatgactaatagaacttcaagattaaaaaggagaagttagtgaaacaacaattagaacaacaacagtctaataactcgttaaatctttatgaacaagattttcaactgtggattgaacaaacgattaactccttagaaaccaaacaatttaactcattagatattgaaaatttaattgaggagcttaaagagttggggaaatcagaaaaaagagcattagaaagtaacttaatggttttattggcacatctactaaaactgatggtacaacatgatgctcctgattcaatgacacaaagttggtatcgttccatcattgaacatcgtcaacggattttaattgctctgaaaaatactccttctttgaaatcctatttagaaacagcattagaaagagcctatcctgacgggcgtaatttagccattcaagaaggaaaaaaagcctcttttggtgtgcgtattcctccagaaaatgaatatccaaatatttgccctttttccctagaacaaatattagatcaagactttttcaatcttcctaacgaataatgatcacaacaacagtaattggttatggtaatgatttacgtggtgatgatgccattggacaacgaatagcaaatactattcaatcatggcatttatccaatgtcaaatcctatggtgttcatcaattaacaccagaattagctgcaaatttagcccagacaaatatagtaatttttgttgatgctggtgttaattgccaaactgaggatgtacaggtagaatctttattaccagcgatgggtaaagaaataaatggacatatattgaatccagaatcattgctttatttgtctcaatacctgtataattattgtccagaagcctggttaattacagtcccaggagagaattttgaattgtgcgatcgcatttcactaacagcacaaaaaggcattaccactgcactttcaaaaatcatgcaaattcttgatcaagatcacaatatattcatgcaataacaatgaaaataggtaatgggtaattggtaattgtaaaaaacaactaatgactaataactaatgactaataactaattaaggagtaattatgcaagcatctatcacacgaaacccagacaaagcttacgacatcttacaaactgagagactaaaccccttagacgcgatttttgcacctcaaaccgttgctgttattggtgctagtgaaaaacctggaagtgtgggtagaactttactttggaatttaattacaaatccgtttaatggaacagtttttcctatcaatcctaaacgcaatagtgtattaggaattaaagcctatcctactatttttgatgttcctgaaaaaatagatttagcggtaattgctacccctgcacctacagtaccacaaattattactgattgtgtgcaagctggaattaaaggggcaataattatctcggctggttttaaagaagcaggagaaaaaggaatagctttagaaaaagaaattctcgacatagcacacaaaggaaaaattagaattattggaccaaactgtttaggagttatgagtccaatttccggtttaaatgctacttttgctagtaaaatggcacaaccaggaaatgtaggtttcctcagtcaaagcggtgctttatgtacatcaattctagattggagtttacaggaaaatgttggttttagtgccttcgtttctatcggttcaatgttagatgtaggttggggagacttaatttattatttaggagatgatcccaatacaaaaagtattgtaatttatatggaatctatcggtgatgcgcgttcttttctgtccgcagcgagagaagtagcattaacaaaaccgataattgttattaaagccggtcgtaccgcagcagcagcaaaagcggccgcttctcacacaggttcattagcaggaagtgatgctgttttagatgctgcatttagaagatgtggagtattaagagttgatagtatttctgatttatttgatatgtcagaagtattagcaaaacaaccgcgccccaaaggtccaagtttaacaattttaactaatgctggtggtcctggagtcttagccaccgatacattaatagaaagtaaaggcaaactcgcaccaatttcccaagaagtcattaattctttgaatgaaattttaccaccacaatggagtcataataacccgattgatattttaggagatgccgatcctcaacgttatacaaaagctttagaaattgctgctaaagatcctaatagtgatgggttattagtaattttaacaccccaagctatgaccgatccgacaaaaattgctgaggaattaaaaccctattcccaaatggcgaataaaccaattttagctagttggatgggtggggaagatgtggcagaaggaaaacaaattcttaaccgtcaaggtattcctacttatgcttatcccgatacagcagcgcggatatttagctatatgtggcagtatagctataacctcaagggtatttatgaaactccggtattaccaagtttagaatgtgatacaaatacccgtgattgtgcattggtggaaaccattattaacgatgccagaaaagccggaagaacgattttaacagagtttgaatctaaagaaatattagctgcttatggtattccagttgtcgctggaagtattgctaagagtgcagaagaagcagtagaatgtgcggagaaaatcggttatcccgtggttttaaaattgtattcccaaacaattacccataaaacagatgtgggaggagtacagttaaatttgcggaatgcggaagctgtaaaaagagcttatcatttaatagaaacttcggtattacaaaaagccaaaccagaagattttttaggcgtaaccgtgcagcaaatggtcaaaactagcggttatgaattgataattggtagtagtttagatccgcagtttggaccagtattattatttggtgctgggggagaattagtcgaggttttccaagatagcgccatagctttaccacctttaaatactaccctagcacggcgaatgatggaacaaactaaaatctacaaagctttaaaaggagtgcggggtagacaaagtatagatatggcagctttggaggaattgttagtagtatttagtcatttggtagtagaacaaccagcgattaaagaaatagatattaatcctttattagctattcctccctctcctgatcatccgggtggtttaatagcattagatgggagaatagttttacattctcctaaaatagaaccaacggaattacccaaattagcaatttgtccctatcctcaccaatatgttagtgattggacattaaaaaatggtacaccaattactatccgtccgatccgtccagaagatgaaccattaatggtaaaattccataaaacactatcagaggaaagtgtttatttgcggtattttcacatggttaaattaagtcaaagaatagctcatgaaagactgacaagaatttgttttattgactatgatcgagaaatggcattagtcgcagaacatcacaacccagaaactcaagcaacggaaattttagccgtaggaagattgagtaaattacatggtaatgatggggcagaatttgctatgctggtgagcgatcgctatcaatgtaatggtttaggtacagagttactcaagagattaatagaagtaggtaaaaacgagaaaatatcctctatttctgctgatatcttagctgataatttaggaatgcaaagagtatgtgaaagactcggttttaaggtgtcacatagcaatgatgcaacggtgttaaaagctgaaattgatttgtaatcagtcagtatactgtaggggtttagcattgctaaacccttactatttttacttccttaacactcaaagcttactaatatttttttctgtatcctctgtgtctctgtagttcgttattaaaaaaatatgctgcaaaacaacattaatcaaatttggcaaaatctggaaaataccaaaacagaaaaacagccatttacccaagatgtaattaataacttaccagaaccagtacaacgttatttcttacacgctattactctgggaacacccttagcaactggtgtgaagttaaaaatgcaaggttattttcaacctagtaaagataaaaaattacccatgcaagctacagaaattttaactactaaaggatttgtttggcaagcagtaatgggtaataaattttttaatattaaaggagcagattattattataataattcagcaaaagtagagtttaaaatttgggggttaatcccattagtcaaagaagaaaatcctgatattaaccgttctagtattggtagatttgcaggtgaattattctggttgccatctactttattaccacaaaatcaggtaagtttgcaagctattgatcacaatacaattcaagcaactttcaatattgagggtgaaacagttaatctcacttttatcattgatgaaaatggtagagttttagaagtaaaattaccacgttggggaaatcaaaccatagataaaacctggcaatatataccctttgggggtaaatttgcacaagaaactagttttcaaggttatactattccttcccaaataaatgcgggatggtggttaggaagcgaacagtataatggtttttttcaagcaagtattgaggaagcggaattttttttaagttgtttttaagcatttgggaaagtttagatgttaaaatattatcaaagagccaaatttatggaaatgtaaatactcaactatgactaagattattttagaagatttagatcccatgatcatcgagactttaaaaactcgcgccgaaaaacatggtaactctttacaggcagaaataaagacaattttacaacaggtaattcaagcagaagcggaaaaaataaaaagttccgaagatgagataattcagcaaaaatctgttttaatgctgcaacaaattgaaaatcatgctcgtctaaatggtaaagaaattaattcatttagcaatgttgccaccatcataaatgaacctgaattactagaaattaaaaatcaattaaaagaattaaaacaagaaatgtctctgggggaattatccattagagaagcaagagaagaaggaagaagatattaatgttatttgttttagattgatccgaatgtataataattttgattttagatgtttttttaagagcttattggggtaatttctctcaaatctccctcgtaatattcgcccgatattcatctttatattcaataaatatatctaatgctgtttgtaaatttaccctcgcttcttgatcattttcctgtaagtgtgccaatatacctaaattttgataagttaaggcttgagaatagcgatcgccatattcgattttgatagctaaagcttgttgataaaattcccgtgcttgggcatattctcgcatttcttgggctactcttcccaactggtggtaagttccagctgtttcatatctatcctcatattcgatatagatagctaaagcttgttgataaaattcccgtgcttgggcatattctcgcatttcttgggctactcttcctaactggtggtaggtactagcttgagaatagcgatcgccatattcgataagcatagctaaagcttgttgataaaattcccgtgcttgggcatattctcgcatttcttgggctacaattcccaactggtggtaggttctagcttcgttatcgtgatcatctaattcttgatcaattgttagacagagttgataatactttctagctgctgaaaaatgccgtaaattcaaataagcattacctaatttaaataaaacataaccttcaccattacggttttctaattcttgggcaatatctaacccttgttgataaaaatcaatcgctgtttcacacttcctttcctcactataagcatcaccaattttatttaaaacctgacttttaaaatttacatctgctaatttttccgcaatttgtaaagcttcctctaaatattccctcgctgtttccggttgatgctgactaatataagctgttcccaactccaataaaatattcccatacctgcgtaaattaccatcatttacttgctcacaggtaggcttatattccatcaataaccgttgtaaaatcccaatcctttcttgcttttccggtggttctactctgtcaattttgatttcagcttgcaaagtttgagcaatggcattttctctggttttttctaaagttttaaatctaaacacaccagaacgccaagcccaaaagtcaggggcaaatttagctaatctattaatagcgtaatcaggtaaaataaataaaataggatgaggtacggtttttttataagcatcccggacaaaatttaaatcttgtaaaactggcggatattccccagaaagaccaatagatttttctaaaccttgaataattaatactaactttttatttgcttctttttcaacttttggcaattcctgaataattacatctcgcaaaaatcgcaaattcggatcaggaaaattgagagttacaaattgaacttcctgacatttataatcggtttttaaagcattaattaataactctgcatcgggaggaaagttaatttcaataaatcccaaagttaacttttcggaaaagtccacgaaagtcaacaattccgcaaaaatatcctcattcaaagcgataaattgccccaattcaaaattaaaatcaggttgtgatttctgccagtgcttgtttgaagaattcattttgcattaccactgggttaggataattccatcggttatcaccgttatattctaaaaccgaagtattaaacagcattaactgtccaatatcatctttactcacatctttattaatacaaacttgcactaacaatggataatggtcattgggaataaatctttcaaaactaaattgttgttgtttgacagcataaacaatatcttgagcttgaattttatcatgatcattagtgctggcacgtaaacaagcagccctcatgatttgcataagttgacgtacatggccaccactagcctttgctaattctagcaattcattacgggaattaaacacagcatcaatatctactcttttttcaattaaactagctactgcctccagtcctgtttgattatcttgtaaatgggaactttgccgatcaaattggtaaatattcaccattggtacaatatgaggattaccatcaaacaaagataggggattttttggcgaacacaaaaccgaaataggaactgtataaataattgtacaatgcagttcttgtaattgtgccgcatattcaaaaaataaatgatctgcaactccaggaggaacacgatctaagttatcaaaaataatcaataaacctttatagtctggatattttttccgcaatttagcataagcgtcatctagcaaaaggttaatatctgctttgagtcgagaaatatctttttctaaagtttgccgaatagaagttttttgtttatcagatgctttaatctgtgccaacaatttaaccattaatttagcaataaatggcgcatctgcgcctaagctggcttctgattctacacttacagatttttctacactttcttcattttcttcggtaatttctttaaaccaattttcaaaactttttaataatctttcatcaaattttaaacctaatttccgcaaagcaaattcaacttgtttaatgactattaaatataaatctgtgaagttagcatcattaatatctgtttcttcattcacttctaaataaatcacatgataattttcctcccagatattttgaatcctttttaactctgtactttttcctgaaccacgatgaccggtaaataaaatagtagtgtaatttcctgcttcctgaaaatccaaaattgtacttacacccttaacggctgaagattttcgcactgctgataaatcaacatagtatttttctatatctggaccttctagcggttctaaactacaagcattataagcagctttgagagtattagcacgttgaaaattaagctgattcatagatatttttattgattttatcatatcaatataattttacaagcctaatatcttagcctatttttaaaataaaagcaatatagcaatcttgaattaagctgttggacatttaacttgcatattatctaaaattgaaactcttgtggggtgggcatcctgcccgccttggtgcaaattaaaggtttaagctgatgtgcagctaaactgtataattaaaaaacctgaagttacagtagcacaagcatcttgcttgtattaattattcaagttaaaggcacaacaaacagcttatttataaacacgaaaatacccaacttattcaagaagtcagagatttaaaaatatcatcatttgttatcccttaactgaaaggtatagaaatattgccttctgccggattttgtctatttacgggatatttcatccactgataagccacaaaaatcaacaataacccaatcaaaaataaaaacaccatcaaagcaatttgataccaaataacttggggtaaaagtaaatctaaaactaggtggattaaattcattacaccataaaaaatagttaagccaaaatgaataactcgataacgtttattttctgtaaatgtattcccaataattgctaacatcggcaatataaagaagcctaacattaaccaaaaaatacccgatacttcattaagtgatgttgctggttgggattctactacatctaacccgtgaaataatggcattaaacccaactgtgtatgaaacaacgtacctaataaaaaaactatccatagattaataattttttgtctataattaattgccatttttcttgcaaaattactacattttataaccaaatttacgcagtaaatcatgacgtgattttatctcctcatttccttctacacccttgggtaaaaatccatcaatcacaccaataataccccttccttgttcggtttctgctaaaattacttgtacaggattagcagtagcacaataaatattgcaaacttctggacattgtttaatagcattaagaaagtttatcggataagcatcttttaacacaattaaaaaacagtgtccagcacttatagatttggcatttttagtagctactgcttgcaaagtatgatcattgccagccattctaattaaacaagcggcggatgcttcacagaaagcaataccaaatttaacctgtgaggatattcctaccatgatttcatataaatcctctacggttttgataaagtgagtttgtcctaaaatcaggttacaacctacaggaatttctaaagttacggtttttagttccattttgggttacaatttgatttgttaagtgtagcaaagtatcagtttatggaacgtcaagcattgaaagaaaaattacaagtattaattaaggaacttaaaaaacaggatgatggttctcctattactaatttaaagattgacccaaagaaagccgcagaaatagaaagtttaacagttgaattagaatatctcaatccccatcctcaaccactccagaatgctattaatttattaaatggagtctggcaattacaatactctacagctagagaaattcgcgctttggattctctcccattaggattaagaataggtaaagtatttcaagtaattaatgttgctgatgcacaattttttaaccttgcttatgtcaaacatcccctaaaatttatttcaggatatgtaaaagtaacagctagatttgaacctgatttacctcaatctaacttaccagataagagaattaatgtttattttgataaacgttatttagcgattgataaaattataggtgttaacactcctcaactaaatccttttaaagttgtagatgctaaaggtccaaaaggtagagttgcaactctggatattacttacttagatgaaacattaaggattggtagaggaggtgatgaaagtttatttattctccagaaagctaatgatttacctgatttacagcagattttttgacaatctgcgccctcaagggacgcagattgtgggttcaaagagtctacttagattagattcccaatttttctaacactggttttgtggaaacaatgtgacgctctaaacccagtaattcaggactaactcctaaagccaaagcaattaattgtggtaaatgtaaaataggtaaacctaattttttaccaatcaccttttctacctctggttgacgagaatctaaattaagatgacacaggggacaaggtgtaacaatacaatcagcaccacttgacaaagcttcttgaatgtgcatacctgccatttggaaagattcggtagtagcatagctagagagaggccaaccgcaacattgggtgctgccacgataatatatgggtgttgctcctatagcccgaaacacattttccattgcttctggttggaatggatcatcatagggcatggatttttgagcgcggaggagataacagccataaaaagctgcacacttgagtccgcttaacttgcgggtgacacgctggctgattttgtctaaaccataatctgtaaccaaagcgtaaagtaaatgtttgacttctgtactaccccgataaggagaacaaccttctttttctagtaagccattaacttgattaatataagcagggttagttccttggcattgcttgagacgttcatcaacatgaccaatcacaccttgacaggtgctgcaatgagtaagaagaggtagatttaattcttctgctaaagctatattccgagcgttaactgtatcttctaacaattgagaatcttctttaaatgtaccagaaccgcaacaagcagcttttttaagttcaatgagttcaatacccaaagcttgggtaagtgattgagtagacagataaagctcccgacaagctccttgagcaacacaaccggggtagtaagcgtattttaaggtttgagatagcataaaattaagttttgtttacaggcgtagcgatcgccctggtaagacaaatttagcagtttcattatctcccaacataaggcaggggagcaggggagcaggggaagcagggggaaatatttgtattttcccaatcaccaatcacctttttctgataactgtactcaggaacaccctttccgataagatgtatatgctcaaagcaagattgcccataaagagcagatcatagcaactggttaaggacttttatatatgagtgaaacaaaaactacttttgaccgggttaaaaaagttatcgtcgatcaactagaggttgatgaggagaaagttgtaccaaacgcctcatttacagatgatttaggggctgactctctagatatcgtggaactggtaatggcttttgaagaagaatttgatattgaaattcccgatgaagccgccgaaaagattttaacggttcaagaggtagtagattacatcgagaaaaacgctccttctgactgaaaaatttctgagtcctgatgagccagtgcattgatcaggtaacgcagtcctgggaaactctcctgtcagggactgcctagccatcaccctcagccaaattgtagcaactaaatttgctctgtgctgagtatgtatatttctgtgaaaagcactaagcataaatgtaatgctggctcaggactcaaaactcaacactctataaattgttctgcttgctgctttttcgtcacctttaactgaatcatgacagactataaacgtaaacgcgttgttgtaacaggtgtaggcgcgattacacctcttggtaacaatccatctaaatattgggaaggactgttaagcggacgtaatggcatagactacatcacagcttttgatgcttctaagcatgattgccgcattgcgggggaagtgaagaacttcgatccgcatgaatacatggagcgcaaagaagccaagcgcgctgatcgttttgcccaatttgcgatcgcatctgctaaacaggctatatcagacgcacaattagttatcaatgacctcaacgccgagcaaataggtgtcatgatcggttcaggcgttggtggcattaaagtattagaagaccagcaaacagtctatctaaacaaagggccagaccgctgtagtccattcatgataccgatgatgattgccaacatggcagcaggattaacagcaattcatactggtgcaaaaggtccaaactcctgttctgtgacagcttgtgccgctggttctaacgctatcggtgatgcctttcgcttaattcaaaatggatatgcccaagcaatgatttgtggcggaacggaagcagccgttacaccattgtctgtagctggatttgccgcagccagggcgctatccacaaaaaatgatccagaaaaagcttgtcgtccctttgacaaagatcgggatggctttgtcatgggtgaaggttcaggaattttaattctggaagaattggaacacgcaatcagtcgtggtgcgagaatttatgcagaaatggtcggctatgggatgacctgtgacgcttatcatattacttcccccgtacctggtggtttaggtgcagctagagcaatggaactggcactcaaagatggtcagctgacaccagaaatgattacctatattaatgctcatggaaccagcaccccagccaatgatgtcacagaaacggcagctatcaaaaaggctttaggcgattatgcctataagatagcaattagttctaccaaatccatgacaggtcatttgttaggtggttcaggaggaatagaagcagtagctacagttttggcgatcgctaatgaccacatccctcccaccatccacttggataatcctgatgagggttgtgatttagattatgtaccccataccagccgcgctcaaatcgtagaggtggctttatccaactcctttgggttcggtggtcataatgtcactttggcgtttaagaaatatcgctaatggtgactggtgattggggattggtgactgggaaaatacaaataatttccccctgctccctgctccctgcctcctgcctcctgcctcctgcctcctgctccctgctcccctgcctcctgcctcctgaagtgaccctgtggaacatattatatatatcattcccagctaaaccaagggtttggcatgaccaaattattagctctattcatcacctaaaactcagaagatcccgcttgtccttatgctagtaggaatgggatgatgtaaattgtgggatcacttgataatgaacccaaaaacagaaagctacaaagagtcctaacccatcgttaacaataaaaaattatggctgttgcaaccaaatccatcgaagaactttgtattaactcaatccgttttttggctgttgatgccatagaaaaatccaagtcgggacaccccggactacctatgggcgctgctcctatggcgtttgtcctgtggaactccttcatgcggtataaccccaaaaatcctaaatggtttaaccgcgatcgctttgttctctctgctggtcatggctcaatgttgcagtatgccttgctgtatctgatgggctacgatagcgttaccatagacgacatcaagcaatttcgtcaatgggggtctaagaccccaggccacccagaaaactttgtgacagatggtgtggaagtaactactggtcccttgggtcaaggtattgctaacgcagttggtttagctttagcagaagcacatctagcagctaagtttaacaaacccggtgcgacaattgtagaccattacacctatgtaattctgggtgatggttgcaacatggaaggtatttctggtgaagctgcttcgatcgctggacactggggattaggtaaattaatcgccctgtacgatgataaccacatctctattgatggttctaccgatgtagcttttacagaggatgtttctaagagatttgaagcctacggttggcacgtacttcacgttaaagatggtaacaccgatttagaaggaattgccaaagcgatcgaagcagcaaaagctgtcatcgacaaacccaccatgatcaaggtgacaaccaccattggttatggttctcccaacaaagcaaataccgcaggtattcacggtgctgctttaggtgcagatgaaacagcattaacccggaaaaacttaggttgggattatgcaccctttgaaattcctcaagacgttcttgatcacacccgcaaagcagtagaacgcggtgctgcttacgaagcagactggaaaaaaaccttaactgaatacaaagctaaatatccccaagaagcggcagaatttgaacgtttcctcagtggtgaattaccagaaggttgggatcaagttcttcccacctataccgccgaagacaaagcacaacccacccgcaaacactcagaaatctgcctcaacaaactaggggttgttttacctgaattaattggtggttctgctgacttaacccactccaacctcaccgaactcaaaggtgctggagacttccaaaaaggacaattccaaaaccgtaacattcactttggtgtacgggaacacgcaatgggcgcgatctgtaacggtatagccttacatcgctctggtttaataccctacggtgcaactttcttaattttcacagactatatgcgggctgctattcgtttagctgcgctctctgaagctggttcaatttgggtaatgactcacgactccatcggccaaggtgaagacggtcctactcaccaacccattgaaactttagcttctctgcgtgctattcctgatttaacagtaattcgtcccgcagatggaaatgaaacttctggtgcttacaaagtagcgatccaaaagtctaaagaaaatgcttccactctcttagctttcacccgtcagaacgtccccaacttaggtggtacatctgttgatggtgtggctaaaggtgcatacaccattgtagattgtgctggtacaccagaaatcattttaattggtactggttcagaagtgagcctctgtgtaactgctgctgagaaactaaccgccgaaggtaagaaagtccgcgttgtttctatgccttctacagaattatttgatgctcaagatgcagcttacaaagaatctgtactaccaaaatctgttacaaagcgtttagcggtagaagctggttgcagttttggctggcataaatatgttggtactgaaggcgataccgtcagtattgatagctttggtgcttctgctcctggtggtacttgtatggagaaatttggctttaccgttgataatgtgttagctaaagctaaggcattgttaggttaattaacaaaagaatatttctcttattttctggggtgggatgaaaatcctgccctttttttgtttttgtgatttgcaatacgaattgacactctgcgtcctaaaggagcgcagattcttgattcaacgttttcatattcattattgccaaaattaccaaaaaaatagtcggcttcagccgacttttgttatgagactgggaattcattcccagacggttattcattttcaaacagttagattaggaagattggcgatcgcagagaaaacactttttccttggtttttagctctttctaaagctgcttctcgataaccttcttgtcctggtttaatactaataccatcatctctcctaatagtaccttcgttatcatctgtagaaaaaatacccagttcattaacaacattgaaggtgttggaaacaagaattactttgagtttgacggtttcgccaactcctctaatagtaaaaatgttgttgttgatattaggagctagtgcgattttaccgtattgagggacaatgttttttgataattctaaaatccctaattttataggaattgttgtaccaccgacactgaaatcattatcattaagtaaagctaaagtattgcgatcaactaaagctaaaccctctaacttttcaactcctgtataacctacctcagcagcattaacaatcagttgtttactaacaacagaaatccccgcagcaattaattctgcttctgttaactgctcaattgttttaccatcaggtaagttaaagttagcaggattattaatatttgtcgcccctgctaaatcaatttgatagatgagtttgttagaattttcattacttaaatcatctctttcgacaacagcaaatttgccaccacccaaggaaacagcatcaccaattttatcagttctggcgttaccagttccagtaatatcatcaagtaaatagagatattcaccagttacctgttgagtagctacatcaaattctaaaattcttaaatttcgagaatttctagaatttgcatcattagtaacatccggattatcaattgcactttgaataaaagcataaagcttattacctgccaaagctacagcttcaaaaccccctacttatatcaatttgtaggttgggttgacgtaaggaaacccaacatcaactaataataaatgtgttgggttgcatttgatttaacccaacctacaaattactattaattttcaaagataccagtatcaataatagctttgcacaatttatcaatgacggggactgaaacactatttccaattagtttcatccatcttgatctagactctggtaatttaaaatcatggggaaatccctgtattaaacaggcttcgcttttagtaatttttctaaattctcttggttcataaacttctttgatgaatttgtttttaaaatcatcatgatttatagctgcaattgtttttaaggtgataaaatcatttgtatcactggccactaaagtggggaaaatatcagaagttggcaaaaaaatacgactaacaccaaataatcctgtactgattttcgtatttttaaaatcatagcgaatttccacacactcaataatatgcttttgtttgagagaatcaattgttttttggattgatattttttctaatttaaacactttttggatttttaaattatcaattattatttctccattagtagtaaatgaaagcagtatttcttcagcttgagtcaaattcttaatattatctttaatattagaccgtttgatcataaaacgatattcttctgatttaaaaatttctaatgctaccagttcatcaatttctggttgtgtaattgatgaatctagactttgaaaatgtgctaatgataatgggtttccgtctaattgtccgtaattacttttgcgtctgtttttaagtagtaataaacaaatatttttctgtctttcagtagtttcaataatatcccatgagtgtattgtggtatgaccatttctcaggtcattaaataaaaagtaatcattaaatccgaagcattttactaaaaatgttgtatggatctgtttttgctccctctttccgcaacgtattttcatcatttatccaagcataaataatgactttttccgtactactataacgaaaaaataaacgaaatcttctattaaatttcgctcgaaaccaatgctttttatctgttcctaatgttttaccttgcctaaattctggtgcgctgggatcttcaggtattctcctaaaaataagctcattaatgttgttgagaaactttgtaactggattttgctgatatccttcagggtctttttctttaagttgctcaaccttaatgatcaatttattatatttctcaccaaaggcaggatgaatttttaatgtccacccattaacattcatacaaacatgaaatcctctggtaattcttcatccagatcagtttccattccttctgtaagcatagatgcacgatgatatatttcttctgtaagtggttcaatattactgggattttttttgatatctctagcaaggaaatttaaaaacgccttgacaaaataatgctttgccatagttggtgacaatattctattcattcctggtgtttctccttttttctgatgaataattatgtacttactggaacgatttacaccagtgcgagaagcgcgtatatttttgcgaaccctcagtttcatgattctaattcgtttgtgttgaggtaatgatattgatacatatattcttaatgataccatattttttaaagactgggaattaattatgtaggttgggttgacgcaaagaaacccaacatcaactaataataatcaatctgttgagttgcatttcatttaacccaacctacaaactaatattttcagaatcttcatctgaaagcaaatatttttcaatttttttacgttcttcttccagcgattcagaataaataggttttttccattcttgtctagaagtcattacataaagaatttttttacccttgtatttaatttttctaattaatcctaaatcacaaagatttttaactgaatattgagccttacgaatactcattttgcatatatttttaatgttttcaaaatttgattcacaagaacctccacaagctgctatatgagcataaattctaaaatcataaggatttagcccatataagtctagtattgcatgaacgaaaattggttgtgatttttcagtttctattttctccatttcttctaattttaatggtgttgtattttcagtttctattttctctatttcttctaattctaatggttttatgctttcaggttgtttccatttatctggtgattctatgacataaatatcagtggttaatttacgttttgtttttttaattaatcctaattcacaaagatttttgagcgaatactgcgcttttcttacgctcatttggcatattgtagctattgtatctagtcttgagtaacattcacctctatgagatatatgagcgtataatctaaactcatagggatttaagctatatacgtcaagttcttctgatactagaataattggtagtttttgtcttttttccattctcttcttgggaaaacaacattatgcacattatacatctaaagtaaaaatcataaattataatttacttctaaatagtaaacattttactttatatgcaggaaatgctttttataaaatttttttgcacaaataccttgacacctcaaagtaactctgttaacctaaaattcagagacaccagaaagccactggttgcctatcacagatgaagccattattcaatgtaattcgttaagcttaaatgcttttaaatctctgacttttgctttcagataaaatttaacttgttacatggagtggggaattactgcaaaaaatagtcgtatgagtggcttgacaaaaatcgtatagtgatttagtctcaaataagacaagatagcaaaaaggctacctggtctcaacaggtagtccttcacgagaagcagagcttctagctaattgtttgaaaataaaaaattaaacttccaatataaggagtctaactgctatgaattatagcattaactttgaagataatcaatatcaaaatcaagatattgaaagacttcgcttggttaatcaatacctggaaaaaatcactgaaattgatcccagtaacaaactcagaagtttgcaaagattagatcatttgattggtcttaataatgcaaatcaagatttatccgagtcagttgaatcacagaaattaactaatctgttgcatcaagcaaaagaagcaggattagacattaacgaagatttgataacaacaatcaaaaatgcacatcctgatgatgtcttatttgcaatcaagtctctaaagcgtaaaagccaaaaagaaccagtcaattatccgaacctctattttgagaaagttctagaagacagacaatcaaaaagatttccgggtaatatggctgcataagtagtttttggttttgcgctttagtagtaagtaagttgggtttagtttttgaacccaacctacaattttttaattcatacctttgtgattactcaaaaaagtagtcacaaccaaaaaataaaaggtgggttaaactttcgccaacccacctcaaaaaactctccgcgcctctgcgtctctgcgtgagaaaacctaacccaaaacgaaattcaccaacttaccaggaacaacgatcgccttcttaatttccttcccttcaatataacgcttcgccacctcagactcccgcgcatacttctccatctcaaccttatctaactgcgaaggaacttgaatagcaccgcgagttttacccataatttgaattaccaaagtaatttcatcagctatcaaagcagcaggatcaaaactcggccaaacttgagtatgtaccgttcccttattccccaacaaatgccataattcatcagcaatatggggcgcaaaaggcgctaacataatcaccaaagttagaataccttccgcataaattggcgaattattacacttagcatcagtcaacgcattacttaacttcatcaattcggaaattgcggtattaaattgatattcttcctccacatcttccgtaattgcttgaatcgctaaatgaatcgctctccttaaatctttttcctctttacttaactgatccaaatcagcttgtttcttacaaactcccgccgcagcgtaatcagtaaccaaccgccaaacacggtttaaaaatctaaattgtccctcaacatcagcttcatcccattctaaatctttttctggaggtgctttaaataaaatgaacatccgcgctgtatcaatgccatatttattaatcacatattccggtgcaacaccatttccttttgatttagacatggtagcataaaccctttctaaaggttctccagtttgcggatctacaggattatttgcatcaactaaatttgaaggaatccatttatctttaccgctttttttcgggttcatgtatgttaaaccctgtaccattccctgagttaataacttttgaaatggttcatcaaaattcaacaaacctctatctcttaatactttggtaaagaaacgagaatacaacaaatgtaaaatcgcgtgttcaataccgcccacatattgatcaaccggcatccaatcatttactctaccaccatcaaaaattttctctgcatttgtggcatcagtaaaccgcaagaaataccaagaagaatcaataaaagtatccattgtgtcggtttctctttttgctggattaccgcaacttggacaaggaacatttacccaactttctaactgtgctaaaggtgaaccaccacggccacttaattcaatttcttctggtaattgtacaggtaaatctttttctggcactgggacaattccacattcaggacaatgaataacagggataggtgcgccccaataacgttgacgagaaattaaccaatctcgcaagcgatattgtactcttaatttaccaatgttttgtttttctgcatattcagtaattgcctttttagcatctattgaattaatgccattaaattcacctgaattaactaaaattcccggttctgtataagctgattttaaattttcatccgctccaatttcgggaacaattaccactttaataggtaaattttgctcctttgcaaatttgaaatctcgcacatcatgggcgggtacacccatcaccgcacctgtaccatattcatagagtacataatctgcaatccaaatcggtacttcttccccagtgaaggggttgatagctttccccccggtaggaataccccgttttggtttgtcttctgcggttctttctaattcgctttggttgcttacttctttgataaaagcttctaccgctgttttttggtctgaagtggtgacaagttgagttaaagggtgttctggagctaatacgacgtagctaacgccataaacggtgtcgggacgggtagtataaacagcgattttttcatctaaaccgactatgggaaattctaaatatgcaccagtggattttccgatccagttagcttgcattactttaactcgttctggccaaccaggtaatttatccaaatcatttaataattcttcggcataatcggtaatctttaaaaaccactgacgtaataatttacgttctacaattgctccgctacgccaagaacgtccttcactgtctacctgttcgttagctagtacggtttgatcaatggggtcccaatttacagccgcttctttttgataagctaaacccgcttctaaaaattgtagaaaaatccactgtgtccacttataataatcgggggaacaggtagccaattctgcatcccaatctaaggataaacccagacgctttagttgctgtttcatctggtctatatttttatatgtccattgggcaggaggtacacctctatcaatggcggcgttttctgcgggtaatccaaaggcatcccaacccataggatgtaatactctatacccttgcatttttttgaggcgggcgattacatctgtaatggtgtagttacggacgtgacccatgtgtaagctaccagatgggtagggaaacatggaaagcgcgtaaaatttaggtttggttgggtcttgattggttttatctaatcccaattctaaccatgtttgctgccatttttcttcaattgcggccggggtgtatgatgcttttggggtggactccacaattaaaaactcctaatatttttcctagtttcgctattgtggcataatcctagatatcaagtccggctaatttatgcagtagttatagttgttctagacttttgattaagtcttccttctccaaaacacgatcatacatctctggtctgatctctcggctgtgaatgtctttctttacagacaaaatgaactttacactacagcaattatttttatactacagcatagtgactttttggctgaagtgctaaatgtataaaaattttcttaatccctcatctacctgtgcttgtaaatgatttgatagctgaaactgtcacctgtcacctacttcaatttcccataggcataacgagttaaactaccctcattcagattattccacgcatagataccatctctaaagggtttccaaatttcataaaccgctttaaaatctgcatccttcgccgcaaactcatcatacaaagcaaaagattctttttccgctgcttctaatatttcctgactgtaagcacgcacttgtacccctgcttttaatagtttatctaaagcttcactattacgtgcatcataacgagctaacattgtggtatttgattgataggcggctgtttctaaagctgcttgatattgaggaggtagctttttccactcatctaaattaatttgtacttctaaggttggacccggttcccaccaaccaggataatagtaatatttagcaactttatttaagcctaatttctcatcgtcgtagggtcctacccactcagcagcatcaatagcgccggtttgtaaagcttggaatatctctccccctggaagtgtctgtactgttacccctagtttggacatgacttgtccgcctaaaccgggaatacgcatttttagtcccttgaggtcattcagtgttttcacttccttgcgaaaccatccccccatctgtgtacccgtatttcccgcaggaaattgaatcacattaaatttacgggcgtaaatttcctgaagtttggctaaaccgcctccttcatataaccaagcgttttgctgttgggcattcaatccaaatggtacggatgttccaaaagctaaagcctgacttttcccaatgtagtaataagctgctgtgtgtcctgcttggactgcaccttgagaaactacattcagaacttctaaaccaggggctatttctcctgctgcacggggttcgatgataaatttaccattggttagggctttgacccgttctgccaaaacctgcgctccgccaaaaattgtttctaaggatactggccaactggtggccatttgccatctaatggtgggtaggttgctagtgtctgcttgtccttttgtagctgggtttgtggctttttgacaaccaccaactattgccactcctgtagcagcgatcgcactttgagataatctgttaacaatagctcgacgtttcataacagttaatactattgacctaaaattaagatgttcccacaatatcataatgatgcaacaatatgatgcaacaattcagaaattccgatcagatttattatttctgataattttgtcaatttcccatcatttcatattagtataaaaatattaagtaatttctaactaatatttaacagctatgttagaaactgttttggccaagcctagcattaaactgccacccacccaggcagaacttccttgtgatgatggtatcccgatggagacacaaagacataaattacaaatggatattttaattgatacgattcagccttggttagatcaaagggctgatggatatgtaggaggcaatatgtttgtttactacagtttagcacaattaaaaaatcaagattttcgcggtccagatttctttgctgttttaggtgtgccgaaaacagaaagattatcttgggtggtttgggaagagggaaaaccgccagatgttgtaattgaattactgtcagaaagtacagctaataatgataaaaatgcgaaaaaattgatttatcaaaatcaaatgcgggtatctgaatatttttggtatgacccttttaaaccagatgattttgcaggttttgatctaaatagtggtgtatatcaacaaataccattaaatgatcaaaagcaactggtaagcaaagtcttaaatttggctttagtgcgttggcaaggtaagtatagaggtgttgaaacaacatggttacgctgggcaactttggatggtgagttatttcctacttctcaggaaatcgcagaaattgcaaaacaaaaagcagatgaagtagaacaaattgcagaacaagaaaaacaacgtgcagaacaagaaaaacaacgtgcagaacaagaaaaacaacgtgcagaacaagaaaaacaacgtgcagaacaagctgaactgcaattaagacaagttgcgatgaatttattacagaatggaatgtctgtagaacaagtatcacagttaacaaatttggatattttcgatgtggaaagattgattaattaaatagtaggggtttagcagtgctagacccctacaggactgataaatagattaaatattgtgaaatatcatcttgtaaaaaattttttataactgaattttgaacaatatttaaaggaggcaggagttgaaaggcaggaggcaggaggctgtcttagtgggggatttaaacccacctctaatcgtagaccgcccttgcgggttcgctagtcacctacagaagaaaaccttcttgcagtgctggctcaccaaatcaccagattatggcggtggacttaaacccaaatgggcgagtcaaaaaggctttattcttaattcaaaaattttccttctgcctcctgccctctgccttctgcctcgcccgatagcgcagcgtggcgttagccatagggcagttaaagtattattgagacttaatcctgcattctcaattcttaccctgaatttattatgttctatgcgtaactcaagaagattcaccttcatcagcaagctgttaaaagtatcccagtttattgacaaatgtgctgataaattgggatggttatccaattggctagttttactcaccattggcgttggtttctttaatgttgtcgcccgttatctagggcgcttcatcggagtgcaattatcttctaataccttattagagctacaatggtatctattttctctcactttcttactaggctttgcgtacattttacgtcatggcgaaaatgtgcgggttgattttctctatactaatatgagtgaaaaaagacgcgccttagttgattttttaggaacaattttatttttaattcccttttgtttaattggtatttgggtgacatttaacccagttttacagtcttggggaagactaagtgatggtacttggggaaattgggaagtatcttctgatgctaatggtttaccccgcgctcccattaaaacaatggttcccataggtttattatttctgcttttacaaagtatttctcaaacaattaaatatgtagccgtactattaggctatgaagaagtagcagaaaaaattcgtttagaaacttcagaaaatatcaatattgagtaggtaaaattatgggttttcaatggttatccattttcatgtttgttggctttttcgttatcttaatgagtggctatcctgtagctttttcctttgccggtacagccattgtttttggaatcattggtacagcattaggggcttttaatcctgcccgtctcctactattacccaatagttggtttggaacaatgtccaattttactctactagctattccgttttttgtgtttctgggtgcagtattagaaaaatcaggattagcggaagaattattagaaactattggtattctttttagtcgtgtcaggggtggtttagccttagcagtcgttttagtaggaactgttttagccgccacaactggagttgtagcagctacggtaattgttatgggaatgttatctttacctgtaatgattcgctatggctatgataaaaaattagctgctggggtgatagttgcttctggtactttagcccagttaattcctccaagtttggtattagtaattctcagtgatcaaattggtgtttctgtaggagatttatttttaggggcattaattcctggtttaatgttatctggttcttatattctttatatattaggattagctgtttttaatccagaaaaagttcccttgattcctgcggatgtggaaattcctcaaggtagtcaattaattaaaaaagtttttaaagcagttattccccctattttcttaattcttgcagtattaggaagtattttctttggtgttgctactcccacggaagcaggggcagtaggtgcagttggagctactatcctcgcagcttttaataaacgtttgactccccaattaattcgtgatgcggctcattctacagcggtaattactgctttagtggtaatgattttattttcttcttcaatgtttagtttggtgtttgatgctttgggcggaaaaactctgattactgaattattaactggtttaccaggaggatattgggggtttataattgttagtaatttagcaattttcgctctgggtgtttttctagagtttatggaaatatgctttattgctatgcctttatttgtacctgctgcccaagctttagatattgatatggtctggtttggtgtggtaatggcaattaatttacaaactgcttttatttcgccaccagtaggattttctttgttttatttacaaagtgttgcccctaaagaggtgagtacatttgatattcataaaagtgcaattccttttatgattttacagtttattgttttgttaattgtgattaatttcccccaaactgttcgctggttaattgatgtttccgcaactacgggaacttgaaaaaatagaagcggggtgcgggatgggtaacagaggtaggtattttactttgtcgtgagggcaatacaaggaaggacggtggacaagggggtaaaaatgtgattaaaaattcaattctggaaactgttccctgtttcctgttccctagcctctaacgatcactttttcggcaagccctaactaagcaaccacagtaatgaatgtttttgtatacggtactctaaaaccatttgaagctaattatcacctgtgtgaacataaagtattaacatcaaaaaaagcgatcgcgttcggtaaaatatatgctttaccaatgggatatccggcgatgacactcggagatgagaaagtttacggttatttgttgtcttttgctgactcccagattttacccgcattggatgatctagaagattaccagcccacaaaaccagtgtcagaaaatctttacactagggaatatatcgaaatttttgatttagaccgcttgtctttaggttgggcttgggtgtacttgatgacgatagaaaaggtttaccaactccgtggtattcctcaacttgatggttgttggaatagttaacttcacagctttgaagctgtaatctgttacctgttgcctgttctgtaatctgtcaactcattagttaatgtttaactctgaatcttttttgagagtttttgactcagtaactggttttcttggagaagctactgctgttttgggaatttcaatgactgggttattcaaagctaccattaacggtgaggtaggaactgctggctgacttgttaccgttattggctgtattttctgttgtgccagttgcaacttggatgtattaccgggaataaagccagagattgagccgatgatacaagccgctacagcagcacctccaaacatccaacctagttggtaacggtagctcaagcgtttccagacttgttggaatgtcgcttctggagactgtgcagatgctggtatgggcatcgtttttacaccctgccgcagttttaaaagtcgtgcatacagacacttaactgattcatctgtggacagccattgttccacttgcttacgttcggcagcggtaacttcgccatctaggtaagcacttaataactcaaagcagtcagtttcgttgtgttgtcggcaatcacgtttctccatatccttagtacccgttgattcattggtatatttagccattccatttgctatatcactagggaattgggagggggaacggtcatcaaactgagaatcagtattcattttaacgtttttaccaagtcatacacgggtaaacacagcggataaatttgagaatttaagcaattttactgccaaatggtagaaaaaaattgagatttcaccacagttcttgttcttttaaaattctaccattgaattaaggaaagatgttgtaaatttacttaaccatctagataactttgcaactgggtttgcaatctggatctagccctagctattctcgattttacagttcctagagaaacgccagtaatttcggcaatttcttcatagggtaatccttcgatttctctcaggacaatagtagtacggaacacctctggtaaatcggcgatcgcatctcgcagttgttcgtaaaattctctagttgtgagttcttcctctggtcctggtgtatcaccagcaatttcccaatccatctcgccgtcgtctaccgagcggggagcatccaatgacagggggctgacaacccgtttgcgtttacgcaactcgtcataaaacaagttagtggcaatacggcttaaccaaccccgaaatttagcaggttcttgtaaacggttaatattccgatagactcgaatccacacttcctgagccaagtcggctctgtcagaccaatcaggagccagatggtataaaaccctatcgacctgagtctgatagcgccgcaacagttctgcaaaggcagctttatctgggcgcagtcctgcttgacagcgtaaaataagatcgtggtttgagagtttgtcaacttgcaccgatgcttgtgaataattggcatcaacagttgaccaggatacagtaatcgattgactcatagatcgtactggctgtaaatcatcccctcctattagactagataattagatagatgttcctgggttaagtgacggatttatgagatcaacacggaaatataaatcaggaattataaaaaaagtgttgagtctacaatgccgagtcttgagtatagggaaaaaaatcagtaggatgtattcacttgaacaactgactactaccccattgacaattgggactggtaactggtgactggtgactgggaagaaatatttaccctcttcttcctgactcctgcacaggcgttcgcgaagcgtgctggaagcatcagcattcgggcgaccaattatcaattttatgaaaaagctattttcctttaagggcgaagcattcgggcgataaattatcaatttttatcacaggttattttccgaatgcttcgcccctacttcgcccctacgactcctgactcctaaaacttctaaattataaagatattgtcagggtaatgagataactgataattattgataaattctttgctaattggctgctgttggcagtccataattaattttaatgagccagatatgtcagggatacacaataagcaatggcaatggcaagaaatgaatctgtagcacggatggtaatgttcctctgttttggcacagcaattttatctctggctgtccattggcacagtatgagaacaacagcccagttaaatccgtcggtatccactacattaaggaaaaattctacttccccgactgactctagtaaaaatatttctccaggtattagcattggggaaaccgctttcggcgcgtcttttccctcttctccatcaaattctactgctgggaaaaaatatgtagctagtgctgcggatacaccaaaaaatacaaagttggtgtttccagaacagatcgagaagcagaagacaaacagcaaaccaaagggctttttctttcgcggtgtggatgattccacgtctgttcaaggttctcaatctactcagacagaagtggtagttgatttaagcgatcgccgggtttatgtttaccgctatgaccaagttatagctagttaccccattgctattggtaaaaaaggctgggaaacacccacaggtagttttcaagtcatacataaggagcatcatcccatttggaaacatccaattacagggaaaatatatgaagctggtactgatagtcctttaggagacagatggattggtttttggtcagatggcagaaacgaaattggctttcatggtacacctgatactgatttaataggtgcagccgtgtctcatggttgcttgagaatgcgtaaccctgatgtgcgaatgttataccagcaagtagatttaggcacaccagtattagtgcgcgactaaaatagcagtggtcaggaggcaggagacaggattcagaataattttagattttagattttagattgagttgacagaaacaatccaaaatcctaaatcctaaatagggcttgctgaataaacccaaaatactcgtaaatcaaaggtttgaggctgatcaggaggaaagaaagtgcaagatttttgaagggcataccttaaaaactgtgcattttgggtctgataaattagaaaatctggggataacagatagctaaaactattccctattccctattccctattccctgcctcaacgaagggactttttcagcaaaccctaattatgaattatgaattagtaattcttaattactaatcaattatctttgttttccaagatgaaggatcaatagattttccattgacatataaaccccagtgtagatgaggtcctgtagaagcacctgtagaacctactgcaccaattagttgaccagctttgaccatatcaccttctttaacattaatccgactgaggtgcatgaaaatgctggttactccttgaccgtggtcaatgccaactacattaccatgaactatgaaaccttgggatactgtgcctactaaagccactcttcctgctgctggggcaactacagctgaacctgctgcaccagcgtagtccagtcctcgatggtagtaatccttggcaaagttaccattatagtagcgccttacaccataggttgtggtcatccgtccttgatttggtctcaggaaaacaccgtcccaatatttgtcaggtgtttgtagggctttaaactctttaactcgttctagttcatattctgttgctttaactccggcttttcctgggggtaaattaatacgttggatgggaaatttgcgatcgcctacgtacacagccaaatttctttgtcgctgtccctctcctgacacagtaacttgtcttactcctggttcttctaatggagtggtaggaataaaagcacggtatttattgggggcaatttcaaaggctggataggtttgttctccaactgttaccgtaggaataccacgctgttctccactttctggttcaattaatacggaaattgtatctcccaattgcactttttccggtaaaatctgtacttctaaagcctctgctggcaagcttagtgctatgggaacagccgcaaaaattcccattaacatcttagtgacactgctgacaccaacacgctgtaacttatcctgaaaattaataacttgagctttggtagtcataggttataaagaaattgagtgagccaaaaccacgcccgataaagtatcatagcaaggcgttgatactttatcgtactaaggaacagtggatgtaggcgaacggattgcccatgcgtggggcagtcatgatatattgttttcaacaggaacggtaattaacctgtataaaaacctaactgcctaacggcaatctgtaccttgacaactaaatctatggggttctacttcttagttctagtattacctggaagtaggtaaaagatttacaggtactagacttgtgttgagcgcacttgtactgagcgcagtcgaagtaagtcgaagtagtcgaaacacgacagagaatttaaactcaaacaaaatttggagtaatccaaactacctcgcccgcagggggaaagtaacgcttggggagagaaccacctctggtttataaactgcaagggatctaagctaagtggactcgctgaaccaagaatctgctctcctttaggacgcagagtgtcaaaaaaatcctcgcttaccattagggcgcactgtcaaccaattaatttttgctaatgccaattgctcatctgtcaccttagcaccagtgagattagcaccacacaaattagcacctctaagattagcatgactcatataagcataactcaggtctgcacctctcaggtctgctccttctaaatctgcatgactcaagtaagctttgcttaaattcgcatccttaagatttgcttctttgagattagctctaccaaagtcactattttccagatttgcttctttaagattagtttttgtgagttgggcgctgtggaaattagttcccgataaatctgcactttgtaggttcaacaaactgatgttgtatgaggcaaaatcccgccttcccttcatataagctgtaagcaaagtttgggaacttaatttgcgttcagcttgagaaccagtgctgttactattaagcagattgggagattgggacatcaactgcttacgctctcttcgtccagcctgtaatgctgaattttctcctaacttagctcgtctagcacgaatcgcatctgcaacctgagatagaccattaccattattgctattattgctactggaaaccgaatcattaaataaaaccgcagaattgtctggggtgttataggttcgctctttaatatcagtatcagactttacatctggtttaactattaatcccttggctaaactttccagatatggttccatctccaacgctctcagtacatctggggctgactggtagcgattgcgaacggaaacttccaacattttttttaacacgctggcgaaatgcccactcacatttacaagctgttcccacaacatttctcccgttgtgggattatatggcaaatctttaggagttttccctgttaataaataaatgcaagtaacacctagcgcataaatatcactggcgtacactggacgcatagccatttgttcaggaggcgcaaaaccaggagtaccaatggcataggctgttaacgctgtctgtcctgatgggttagacgcaacttgcccaacttggttttttacagcaccaaagtcaatcagtaccagcctagcatcttgagagcgacgaattaaattagctggtttaatatcacgatgaattacttttaactcatgaatgtattgcagtagtggcagaatctcacttaaaaactgtttcactcccacttcgctatagcatccagtttttttcacttcctgttggagagtagcaccactgatatattcctgaaccaagtaaaattggttttcctgttcaaaatagtctagtagtcttggtatctgtggatgattgccaatcttacccagggttttagcttctctttcaaataagtcccgtgccatttccaagatatgtggggctgttcctgatggacgtagttgcttgatgacacaactcggttctcctggtaagacttcattctgggctaaaaacgttgctccgaagcctcccaaacctaactgtttgattgctcgatattgaccacatttaccgatcaacaataattgatcgccacaagatagacacctttggctagatgccgaatttttgggctggggacaggtaggattgaagcagtagctcatgcactcttaactcgctgcacgaagaataggtaagaaaatttgactcttattacattaatgttagcaaatggtaaattatcaaaagctattgccgatatgggcttttatgaattatttagaaggcagctagaatagtaagacttgctccagatgtggtgagaagaaaacttcactgtcattggttgtggacataaaggatgtggttgttaaaaaatagggaatagggaacagggaataggtacaaggcaaaagtaagaatttagtttttacccaatcaccaatcaccaatccccagtccccagaaattagagactagaaagcacgtcctttgcagcggctaaagtttgctcaatatcttcatctgtgtgggctaaagaagtaaacccagcttcaaactgagatggtgctaagtaaataccacgctctaacatcccacgatggaatcttccaaacttggttgtatcagactttttcgcatcttcgtagttgtgaactggaccactggtgaaaaataagccaaacatggcgctgatatgactaccacaagcagcatgtcctgtttcttgagcaactttgagcaaaccatcagctagttttttggtgatgcgctctagctgttcataagtccctggtttttgtaataattttagtgttttaattcccgcagtcatcgctaagggatttccagaaagagtaccagcttgatatacaggaccggcgggggcaatcattgacatgatatcccgacgaccaccataagcgcctacgggtaaaccaccaccgatgactttacccattgtggttaaatcgggagtgatgccaaacttctcttgagcgccaccgtaagcaatacggaagcctgtcatcacttcgtcaaatactaataaagctccatgttcgtgggtaagttcccgtaaaccttccaagaaaccagcatcgggaggaataaaacctgcattaccaacaacaggttcaagaattacaccagctatttgatcacggttttcttcaaataaagctttgacagcttctaaatcgttgtaaggcgcagttaaggtactgctggttgcagatttaggtactcctggggagtcgggtaaaccgagtgtagctacaccagaaccggctttaaccaggaacatatcagcgtggccgtgatagcaaccttcaaatttaatgattttttcgcggttggtaaaagctcgcatcaaccggaggacggccatacaggcttcagttccagagttgacaaatcttaccatttcgatgctaggaactgcatctattaccatttctgctaagacattttctagcacggagggagcgccaaagctagtgcctttttctaaagctgcgtgtaatgcgctgattacttctggatgggcatggccacaaatcgcaggaccccaagtaccaacgtagtcgatgtatttgttgccgtctacatcccaaatatatgctccgttaacacgatcaaatactatgggttgtccaccaacagatttaaaagcacgcacgggagaactaacgcctcctggcatgaggttttgagcagcagtaaagatttcttgtgattttgtggttttaattgtggtgtttaccaaggttatctcctataggtggtaattaaattgagcttctttaattaggataggactaaatgggtaatgggtaattgctaatagctaatgggtaatatttttcccaatcatcaatcatcaatcaccaattaccaattaccactttctgctaaactcctgttagcatctgcaattgattaataattgttaacttactctagtttttgtatgtcttctcctgaactactaacgctccaatctgccatccctgtggaaaaaattcgttacgatgacaaaggtttagtacctgcgattatccaagattatctagatggtactgtattgatgatggcctggatgaatcaggagtctctgcaaaagactttggaaactggagaaacttggttttggagtcgttcccgtcaggagttttggcataagggcgctacttctggacatattcagaaggtgcaaagtattcgttatgattgtgatagtgatgctttactgattggtgttgagcagttgggagatattgcttgtcacactggggaacgcagttgttttcatcaggttgatggcaaggttcaaccacctccagcagatatgttatctcagctttttcaggtaatttgcgatcgccgtgatcatcctcatgaaaattcctatacctgcaaattattggctggtggtgataataagattttgaaaaagatcggtgaggaaagcgccgaggttgtcatggcttgcaaagatgatgatgctgaggcgatcgccggagaagttgcagatttgttttatcataccctggtggctctagcacatcatcaagttgatttaaaagctgtttatcggaaattacaagaacgccggaaatagggactggggacacttcgacaagctcagtgcatcgctggggactggggacacttcgacaagctcagtgcatcgctggggactggggactgggtaagagtttttaccaattaccaattaccaatgacccatttattaacgtaagttgctagttctgcaagaaaggctctcaaatctaagtcacactgagctaaattgttactaaaccttgatatttttgtaattcttattatttgcagctattatcctctttagttccacagaatttccacaggaagtttgccagttttccacagatgcttgacgaactaacaaagccttgctggcttactggggattttatgctttgatgactgaactacatcaccaactgagtttttattaaattaagtaacaaaaatatagctctagccctgattatttcgtgagtatttattttttaactaccgatttttaacatttcgcagcattgacaaacccaccccctctgagcggacaatgattcggcttgcttttttattccgttccgacatgagcatcaattttgcacagtgaactcaggtatgagtggggattttatggctggtgacaatacttgaccaataattccttgatggtatgcccctgatttatttgtgggtcgatccaaaatccaaaattcggataaatgcaagcaaaatttcttgatagaccgtatagaagggaaatcttatgaacacaacagttagtatctttacagtgattcccgaagcactccacgaatccctcaaaaactatttagaaacccatcctgagtgggatcaaaaccgagtattaactgcggcgttatcgttgtttttgctgcaaaatggagagagcgatcgctatgctgctcgtatttatttagaaactttgtttcatcaagaacaaaaatttctttgatccaactcttgaaactattccctgttccctgtctctaagaaaagactttttcagcaaaccctaagtattagcactgtgagaggttggtgatagggtgatagggtgatgtaatacagcagacaccctacacgcaatacccttagagttattcgttttgtggattggtagtagattcaaatttgtaacctacaccacgtacggtctgaattaatgctggttgactagcatcaatttcaattttcttgcgaatttgaccgatgtgaacatcgacaactcgcggatctcctacatattcatagtcccaaacctcttgtataagttctgatcgccgccaaactcgacctggatgactggctaaaaaatgcaataaatcaaactctaaagcggtcaagggtactggttcgtcattaagtgttacttctctccgcaccgggtcaatcatgagtttgtcaaaaataaggcgtttttgttctgcggtggtaacaacccgctgtcgcctcaaaattgctgctactctgacctctagctctcccagtccaaagggtttggtgagatagtcatcagcacctttggaaaaaccgcgaattttgtcagtttcatctgtgcgactggtgagcataaggacaaaaacgccatttcggctttgcatctcttggcacaggttaaaaccaatcgtatctggtaggtttacatctagaattaccaagtctgggttaaattgctcaaataaggtgagggcagtcttaccatcttcggcagcttctacttgataattctgttggatcaaaaagcgttgaattaaattccgaacggcagggtcgtcatcaactacaagaatcttggcaggagccatgaccattactttgcacaaaaattcattatgattaacagagatattacgtaaaaacgcattttcccctttggctgtactgaaaaatctacaaggagtagatacgagtatcctgattgttccaataaactgtgatgacaattatgaaagatgtagacactaattttacgagtatcaggtctgcatttcagaatatgtactatatctaccgtatggttttcttgaccctatttgtagctttctgtttcagtttgcatagtgtgtacttagcttagtgaaacagcaatttcaaacgatttcattttaaatcaatatgcgattttatatcattaatcaatatggttatcagaaaataggttgaaaacctttgatggatgtctgtgatggcaatatgttaaagtaaatatggtttaaattcttgagtcgaataaactcagctgtgctaatatcctgattatgaggataaaaatcggccgaaagcactgtttcgattatcatagaacttaaggttgttttttcttcaacaaaagactgctgctgactaggcctgaagtaacacactgccatgagcgatcaaaatccctaccaaaaacttggggtatcagaagatgctagttttgatgaagttcaggacgctcgcaatcgcctgttggagcaacatggtggtgatagcaagggtcgggaattaattgaagcagcttatgatgcgattctaatggatcgcttacgaatgcgccaagaaggtaaaattaaagtaccagagcgtatccgctttccagaaatgcgagttccatctccacaaaaagaaagtccggttactcgtgatcagtcacctgcatggctgcaacgaatattggatcaaccgagtctatcagatgtactcgcaccaggagcttggttcctgggtttaagtgctattagtttatttgttcctgctgccagtgatcaggttttgcaactgggattggtggttggggttggagtcagtatttattttctcaaccgcaaggaaaataaatttggtcgagcagttttgtttaccctggcaagtcttattattggcttaatagctgggggattgattgcagtacctgtattacagcaactagctttgatcaatattacagcaaatcagttttctacggttctgacgtttattttaatgtggttaattagcagctttctgcgttgataaggcaagaggcaagaggcgagaggcaagaggcaagaaaaaataaattaattctcaactcctgaccctttgatctcctgactcctgctatatattttaccctataggataaactaattctctaacactggtggctgaatcttgttgtaatgccacagatgcgatcgcttgggcttctgagatggttaagtgggcaatagcttgttttaatgatgctatagcttggggattgacacttaattcatctaatcccaaacctaataaaatgggtgctactaaggtttctgcggccacttctccacataaccccacccaaatattagcagcatgggcagcttgtactgtttgctgaatcatacgtaataccgcaggttgcaaagcattggctaaagttgctactttgggattagtgcgatcgcctgccatcacatactgacttaaatcatttgtacctatactaaaaaagtccacttcctgagctaactgatcagctatagctactgctgcgggtgtctctatcatcattcctactgccattttttcatcaaaagctattccctctgctcgcagttctgcctgcacttcggttaaaattgctttagcggctcgtaattctgttaaaatggcaatcattggccacataattttgatattattaccgtaactggcgcgtaaaattgcccttaattgagttttcaagaattgaggattttctaaacagaaacgtattccccgcacacctaagaaggggttggtttcttcactcaaggaactcagataaggaagtggtttatctccacctacatccagggtacgaataattaagggacgctggtctaaaacctgagctatagcctgataaacttctaattgttcctcttctgtgggtgcttttgtcttttccagatacaagaactctgtacgcagtaaacccacaccttctgcaccatgactgacagaggttttggcatcggcaatactaccaatattagcaaaaatttgtattctccgaccatcacgggtaattgccggctgatgtgctttagctttcgcttcggcttgggcagtttgccatgtttgacgtttggcttctagggctgttaatgtttctgctggtggtgctacccaaactttgccgctttcgccatcaattgccatcaaagtgccactttctaaggttaacacttgaggagctacacccacaaccgctggaatgcctaatgtgcgggcaataatagcactatgggaagttgcactcccagaagtcatacaaatgcccattaccttagctggatcgagtttagcggtatctgaaggacttaaatctgtaccgacaataattgatggttctgtgatgtgcaagtcagtgggcagactaccaagtaaaattcttaacaccctacgcccgacatcaactacatcgtctactcgttcttgtaaataagcatcttctagtttacggtaagattttgctacttcatcgactacagcttgccaagctacttctgcattaaggcgtttttccacaatatgttgacgtgcggcttctagcatgactggatctgctaaaaataacagatgggcatcaaaaatagccgcttccgcatcaccaatttgtattgatgtatgggaaagtaaagaagcaatttcctgtttagctatttggatagcagattgtaatctatgccactcgatttcaacgttttctatgtgatattctgtaattgggatggtgacagattgataataaattaatggggcgatcgctattccagaagaagcagcaattcctatgagttctccttccgttggtgatgtaacttcctcacggggggctggtattgcgataatgctatcatcttcaccaaagttgttaataatcaatccttgtaaagctcttagcgcctcttgggcatccgtaccagtggcagttatcagcaattcatgtccttgacgtactcccaaagtagcaacttggttaatactgtcacctctgaccgcttctgtatttctagttaaattttgtactttaatttgggatttaaaccgggatgccgtggctacaaactgagcagcaggacgagcgtgtaaacctaagcggttagtaattttgaggcgaatttcctgggttggaattgctgctgtattaccagttggtgtactgaagtctgataatggactggtgactaaatttaactgagttgcttttgctattaatgccccttgtgcttccgtgatcacttgctggatgttgttgccagcagcagcagcaacaacagcagcaatagcgccttctactaatggggctgcacataaatatattttttctcgctgttctgggggtagaaactccagagccatttccgcactcattaaagcactacccaaatccatcagcacgagaacaccatcatctgagaatacagaggcgatcgcttcataaaccttgatcgcatctgtacctagtgggtgttctggatcatcaacacctgcagctacagcgaggggaatttttccttgaaccatctgtgcagctagttcctgtactcccagagccaattgtttactgtgcgaaacaataacaataccaaccactgtaataccttagccagttacccatcctattatgaattgtgaaattggaaagactgtatttatttaggttctatttaggtttgagaggaaaaaattaatatttcgtaacattttgctaacttgaagatttgaaaatatttgattattcctcagaagtttgagattgtatttgtgctaatgctattttagcagctttgctgattgttttatttttatccgttgaagtagaaagcatttcaacagttataaagtatgacccaagtaacaacagattgtacaccaaaacagttcaaattcgaaagagaaaaaacccgcccagtagtagtaaatttccagggtggcaaagtaacattagatgcaggactaagtttaattgctgagatagacagaaaactgcaaatcacatcaagactagcaaaatgtggcgttgctgaatcatgggatgatttcgcccaatttagaacgaattttcaacggtttcaaacgccaattcatcccgcatttatgcaacgcgcttgaaacttacagtagttggatctgatcaaagtgttctacccagggaaacccttgtggattggtagttgcatttccaggtcgcagggaaaaacaagtttgtagcccggcagtctgggcagcctgcaactcctccaccacatcagaaacaaacaaaacttgactaggagtctcccctaattcagctacaatagtttgataactttttgtaactcgctttgcacctacctgagtgtcaaaatagccgtgaatccaaggagttaaatctccctcttgactgtggcgaaaaatcagaacttgcgcctgtacactgccagaagaaaaaataaatacccgcttaccaccttgatgccaaacctctagggcgtgaggaacatcggcaaaaacctgggattgcagactacccgattgatagccctgatcccaaatcttaccctggagggacttgagacctgtggatttgcgatcacagtccataagtgccaaaagataggggatcgcactcctggggtctgacggcgaccagggatctagccccagggactgctcttgtgcaaattcttgagataacttatatagatccgcttgtacatctggatctagagcatgagtagctaggaaggtttctaggtgctgtcgggcaaagggaaatagaactccaaacacataggaaactggtgttgttgttccctcaatgtccagcaggatactcgtaatatttctaaaggtaaccgtcataaactttctcagaatcgcattagtaaaatttgcaccgcgaatatcggccttaataaagtctgcacctgtaaggttttgaccactaaagtcatgatcttgaagatttttacctgcaaagttaatcaacatcattaatcagtaatcagtaaaccaaaaagtttttctccgaagagcgatcgctaagtattgtgcagtggatagtaacttaaaacagagagataggcaaccgtatatattaaaaatacttatacactactaattaacaaaaaaaagatactaaccggaaggaataaaaataccatcaaccacttgatatttacgctcaatagcttgagataaaaaggctaacatctgtttgagtgtaaaaagtgtacgataaattaatcggctacctttcatctttcgactaattttgagccatagaagattaacccaaatattaactagaagaaaggatataccaacaaataataacctcaatactggatttttattattggttcattcctccgttgtaggctgaccatagtagcagattaaatttaaatcactagctatttttagagaattgttttttaaccccagagggattcggctttttaatgcttgatttatttgtgtttctaattcacagaaattatcaatttttttcagatggtatctaatatcatttgctgtcggtacattttttaactttttcgctgtgttctcaatgctatccccactacttgctgcttttactaaaatttcaaataacgtttgttggtcaaatccaccttgagttttaattgagaagttctctgctaaacattcaagaacttcttccagggtttccgaatccgttaaagccaaatgttctgatggaaaaatcaattaatttcaaccaatatgtgacacactactttcattatctcatctttggataaccctgatagcactataagcattatttatgtttaatgtactttatctgacaacatatacgtggatagccattagcgatcgctcttcggagaaaaactttttggtttactgattctggtcatagagattcccaaggaaaattttcccatctgtacacaaccgctaggcagggttgctaccataagtaaaggttaaggaataaatcaaatcatatctaaaatgtcaacagctttaattaccggtgggtcaggtggaataggaaaagcttttgccgagggacttgctgcacgtaaaactaatcttgttcttgtttctcgttcagaggaaaaacttaaccaaatagccgaaaaattagaacaacaacatcaagtaaaagtcgaagttatacccaaagatttgacagaaactaatgctactaatgaggtttttgattttattaaaaacaaagaaataacaattgatttgttagttaacaatgctggttttggtgactatggagattttgccgaaagagatggagaacggcaacaaaaaattattcaattaaatattatggcattggtagatttaactcacaaatttctacctttaatgcgtcaacgtcgttctggtagcattattaatgtatcctcaattgctggttttcaaccaatgccttatatttctgtttatggggcaactaaggcatttgttatgagttttagtgaagctttatgggctgaaaataaagattatggagtgaaggttttagtagtttgtccaggtcctacagaaacagattttttcattgaagctcagtttcctgaaactttagccagtgcaaataataaactagctactcctgaagaagttgttaaagatgctttacaaggtttagaaaaaggtgatttaaatgtagttagcggtggtttagcaaataaaatcattgtcaatatgcaccgctttttaccaagagaatctttggtaagtgcaatagctaaacagtttaaacatgggtaattggtaattggtaattggtaattaggttattcatattccctattccctctttgctgtcacctgtcacctgtcacctcatcctacatatatctggttaattgtacgcggtaacgttcttttttagtcacggcaatttcgccaacttctaaacgtcctttaccgcgaattgctattaaatctccggttttgacttgcgaactcgcttgagtaatttctttccaatttacccgcacatcaccagagtcaattaaatcaaccattttattacgagacatcccaaaaccagcagaggcgatcgcatctaatcttaatgaagcttctactgtggttaattctttctttttcggttctctaatttttaattcattaatatcaataggttgagttttcacaggaacagaacgcacctgttttaaattcatttccagaaattctaccagttcaggaactacaattgcttgcgctcctctttcccccaaaataataatatctccggttttttccctgacaattcctgtacccaacattgctcctaaaaaatcacgatgggtagcagtatcaaacaggaaattaccagcaatttctaaagcagtaataacaacttgagatgaatctaaaggcagttcagaacgagcgatcgccactcgttgacgttcagcttggggatatccaccccaggctactaaatgcacctctgttaaccgactaaaaacccgttgaatttctgctaactccggcggagataaaaaatccgttacaacaacttcccaagtctttatagcctgttctgcttggtcaattacacgggcgatactatcgcggttttcaacaccttttaaaagttcttctcttggtaacatggtgattggtgattggtgattggtgattggtgattggtgactggtgactggtgactggtgattgggaaaaattacgaattatgaattacccattaccaattaccaattacctattacctattacccattttctgcataaccttggatattttcggggtcatactgccgtaaaatgcggtttgcttggcgagtcagagtttctgaaccttgaaccacaattaaatatttaccagcatccaaacggttacggtagggtaaagcatcaccactaccaaaaaccaaacccacaccaccaccaacaaagacgctacccatagcaccgctaccagcacccagtaacccaccgataacatgattaccgatttcaccagcccaagcaaaggtgtttaaaccagtgatgagactgaaggtaaaaccagcaaaaaagccgaatggtattaaccagaatgccatcaatcgtacttgttttttcgcttcttctttggggtctattaaaccaaactcatcagcggttttgtatcctctacccaggatagtgctatttatcccttctttttctaagcctaagtaagcagattcagcttggatacggtctggtaatacggctacaaggtaattcattggtctaaaaaagttatataaaacagggtttctttaattacagcaggagtcgtaggggcgaagcattcggaaaatagctttttcataaaattgataattggtcgcccgaatgcttcgcccgtacagaagtcaggagtaaaactctctttctgtctaggtttcaagttagattctgtacctgattgatctgcaatctgctgtatctttaatcaacagaatatcagcactgcttcaacgacagactcagcacttatgaatttctcgtaggggtttagcattgctaaacccctatgccctatttgtatcatgattttaaagaatctaaaggttcacagaaattatttacaccttgcttgaggacatatatcaaaactggtgttgccaaaattttgggaaactcaggaatacttctcaggtttgacatcatcccagaaattgaaccatttaataaattatctctatattcttgttcgcagataacagcacgccatttttttgctaaagcgtctaaccattcggaatttgttctaccaggttcttgtcccgctttaatagccagggtcatggctgcatcttctaagtctccctcacagtcttctatcaagtctaatgcttccattgcttgaatatcatctgctaattgagagcgaaattgggctatttcttgtgatgtgattttagtcataaaaggagatcaaggagtcaggagtcgtagaggcgaagcattcggaaaataggcttttcataaaattgataattggtcgcccgaatgcttcgcccgtacaggagtcaagagtcaggatagagctagtcctaatctgactatttgatagacaaaactatacttatgttgacaagcattgacataagtgagttaagaaaatcgcccacttgatatataatcctacgatatcaagtattgaattaagactattgccaacgcgaaaaccaagcaatgatagcggtagtctttcttgtaaatcttaacttgagaaatatcgcgtctggctaaggcgtgcaagtctactgagggataaccgctcccatgctcccgttgaagtagaaagtaaagtctagctttgtctaggttttatatagcagaagaaagaaacatatttattcccaatcaccagtccccaatcaccaatcacctgtaacaaatatagcgtttttcactaaaaagcctcattttacagtctaataactggcaatgaggccttttggggtttgtaaacaatttttatagccggagacagagtagttaggacatcaattaatcacgaaactcttactacaaaagggttttactcctgactcctgactcctgactcctgctatatttgtttacttattaaaagctctggaggtgacgaagcgttgtaactctgtcaaagcacgattgtaatccaaaatggcgcgaatgcgattaccttcggatctggtgagttcattttctgcgttaatgacatcggtttgagtgcctacaccagcttgaaaacgcaaacgcgctaatctgagggactctttagcttgctcaagagccgcattagcagtttgtacgttttccaagttagcaagctgggtagaataagcttgttctacttgaaagcggatttcgttgcgttgttgtgcaaatcgagtttcctcaattgccatgttagctttagcccgggctgctcttgctcttgctgcgccaccatcatataaattcaaagtggctcgcactcccacagaatagccgtcactgacattgacatcatcattaaaaacatctagcaagtcatagctggcaactaaactaatttgtggtcccaaagatgctaaagcttgctttctttgtgcttcactaatattgcgtcgtgccaactgctgttgtagttctggacggttttgataagccaagacaatgctatcttctaagcttctttcccacagaccagctaattgtacaggatcagccgcactaatatttgcggactggggcagatttaaacgcaccgctaaccgtcgccgagcaatgatttgctgagacagagcattagttaactcttgttgagcattggctaaattcacctgcgatcgcaatacatcgaatcttgtacccactccagcccgttctaaagccaaagcatctcgcaaactagcctgagagttttcgactgctgatcgagaaatccgcacattttcatctgctcgttgcaaactatagtaatctgtggctatatttaagcgtatttcttcagattgcctttctatatctaattcctgaaaacgcacctgttcctcagcttctttaatcgctgcgttccgtctcccagatgtgtaaaggtcatatctcagttgcgcttgactatcgaatgcggtattagcttcagcgtcagatgcattaggatttaacctctgtgcttgtttagctgccagtgtgctgttagtgctacggctgttagtgacattaccactcaaactgacagtgggcaataaagcagcttgagcttctttgagagcagctttactgctttccaactgcaaaacagctacctgtaattcattactattacgctttgccagttctagagcctgttctaaggtaatcggctgagtttcctgaagttttacttcctctggattcgtaggaaagagcaggggattagaactgggactcaggttttccagtgttgtctccgtagaacctgtaggagtaggtgttacattttgtgtattctgagcaggtagctctgtatttggagttcctgattcagtaggaacatttacctgggctaccttttgactatccttatctacatttttttgtaaacaactacttgtggacaggagcaaagctgcttggcttttctgttctgcctgtaaacacttatttagtgctgttaactgtgatacttttgtcacagaaactggtaaaacagttttcaggctttttactgctggcacattggtattattagcagcagtaatttctgtcacactctgattcaccatagctggaaaactgagttgactaaaatcaagattaggtaaaaaggctggagaattgtcaaccgcattaataggcagttgcctattgatgtccacaacggaggttttgacatcggttgcagccaagacactaggagaagacaccagctttacctcatcaactttgatagttccagcccaagctgattgagttgttaatactgctgctgttacaccaggtaagaaactatgaaataatatttgctgtcttttcaccgcatcccctcacacgaaaaaccatttagcggcagaaaacttgtcttctcacagaatataacatgatgctaaatgaagcaaataatatactatataccgaatttagcttctttcgggatttagcagtttacttgtcttcaaaacgtttaacaatgcgagaaagttccgccttttcgtctatgctaacgcggctaggcgctccactgacaattctctcgtaattacggaaggaatctttaatattaggtccatcagccgtaatattgtactccctaatccctttatcgtgccacgaaccccgcattttaaagacgtttattgcccgtgacatttctccatgaatttctacgtactgcaacataataattgtgtcagtgatggtagaaatatgagaatctgtaatggaatgtgatcccataaattggtcactggtattggtaaagaagcctgtaatttcttcttgtttggcataacctgttaccccaattacaaattggcgaaaagcattattacttacgcctctagctaatgcggaaagggagtcaatagcaatgcgggctggtttaaaatcggcaatttctgatttaataatttgtaagtgatcttctaaccctgtggattcgggataggtacaaattatttttaataaaccttggtgttctaattcctcaaagtcaattccccaagaataagcatttcgagacagttgagcgcgggattcttcataagcaaataatattgctcgttcaccgctgacacaaccatcttgaataaatttgctgactaagagagttttaccagtacctgtagctcctgtggctaaaataatcgaatctttaaagaaaccaccaccacacatttcatctagggtgctaactcctgaagatacacggacatttgaggacctttgtgttaaacgcattgctcccaaggggaagatgttaactccagcattagtaattgtgaatggatattcacctttcatgtgggttgtaccgcgcaatttgagaatttctatggtgcggcggcggcgttctccttctaaaacgttgcgaacaattaccacgttgtcagacacaaattcttctaccccaaaggaagctacaggtccatattcttctcctcgttctgtggtaatgattgtggtgacgtataattgtttaagacgcgctacgaggcggaatatctcgcgccgcactactcccactgcttcatattgttggaagactgcggtaatggagtcgattgaaacacgatgggctttgtatttacgaatcgcatattgtaatcgctcaattaaggcggaaaggtcaaagttacccacaatatcttgcccttcgggatcgggggaagcgtcgagaataaacagtttgccttcttcaattagtttttgtaagttccagccaaaaatatgggcatttttaataatgtcgctaggtgattcttcaaaggtaacaaatactcctggttcatcaaagtaggtgataccattataaagaaattgcagggataataaggttttcccagtaccagatgtaccgctgactaaggttgttctgcccactggtaaaccgccatgactaatatcgtcaaagccctcaatcatggtgcgaattttctctacaccaccacttgctggtttttgttgttcttgttgctcttggtcactcattgttgattatataggtctttaacccgattttttaaattcctaaagtctgtacagagtttttatgaaaaaatgttctttactagggtcaagagttttaaaaagctgaatactgactgctgaatactgactgctgaatgctgactgctatatgttactgttgccagtcttcttcatttaattcttcataaagtaagtctaaaccgattaaaactctttctctgtctgaaagatcacctatgattttgcgaacgggaggcggcaaaatctttgataatgtcggtgtggctaaaattttgtcttcttctgccaattgtgggtttttgagaacatcaattacttttagggcataaactccttgaaactcctgttctaagatgttcttcagtgtgtttaatgctcgcacggagttgggtgtgttccctgcgacatatagcttgagaacataggtttttttggctttattcataaatgtacagtttagatatgagaataggaatacaaaataggctgacgcatttgttgaaactaataacagatgcctgttgcaataggattaatctgaaaaaatttaaaaatcaatcctgtcaatttttgattctttaactcatgagtcacaatccaagatagcatgaatttatctcagttcattttagacatagaacatctatatacttcacacaaatgtgccagaatatctatcaaggtcagcctgtaatctagtaatgtttcatcgctcctgccttctaattttagctgtttggaaaattcgtcaatcagttctacatgaatttctataatttgtggcacaggaatattagcataaaataaggtgttgatgaatttatcaattgcagttttgagagttgtgtctgtgataaaataattgatgagaattttccggtaatcagatttgaggttcgctaatagttcctgcttttccgatggactcatttcttgaaaccattgctggcctttctgttcattacacgccaatacatgattattcttattaagatgctttcctgatagattgttatttaactgcatcctattgtgtaaaaattgtccgttgataggagtggtagcagtcagcggcaacccaaagaattgagaaaaaatctcatcaatcaaattcctgcactgcccgattaaaccagcttgggtatttgccgtatcagcattatataaatatttcttaagaattgctggacaaatcaataatataggtaataacatttattgtttatatatattgtttatatatgatgaacgctgagagtgtcgcttcagtgctgattgagtttgataaaaacttttcagtaaaatcagggtaaagaacgccttttgtcaaaaattattgagaaattaccaattcctaactggttttgtccctcagtgatataacttggtaggtaatcggtgaagcgttcaacagagaatgtgtggtagctaatctgatgatctataaatgtctatctatcggcatatagatttttccattgtactccttgataagatgcataaacaaatttaaagtatggtttcattttaaatcattataattcctcaaggttctaaaagaatctttggagcgataattgttttagctgtaactatcgatcaggagtttccataccagtaagatgctggttgtttactcattcacaagagtggcacattcaagtataactgctctgggaatgatgaaattcggaaattgccgatcaaagtgagtgaatcgctgggatagatttacagtagtatctctaggaaagattttatgcgtcttttaggaggatatggcttcaggcctgaaaaatatcagcactttggcagatgttgatgccagaggcaattacaggaagaaagatcccctaagccttatgttaatgctacagtacccgctttatgactttctagcaaccgtacccagttgctcccaaacaagcactctggcagtggtgctggagattttggagaaagaacagtgcgatcgcttggtagtggtaaatcaacaacaaagtcccataggattattgtattctgcccgtttaatcccaaaattattaacagcagccagtggtgaaacgtttttaaatctacagcaatcaatttccactttgagtcctagtctgatttcgcccatcaaaaccataccagcttctgaaccactggataaattaagtttgtttttacgtcaccaacaaaaccaaaaaaataaaaatttagattgggcattgattgatgcagatggtaaatttttaggtctgctagataacctacgcctactcagctttttagctaaaaataaagttacaattgcctctaaagttgctgggacgacggaaaataatactagaagaaaaaatcgctcttataagcagaatcaacatcaatcaccgagatataacgctttagtgcagttattggaaagactgccttggcctttaatgttgcaaacaagcaccggtgaagttttaacacaaaatcctgcttggtggcaacaattaggagttttgaaagatccagaaggaattaggctacaagtagaaactatcctatctcctgtcaggcgtgaagacccagaatatatccatcgacaaacattcaaggcttattctgatattaacaagggtgcaagtgaagatgctgtgacgctgatgccagaagccagaggtcataacttgcatacaagcagtcaagcacctcactccacatcggttttagcaatgatgcaggagcagcaaggaaaagcaaatgttacatccagtcattgctatttggatgctcaacaaggtacttgtacttgtgttgttcaggtgcaaaatggtcaagagcaaatttggcagtttgctaaaatcctcctggatagtcctgaattaaaagttgggggtagtgatgcagaagttgtcaactcaactaataattcagcaaatttcactgataatctgtggttggttttagctacggatgtgaccgaacaacaacaactttttaaagaattggcagctaaaaatgctgatttaattcaacttaatcggttgaaagatgagtttctagcttgtattagccatgaattaaaaacgcccttgacagcagttttaggcttgtcaagattactggcagatcaacaattaggagaactgaacgaaagacaagcacgttatgcgggtttgattcatcaaagtggccgtcatttgatgagtgtggtcaatgacattttagatttgacgcggatggaaacgggacagatggaactgactccatcgctggtacagattcgggaagtgtgcgatcgcgctttatcagaagccagaacacttcacagtcaaccgagcaaaagcaccgatttttcaaatgatcaccaattcagcctgaccattgaacctggtttaaaggagatggtagcagatgaattacgcttgcggcaaatgctggtacacttactttccaacgcctttaaattcactgaaaccactgggaaactggggttgcgggtaaatcgctgggaaggatggattgcttttacagtgtgggatacaggtattggtattcctgaacatcaacaacatttaatctttcaaaaattccaacagttagaaaatcccctaactcgccaatttgaaggcactggtttagggttagtattaacaagggctttagctcgattacatggtggagatgtgagctttttgtctcgtgaaggtaaaggtagccagtttacattgttattacctccttctcctcccaaaaccagtttttctgaatcagaggggggaaatttagaagtacatcaacctatttcttctcaaaggttaatattagtagttgaggcagtagcgcgatatattgaagacctgacccaaaatctcaaaggtttaggttatcgggtggtgattgcgcgttcagggacggaagcattagaaaaagcgcggcgcttgcaaccaaaaacgatctttttgaatcccttactacccctgctttccggttgggatgtactgactttactaaaatctgatagtgcaactcgccatattcctgtgattatcaccgctacgggggcagaaaaagaacacgcttacgctaacagggctgatgctttcttgagtttgccagtggaacatcaagctttagtacccattctagaaagattgtgtgctacaccagaagttcagcaggtaggtttaacaaatagcgatattgtactggaaaaaactccgttgcggattctgcggttggtgaatccagaattagagtctgttaatccccaaccctccctgcgtgaacatcgagtcattgaagtagatgatttagatcaggcagaaattttagcgcgggtgtggcagtttgatgtgattttgttggatgttgacaattctaatgcccaacattatctgcaacacttgatgaagtaccaaaggttagcaaaattgcctttggtgacttgtgatgtagccacaaccttggcagcttcccaaataccaggattgggtgtatttccttgcttaacgccattgggtagggaaaatgagcatggtcacggcaaaccagatcctttattatcagtgttggaaattgcttctaatattggttgtcctcctaatattttagtcgtagatgtggctaagttgggtgatttgccacaggtaaaacgcaagtcagctaagggttataggttacaaaagaaatctgctgtgcaagatgttaaccaaacactcacaaatgatcaggaaatgggttattctgcacagaataatgaaaggggatatgagtggtttcaagctttaattcagtatttacaaactgctggttttaaagctgctatgggtaactcttggactgaagttttgcaacaaattcgccatcaaagtgttgatttactattaattggtttgggagaatctgctgctgataaagaagtacaagaagcgttaaaagccttgtcagatttatcttttaatttacctccaattttggtaattgataaaaaattaaatcaggtaaatacagccattgatcaaaaccaaaataaccaaaataatgattatttgttgttgggagaaataccggaaagtatcgctattcagagactgcctcattcgatttcaatggcagacttattaaatcaaattaatcaagcattaggaaaggggtagttgataattgacaattgataattgacaattgacaattgtcaacctattcccttgttgacaaattacgaaattttcattttttcctttttatcttgtttcatgcgttggaagggtatgcgaatcaaattataagctcctttagtggcaatatctttgtaattatctggtggtaagtccatttccatcaactttttatgttcggctaaaagtagtaatgatggtggattgttttttttggatgcttgagtgtgaatataatctaaagcttcttgtgcagcagaaaggtaagtgacttttttttgtgagtagaaagttactgttggttttttgaaacctaccatcactaattcttcattaggttgtttttcttcaactgcaagtacagataattgtcttaaaggtgcttgtctttgtgcatccatcataaataatgctggcattaaaacaattgccaaaaatgctacaaatcccacaatattaatagcaatgatgggacggaaactacgaattaatatgaaagcggcgataataatcgcagtaaccagccaaattatccccccccaatttgttaaacctgaattttgaatttgctggtaaagttccggtgctgcgggatctgttcctactaatttgaagaggttaaataatgcgactgctattgtagatacaaaggcaacgtttacccaactgctgatgcggaaagatttttgtgtttgggtgtggtaaaatagatcactccaaaataaagctaccagaatagctgctgctggcattaaaggtaatacataactgggaagtttggtgacagcgatggtgaaaaacccaaatacacctaaaaaccaaaaacagacaaataaacctaagtgttgagaacgttcttggttgagaaagtgggaacgccgccaaaattttagtctagctatagatgcagggataaaaactgaatatggtgcaaaccccaataacacgactaaaaagtaaaaataccaaggcgctgagtgaccgttaactacttctgtaaagcgttctatgttgtgatagccaaaaaaggcattaatgaaattccagccattgcgccaagccactaagatgtaccagggagcagatacgaggaaaactaggaatagtccgaaaattgggcgcatttctcgccatagttgccagaatttgcctaagtatacggcaaaggcgatcatgatgaaacctggtaaaactatgccgactggtcctttggttaaaattgctccacccatcaacacataactagctaaataccatttattagggaagcgggaaggggtggaattttgagcgtatcccaaaaagaaacatagtaaggcggaggctatacaaccggtgagtaacatatcagatacaccgattcttccccaaactatcatttctgggttgagtgccatgatggctgatgctagggcggctgttaggtaacgacgggtggggtttgctgtttgttctagttgatcttttttggcaaaataccactgcacaacgtagaacgataaagctgtgacagcagttgcggctagtgctgagggtatacgtgctgcccattcgtttacgcccataatagagtaggcgatcgcttgacaccaataaattaacgctggtttgtcaaaccgagtttcaccattaaaaaagggtgtgatccaatctcctgtaactagcatttgccgggaagcttcggcgaaaagtggctctgtttcgtcaactaagccgatactacccaaattccaaacaaaagctatgaagttaatcaacagcaaccagaggatagcaatagtcacagcaggggctggatgctgttctatgtttttaaaccattggtcaataggagggcgatcgctcaattttatcctcataaatccatatttacagacacggtaaattgtgtctttcccataaacacaataattcaaaagtcgtttattagttatattttgttctcagatcacagctagagtgtggggtgtgggtaaacctaccgtatttgcgacaataaaaaacttaggtaataggtgacagggtacccattaaggaattaatattaattcccattcttcggtttgaggattccattttggtgagggagttttcccaacaacataaggaccccaatagcgtcgagagccatcttgggcaaaggccactaaaatatctccttgatctagttttaaattaccctctggcagagataaaattaaacctttttcactaccttcttggggatcaaaatcccaatgtgccggaatattatatttatttttattggctgaggtatttttaactgttgaatgttgccctaagaggaccaaacgcacaggctgatttgttttattactcattcgcaaactgccaaagtttgtagtttgatcagtttgggcaggtgaattttctgtagtgggtttttctgtttgcttgctggttgcactggcaacattagttgtactagcagatagaacttgctttgacgcacttggtgagtttgtctgtttttctaatgtagcggtttgatctgtcagtgttgataaaatgtctggctgctcaggctcaaaggatacactcagtcctaagcatccggctacaagtcctagtaatcctaatgcaaaagttatcactgccaaattgcgatacatagaagatttcataatcatactttttagagataagatttttttcagttgtgattggtgattggtgattggtgattggtgattggtgattggtgattgggaaaaatataattaattacctattacctactacctattacccagtccccagtccccagtccccagt

SEQ ID NO: 5 - DNA, 111050 bp, Sphaerospermopsis sp. LEGE 00249
  LEGE00249_14
gcttcccctgctttcttcactgtccccagtccccagtcccctgtcccctgtcacctatctaccaccgcgaccggttaaaacagaaggagacaagctagaccaagattgttttactaggtcagcatcagccttaacactacccaagtagttacccgcaggtaaagatgggaagcggttgtaaggtacaacatcttcaccgaagtaacgagcgtattctgggctattcaccattgtttctacagccgcccttaaaccgctatcagccaatagtttgttatattggcggatttcgctttgggttgcgggtgcgcgtcccaaaatgtgacggaataaaaattcaatcactttggtgttgggatagggtgtgtagaaacgcttacggtaaatttctgaacttgccaactctaggacaaattcacgcacggtaatttcaccattacgcagtttgctatctaaatcactgcggcgtaaatagtcaggaatttgcccgctaaatacgtccatcacctgaacataaatagcgttaattacctgattggtttcagttgaatttgtaccagtggtagcgcggaaaatacgggttggtttgcggcgacttgtacctacacccacttctaccgactgaccacgaccatcgttgaaagaacgacctaactcaatgaacaagggtttggtcttgtccatttgtctagcttgagccgccaaatctgcgatcgcattcgctaacattggcgtattctcagtcttgatccgaggcttcacagtctcaaagctaggtacaaccaaatcatcattttgcttggttagctggttgtaaagcttctcagtattggggaagttagccgcaggtaaggttgggaagcgacggtaaggaacagtatcttcaccaaaagcttgaacatactcagcactattcaccattgcaccgataaaggctttgataccttgagtagccaagatttggttatatttgcggatttcagcttgatccattggcgcacggcctaagaaatgcttagtacccatctcaatcactttagtgttgggatagggtgtataaaattccttaacgtacaggttagaacaacctaaaccttcaataaattccttaacggtgatttctccgttacccagcttactttctaaatcagtaaactcgttaccagcaacataaggaggaatatcacgctcgaaaatttgacggtaagcagcaccaatcaaagtttttaccgctactttatcaccagtaccagcgatcagtttaaagaccttggtttgctcacgctgcttggtaacaccttggttaatacggaaatcaatatctggttgggttcgcatttccttaacttcacccaactccacaaagcgaggagtttcttccttctcaactttgttgatatcttcgcggatagttcccacacgcagttgacgcaaggaaacaccagcaggtgttaaataacgctcataaggaacagtatcttcaccgaaagcttcactgtactctacagtgtcaaggatggcatcaacaacagcatagaagccttttttggaagcaatatcaaaatacttgttgttttcttgacgaccgtaggtaggacgacctaacaagcgacggtgaatgtattcaatcgctttacaaacatacaaggatgtccagtacatcttgcggaataaatcggacttcgccaacatccgcacaaactcgcggacggtgatttcgccgttttccagtttgatttctgcaactttcagccgttgaccttcgtaaacatcacgaccgaatacttgtaagtaacaagccttaattactgcttgggtagaactttcagagaatttaacacttgtacccttaccagcatttctgctcatagtaccgggtaactggtctaatttgaacactttcgcgcccaaagcaccaggagcaacaccacgcgcaccggggttactgagttggttattgataccaggtccttggtgaatcaagatccgacgggtatctttaccgaaaggtgcaggactgctgctggggttgcgggtttctttcgggaaaatcgccccaaattgaatttctagcggatcattaccagaaccgtagggatgttgatcaggtaatggttgttcgtaagctgcaaatgtggtaatgaattgaggtactttgcggaaaggcgcactgtatttaaacaggtcttgctgttgtccccagttgcgacactcttgagcttcttgacccagaccccgaatgtagggaacggtttcttccccaaagtaatctgcgtattctttggagtctaccaaagcatccactaaagcgggtaaaccaccgttagaaataattgcaaagtatttttgcacttcttcccggctgcttggtccacgtcccaaaatgtgacggaaagccagttctattacccggctgttaataaagggttgataaaactgtttttggtaaaggggagatttagctaaacggcggataaactccttcatggagatatcgccatttttaactttggattctaagtcagagatggataagctgtaagcacgggtaatatcgcgctcaaatacttggcggtaagcagctttgactacttcagttttttcgctagaagacaaaccaggcttcatagcgtacttgggacggcgttctgcggcgttgaagtaaatttgaggtagttgtaaaccttgttgatccccagaaggacgttgacggacttttgtggatggtgtaggtgctttgaactcagtcagcaacacatccatgtactgagtcacgatttctgttgcttcaggatctttgcggaagaatgacaaagaagcagttttaatttcttgtaaagccacgatggtagcttcaccagaacaggcattttcaatgatttcccgcaaacctctggtatttacagagatgatgttggggtcgccggcaacaatggcataagtagcatagcgcaagaaccaggacaagtcccgtaagctcttggacatattgccaggaccataacgagcaacgttaatcggtctaaaaccaggaggtgtgggaccacctgcggaagtgttgaaaatggaacggaggttttcaaagaagccaccacgactttcaacgtaggtgactgttcctagtttcatgccttcttgcacactagcaccagcgcccaccattgccatttccggttcttggggcttttctaagaaagccattggtgaaccaccaacgaagatccggttagccgcacgagaaacaatgatctcagaattttcggtgaggatctgggcgatttctaaacgttttgcaccagaagcaaaatagcttcctagttcgcttagttcaccttttcccaaaaagcggtcttgttgttctgcttgggaaatggtcgctacaggtaaggtttgatatagttgcggacgcgcaactgagcttcctccacttgccttaacactcatcggatttctaaaactcctataaataagcttatgtgttaagtctgggttgctttttggcttgacatattggtgtatttatgtatagtacgccagtcaaactgccagtaaattaacccagttcagtttttagattagaacgttttgcggtaacgctgctaatttattaagaagtatgtcaattctgtaatctaaatctgcctattggcataagtatctactctagacaggctggggaatgttgaagttttgtatctatctgttacattcgcttgcatcatattttgtagctgatttctttttattttataattttttaatattttggtgattggtaagtaaataaaaattcttttttacgtgtttggataattttacatggaaatattcaggttaatgtatgagtattgtttgtatgatatgtctaaatatgattattaaataatagaaagtatcaaatgatgatgattttgtctgaatcaggatgtccaggattaaaggattttcaggatgtttttaatcatttatggttttcatgaatgatagggaatatattttttatatcaatcaaaatttatcatcattaaatatttacagacaatctataaataacaatcctgtacatcctaaaatcctggttatcctgattcagacaaaagaatatatctttattattcacagaaaatctataaataacaattaccagtaaattgtttggattcatagattttacatcatttaacaaaatatttttcacgatcatgttattataatcaatagagagttaaaagagtaaaaatatcatgattttagatgtaaaaaatgctctttccacaattgcacctaaattaacttatgatgtcctcattgaaaatcaagcagatggcacagttaaagcgacattattaagtttaccggaatgtcaaggtttaggtgctactaaagaagaagcattaaataatttgattcaactttttcaagcacaaaaaccagagatagttactttagaaattaaaccttctgcaaccacatatccgttcaaggaaatttcagaaaaacatcataatgagggtaatgcttgggatttactagagtcactaacaggaactattgaagctccaagtaattggtcacttcaacatgattattatttgtatggaacgccgaaaaatcatgatgagataagagaatgaatcaagaaagattgtttttagataccgtatttattcaagctttgctgaacaaaaatatttcatgattttcaggatggttttttgtctgaatcaggatgtccaggatttcatgattttcaggatgatattttttgtctgaatcaggatgtccaggattaaaggattttcaggatgtttttgatcatttatggttttctttgaatgataggaaatatattttttatctgcatcaaaatttatcatcattaaatattcacagacaatctacaaataacaatcctgtacatccttaaatcctagttatcctgattcagacaagagaatatatctttattattcacagacaatctacaaataacaatcctgtacatccttaaatcctggttatcctgattcagacaagagaatatatctttattattcacagacaatctacaaataacaatcctgtacatccttaaatcctagttatcctgattcagacaagagaatatatctttattattcacagacaatctacaaataacaatcctgtacatcctcaaatcctgattatcctgattcagacaagctatttcaggatgtccaccgattaaaggattaacaggatgataaaatataaaattgacgatcgctaataaagtcctataaatcttaacatcatctagacgataattttaactattttcaagtattgtgttataatcaattcaaaattagaagagtaaaaatatcatgattttagctgttaaaaatgctctttccacaattgcacccaagttaacttatgatgtgttgattgaaaatcaagcagatggtacggttaaagctacattgttaagtttaccagaatgtcaaggttttggtgcaaataaagaagaagcattaaataatctgattcaactttttcaagcacgaaaaccagaaatagtgactttagaaattgaagcaccgaaaacagaacatccttggatgaaatttgcaggaatgtttgaagatgatccacattttgaggaagtgcagcaatatataacagaatatcgtcgggaattagatacaaaaatggaggaacataaccaaactatagaagatcaggagaatatctaatgattttatggatattggatacagatcatgtttctctatttcaacgcagaaatccatttattgtacagcgtgttaatagtgtcaaatttgaagaaattgccataactataattactgctgaggaacaattgcgtggtagatttaatgtaattagaaatgcctcatcatcggataagttagtattagcttatgcaaattttcatgctaatctagagtttttaaaaactgtcaatttacttcaatttaccgaagccgcgggtaatatctacactgaattaattaagcaaaaaatccgcgttggtactcaagatttacgcattgctgcaattacattatcagtgaatgggattttggtaactcgtaattttaaagattttgaaaaagtgccgaatttgcgtttagaagattggagtattggttaataatttcataattaagatttccaggattaaaggattttcagcatggttttttgtcagaatacactttctttaacttgcaatttatttataatactttcttctaaaagatgatagagaaaatgcggagtttttaaattagctgaatgtaatagattttgatagacttgacaagctgattcatcatttaaaatccgattgtgaataattcttgtccattctggtgcagttatcattaattgaggcacaacattaataaatgctgtaatttgtttttccatatcaaaagattccagaaaatgaattaagctaaacatcacttctggttgttgacattgatcatctaaaatcagatgataggcacataaattattttcatcaggattttcagctattgcagttaaagcattttcaaaatttgtaatttgtgcttctgtttgcatcaatcggttatcttttaagattgccagtaaattgttttgattcatggttttttacctcatttaacaaaaatagattgccaaattactttattgagtttgattaatgcttgcaaactttccctgattcttctattatacaaaccttgagaaaaataaatagaacgtacatcccaaatttcttgtgctaaggctactctgggggataagtttaaattaggacgtttaccataagaaattgtttgccgatgacgacctccttttcctggtgataaatgttccatcataatggcatatccttgatctgttgtataattaagtggaactttggctttcataaaagcatccgcaggtatatgatgaggtgtgaggttatctcctctacgtcccttttttagtaagtctccataagtacctacagttccttctcctgggatgagttgaggttgatgattaataatttttttactcctgtttagctatttctattgtttagtattttgattataaaggaagaaaaggaataattagggtttgctgaatcaggattttcaggatttaagaattttcaggatgatatttgtctgaatcaggatgtccaggattaaaggattttcaggatggttttttttgtctgaatcaggatgtccaggattaaaggattaacaggatatttttgatcatttatggttttctttgaatgatatgggaatatattttttatctcaatcaaaatttattatcattaaatattaccagaaaatctataaataacaatcctgtacatccttaaatcctagttatcctgattcagacaagagaatatatctttattattcacagaaaatctataaataacaatcctgtacatcctcaaatcctggttatcctgattcagacaagagaatatatctttattattcacagacaatctacaaataacaatcctgtacatcctaaaatcctggttatcctgattcagacaagagaatatatctttattattcacagacaatctacaaataacaatcctgtacatcctcaaatcctggttatcctgattcagacaagagaatatatctttattattcacagacaatctacaaataacaatcctgtacatcctcaaatcctggttatcctgattcagacaagctattttttgatagttaaaaacttgaaagaaatattattaccttcccagtatttttttgctgaatttaaaatatccaatgctatttggtactgtgtcggttcagcttgggcaaagatatcagcatgatcatataatatgacatatctttgagccggacaccatgttaaatcggtgatacattcatcaaaagcatcccagttagcgccgaagtatgaaggaaattccattgcttcagcagctttatttaaaaatgtttgtttgctattgatttttttaccatcaagataaaaaactttatgattcatagatttatggtgaggaaataggttagtaaaattgtcagaatcaggatgtccaggattttaggatttacaggatattttttgataaattatagttttattcaatgatagagaatatatttttattgttcaaaaaacaaattattaactattcacagaaaatctataaattgccatcgtggatatcctgattctgattatttttgtttttctatttgacgttcttgaagttgacggtgacgctgtgatcctttcatagcaaaattaattgaggctcttaccccttttcttcctattactgtgggtgttaatttccactcttgagccgcttgttgcgacgttcttgaagttgacggtgacgctgtgatcctatcatagcaaaattaattgaggctcttaccccttttcttcctattactgtgggtgttaatttccactcttgagccgcttgttgcgctgcttcatctagttcactatcaccactagaactaactaaccttacttgagtaacattaccttgagaatcggtgtcaatagctacttctgctgttccttccacaccacgttttctagctttatctgggtacttgatctgacaccgtatacaatctactggatttaatttatcccaaatatatttgtgtccattatcccaaatatatttgtgtccaactactaccacagttacactactaacaattaaacctaaagccacagttcgcaaaaaacgacgacgggaagaattaggtaaatttgtagactgtgtaacttgtgaaacctgagattgaggttgcttaactaaagatgaattatttgtagtgctagatgttgctgttacttgggtgatgacaagttgactctgaggtttagaaactggcgtttgtgaaacctgagattgagtttgttggactggtgctttactaatagatgctacaatctgccatatcttgatagtcttgtcactactcccactagccagagtttgaccatcggggctgtatgctactgaccaaaccaacttagaatgaccagtgagggtttgcagtaggtttcccgtttttacattccacagtttgatagtcttgtcctcactcccactagccagggtttgaccatcagggctgtatgctactgaataaaaccattcagaatgaccagtaagggtttgtccgaggttttccgttttcacatcccacagtttgatagtgccgtccagactcccactagccagagtttgagcatcggggctgtatgctactgaaagaaccgggtaagaatgaccagtgaaggtttgcagtaggtttcccgtttttacattccacagtttgatagtgttgtcactactcccactagccagggtttgaccatcggggctgtatgctactgaactaaccgagttagaatgaccagggagggtttgtagaaggtttcctgtttttacatcccacagtttgatagtcttgtcaccactcccactagccagagtttgaccatcagggctgtatgctactgacccaacccaatcagaatgaccagtgagggtttctaggaggtttcccgtttttacatcccacagtttgatagtctcgtccctactcccactagccagagtttgaccatcggggctgtatgctactgacaaaacccagtcagaatgaccagtgagggtttgtaggaggtttcccgtttttacatcccatatcttgatagtcttgtcaccactcccactagccagagtttgaccatcggggctgtatgctactgacctaatccggttagaatgaccagtgagggtttgtaggaggtttcctatgaatctattactaataacttgtggttttgatgttgattccacaacaacagatggttttgctttcacaacaccaggaaaaatatcaacaccaagatttgtagagcgatcgcaccaatagcatttaccaaaagttctactataataatgactatctaccctgccgcaaatagttaaattatcattccctgttcttaaagcctctaaccactccctagccgtaggacgagaattaggatttttatacccatcattaaagcatctcagaaaacattgctgaatatctggatagacaatctctaaaggaattgttcttgctgctgcggtaattaaagtatttgccccataaacccataaaccccgacggataagttcattaggttctggagtttcccctgcaccagtccattttccttgaaaggggctattaccaccaaataataattgatagataattacccctaaccgaaatctatcatgtatttccgtttgctcaataatatcaaaatcttttcccattaattccggtggtgtatatccttccgaaccaactaaacaacgaaaaaccttaccatttttaggatttatcacctgaaaagaatcagtatcaataatagaaggtaaagcccgattattaactaaaatattttgtggtttaatatcacccaacacataaccagcttcatgtaaagccgcaataattgaggcaatatttaaagcggtggtatgtaaaaaacgccaatcaatctcaagttttaatttcttgcgacgttggggattataaatatcaataagttcttttccacccttaatttctggcattaaaaagcccacaaaattgccctgagcatttttcaacaccgatttaggccaagcaaaggaaacatgatgaagatgggaatttggttctgtgggtgggtggtctatcattactgctaatttttgcacccgttccgatgtgggagaatggtatattttcgctaaataaccattttcattagttcgccaaacttttgcttcaccactattagcaatctctttacccaatagcgtaattgattttcctgtactggcacaagtaagaactgtcatataattttaattagatgggttgaaatatatttctaaaatcctaaaatccgtaggttgggttgaggctttgcgaaacccaacaaaatctcatgaatcttgaaaatgttgggttttattcttcaacccaacctacagttttttaccaattgcatcctattcaaagagacacaaaagtaaagttttatcatcatcagtacgagaatttaacctttcagaattgagaaaaacattaatataattatcatcatttccgcctggtttatctgtttctcgcaaatactcctctaaaggtttaaaaaatggcgcgtgaggtttccaatcactaaatctaatcgctactttttctaatccatcagtagaagcacaaataaactcttgtttgcctgaaattacctgtacctgcatttcctccagtgcattagctgaagtgacaaaagttgtttcattgaaaaattcccccttatcaggtttaaacaacatttgatattctccatcttgagaacccatgacaataaaaccatccccaatttgcatagctgcaacccattcaggagtcgctataaaaactaacaatgtacaagctaaatcactgacagaataacctttatgatctgcttgtttttttaaagcagtaataacttctttgacaaacttagtaaaaacttccttagcttccatttccgaaagtggttgagtaaaaccttgtttatcaggaagttcattaatatcagcaaagcatttaattacagtttctaccgccaattcagaaccaaagtgagaatatttagcacttccagcaccatcagcaaccgcgcccacaatcacatccttaaaaatgcgataatttccgcagtcttgacaaggtattttctgctcttgatgactcgttcccgttacataacgcgctatagctttccaacccacaataaataaatcctcaaaatgtaatttaatgggtaagatccccgacttcttctttcatcatgtcaataaatcattaacttatattagaagtcggggatctggttgatacaaattaagtaatgtaagatccccgacttcttttttaatcatgtcaataaattattaacttatgctagaagtcggggatctggtttctacaaattaagtaataatttgcccccaccccaccggcggtaatgctacagcttcccctactttgccactagaaacccgtttcatagaagtggaaagccaaacaaataaagcgcgaaaatctaagccatttaacatcactggaggccgtccaggtggtgcaatttctctcagtttatacatatctgcaccttgaacagcaacagtaaaaaataacattcggcgctgttcttcttcttctctcaccctttgcgctgcattttgccaataatctgtaggcgcaccatcggtaattaaaaatacccaaggacgataataatggacaccgttatctttatacgactgtttgcgggtttctaataaatctaaagcgtattctatggctgcacccatgggcgttacaccatctgcttctagcttgggcggtgtaaaatggtctatagtgacaaaatcttgcgtcagtttcaccggtccaaaggtgacaatagcaacttctacacttaaagaagcttgagcatctttcattacatcttctttaaaagctgccaaacctctatttaactcctggataggttgccctgacattgaaccagaagtatccaacaacagaattaccggacaacgattttcagggttttccacaaattcgggcattcctactggcattattgatactcctggttaatcaactggttaatcacaactagatgctgaatattatatcttagatcatactcgttaacacctaatctaacacgggtatttttacggaatcaataccttgcctaaactggaagcaagcagcacccaaaaacgagtaaattcatataatgtttttcataaaagagtcagtgatgaaactcaaaattgccagtaaccgttaaactaaatataaataaccatcaggatcaacaaatgaaagcgatagaagtcacaggaaacattgatgaaaaatgggcattatttttagaccaacccctgaatgtagaaatacccggaaaagtcagagtaataattctctttcctgaacctacagataacttagaaaatgatgatgatgatactcccattgaagaaataaaagctagtttaaaaagagcagtacaagaagcaaaagcaggacaacgtattcccctatctcaaatgtgggagggaatagatgtcgaatgaactgccaatagtagaaatagacttaacacctgaatacaaaagaaacttgcgttctctagctaagagataccggaatattcgttctgatactcaagcaataatggaagaaattcaaatcggcaattttctaggtgatagaatatctggactaggtgaaaattaaattgtttttaaagtcagagttaaaaatagcaacattcaaaaaggcaaaagtgctggttatcgcatcatttattaagttgaatcaccaaccaatgttcttttattaaccatttactctaaatcagatcaagaagatatcaccccacaggaaattaaaaatattttagctgagtcaaatcaaaacgaataatttacctgttcaattaaccttccccaaaatccccccatccgctaaactcagaaatgctgcgttaatctccaatatgtccgactcccaagtaagtgctgctgttgcgaaactctacgacacctaccctttcccccccgaacccatcctggacgaaccaccaccaggatataattggcgttggaattggttagctgcttacaacttctgcacaggtagaaaaccagcaaaacaagatattcgcatcttagacgctggttgtggttcaggagtcggtacagaatatttagtacatctcaacccccaagcgcaggtagtaggaattgatttaagtgctggtacattagaagtagcaaaaaaacgctgtcaaagttctggcgctgaccgtgtagaatttcatcacctgagtatttacgatgtagaacaaataccaggacaattcgatttaattaactgcgttggtgtgcttcatcatctgcccgatcccattcgtggtattcaagcattagcgaaaaaactcgcccctggtggattaatgcacatttttgtatatggagaattgggaagatgggaaatacaactcatgcaaaaagcgatcgcccttctccaaggtgacaaacgtggtgactatcgggatggggtacaagtcggcagaaaaatatttgcctcattaccagaaaataaccgtcttgtcaagagagaaaaagaaagatgggcaatggaaaaccaaagggatgaatgttttgcggatatgtacgtacatccccaggaaacagactataatattgatacattgtttgaattaatagacgcttcagaattagactttgtaggattctccaatcctgggttttgggatttagaaaccctattgggtaaagcaccagagttaatagaaagagcaggaaatttaggcgatgcctccggcgggctacgccaacgccaacgttaccgcctgatagaattactgaatccagaagtaacccattatgaatttttcctcactcgtcccccattaaccaaacacgactggacagacgataacagcttattagcagcaataccagaactcaacccttgtatagatggttttcccagcaaatgtatatttaactacgattaccaaatcatcaaattatcagatgcggaatttgagtttatgcagaaatgtaatggtgatgccaaaatagccgaagtcatcggacaaaccgagctagatttaaacggagtcagaaaactcataaaacagcaattacttttattaacacctgaagataagatttaggttatcattggacaaatttacgtagatcgttagaatcagtgcgtggagtaaatcgtcggggtatagtttcccgtgcttcagttagacagatagcaggtagatgtaactcaaactctccagcttccgcaagtgcaagcaattgagccgcttgtggagtctgtaaatgttcaggtttaagaatatctacaacccagttggtttcaacaaaaaccgcttgaggcttcattttgcaactttactccaccttggtccaccagccctaacttcaccaattcgcagcagattgatgatccgtccaccaaacaaatttttcaaatcatctggtaaactgtctacattagtttgcagtttcaatttctctaaccatcgctgaacttgtgattcaaactcaagataacggtttcccttccattgctcatctggtggtggtaacaaagaatgtggaagtattgcttcaccaactacgcgaattgatgaaccatgagaatcatcaaaagaatcctggaggacaataacacgctctcctgctacaagtaaaccaatggagcaaccaaattcaatcattgagcgttcgagataaattataccgaattgacgttgctttctgacatcattgggttttacctcaacgatcatcaaatattctccatctgggctagtgacgatgatatctggatgtgatatttccatagaacaatcaaaatagaatttacagaatgtaaccttttgtatttttatttgccgttaagccaattttccacctgcaaattagtcattttaaatttccatatcatctaaaggtaataaaccttcgtcaacatcgggaaaatcttcatcaatatcttccagattagcaaagacttctaggagggattttttcttaacaggagaaatgatagctaagggaataccattgtcagtaatagttagggtttcacctgtttttttagcttggttaattaaagtttgcagaatagggggaagttctgaaagagtaatttgtgtcatagttatttttgggagatgataagtaagtaggcttaattaattgttagatagtggaacaggcttctagcctgttgaagggcaagacttgtactgagtttatcgaagtatacccatcccacattttatatttaattgcagccagctagttaagactttaatttatattttttgttatatattattcttatattttcaggtaaataaagcacatcttgattcagggcgtaatctccgtcacgagaacccccagggtagagttcataggaaaatgtaacatttatgccagattgaccaatattttagcccaagtctagttatacttaaacgtagtctaaaacctcataaacaatcaattactcatccctacacccagcgagagagtgtagaagaagcaggggagcagggagcagagagcagggggaaattatttgtatgttcccagtccccagtcaccagtccccagtccccagtccccaatcaccaaaaaataagataattgtttttttctaaagtattgttaccagagcgtgatatgattcaactgactgaatgtgcagtcaaccctatttagctgtactggtttcaagtcccgtgagcttgtcagaagaacaaattgtacccactccgacaacagaacaagatactcaagctagttctgaagaaaaacagccagcaagctcctccatgcaggagttctatcaactctaccaagagttgttggtaatcacgcttgtgttaacaggggtcattttcatctctgtttgggtttcctattccctcaacattgctctaaattatttattaggggcgtgtgcaggtgtgctttacttgaggatgttggccaaagatgtagagcgattaggtacagagaaacaacagctgagtaaaaccaggttagctttattagtcatcctgattttgttagcatcaaagttgaaacaactggaaatcatgcccatattcttgggatttctcacctataaagccacactcatcatatatgtagttagagtggcatttatatctgactccacaaagctccggcaaccttaaaacgctctgtttctccagtaagatgagagaagcgatcccactaacaagaaaatgctgaattttctgaacttttactcccttccattggcagaattggaagtgggtaaacatctgtactggcaaataggcaacttaaagctacatggacaggtgtttctcacctcctggtttgtaattggcgtattaacactggtttccatcttggcaagcagcaacgttaaacgcattcctagcggcattcaaaacttaatggaatttgccctagaatttattcgagatttggcaaaaaaccagatcggcgaaaaagaatatcgcccctgggtgccatttatcggcacattgtttttgtttattttcgtgtctaactggtcaggggcattagttccatttaaactaattcatttgccagaaggtgaactggccgctcccaccagcgacattaacacaacagttgccttagcactgttaacttcattagcttacttctatgctggattcagcaagaaaggcttagggtacttcggcaactatgtgcaaccagtttccttcatgttgcccttcaaaattattgaagatttcaccaagcctctttccctaagcttccgtttattcggtaacatcttagctgatgaattggtcgtaggcgtgctagtgttgctagtacctctatttgtaccattgccagtaatggccttgggattattcacaagtgctattcaagccctaatttttgccaccctcgccgccgcctatattggtgaagcgatggaagatcatcatggcgaagagcatgagggacatcattaaacccctcagatggcaaaagtcagaaatagggaatagggaatagggaatagggaaaagagtaaacaaacaattagttataaactcttgcctcttgcctcttgcctcttgccttctacaactgactactaaacaactctacaagttcaacaactaaccactgtataaagtaaggaaagaatatcatggattcattagtttctgctgcttccgtattagctgctgctctcgctgttggtttggctgcaatcggccctggtattggtcaaggtaacgcagcaggacaagctgtggaaggtattgctcgtcagcctgaagcagaaggtaaaattcgcggtacattgttgctcagtttggcgttcatggaagcgttaaccatctacggtctagtagttgctctcgtactgttgtttgctaaccccttcgcataattagtatacagtctgagtgctgagtgacaaaaattaggagttaggagttaggagttaggagttgaattaatgactcactaactcataactcataacatccaacaatcataactcaggactacaaccatagataggaacaagcaacaatgacacactggatcaccttattggcagtagaagaagttgccaaagaagggggcttgtttgacttagatgcgactttgcccttgatggcaatccagtttctagttttagccctgatattgaatgcaactctctataaaccattgggtaaagccattgatggacgtaatgaatatgtccgtaacaatcaattggatgcccaagaacgcttgtcaaaagcggaaaagttagccgagcagtatgaacaagaactagccggcgcaagaagacaagcacaagcgattattgcccaagctcaagcagaagcgcaaaaaacagcggcccagaaaatagctgccgcgcagcaagaagcccaagcacaaagagaaaaagcagctggtgaaattgagcagcaaaaacaacaagctttagcttccttagaagctcaggtagatgccctcagtcgccaaatactagagaagctgttaggtgctgacttaataggccaacgctaactcgcagaattgtcactattcatagggaatagggaatagggaatagggaataggaggaatatcaatcaaaaagtcttgccttttgccttttgcctcttgcctcttgccttctgaaactgacaatagattttgaatttggcagcgcagttgtggatagaaaatcatggggacttttgtactattgatggcggaagcagccgccgtcggaggtgaactggcagagggagcagaacatagtggttttggtctaaatactaatattttagagaccaacctaattaaccttgccattattattactgtactgtttgttttcggacgtaaggttttaggtagtaacctcaaagctcgtcgagaaaatattgaaacagcaattaagagtgcagagcaaagagcagcgtcagctgcaaagcaattgcaagaagcgcaacaaaagctaacgcaagctcaagctgaagctaccagaattaaagctgatgcagaagtaagtgcaaaagctgctggtgaggctattttggttcaagctgctgctgacattgagaaaatgcaagctgctggtgcggctgacttgaatgcagaactagagcgcgtaatttctcaattgcgtcaaaaagtagtagctcaagcactgcaaaaggcggaagctgaactcaagactggcattgctgaggatgctcaaaaaactattattgaccgtagcatcgctcaattgggaggttagaaaccatgaaaagtaatgcagctacagcagaagtagcccagccttatgcacaggctttgttatctgttgctcaagcaaataatttgacagaagagtttggtgcagatgcacggactctagttagtttgatttctggttctggggaattgcaaaactttttggataacccctttattcaaccagaaaacaaaaagaatttcctcaaacaattgttaggggaaggtgttaatccctatctgagaaatttcattttgctgttggttgatagaagacgaatttcttttctagagccaattttacagcagtatgtcaacctgttacgggaattgaatcaaacggttttagcagaagtaagttctgctgttcctttaacagatgcacaattgcaaacagtgaaagaaaaggttctttctattaccaaagcacgggaagtagaaattgaaaccaaaatcgacaccgatttaattggtggtgtggtgatcaaagttggttctcaagttattgatgccagcttacgtggtcaactacgtcgcctttctttgcgcttaactaatggttaggtaatgggtaatgggtaatgggtaatgggtaatgggtaatgggtaatgggtaatgggtaatgaatcatattcttcccagtcaccagtcaccagtcaccagtcaccaatcaccaatcatcgtttaccaaaaacttcttttgtcttgaaagaacactgaacaataggcataatgagcatttcaattagacctgacgaaatcagcagcattatccaacaacaaatcgagcaatatgacaaggaagtcaaagttgctaatgttggtactgtactgcaagttggtgatggtattgcccggatctatggcttagaaaaagctatggctggggaactcctagaatttgaagatggtactgttggtatcgcccaaaacttagaagaagataacgttggtgcggtattgatgggtgaaggccgcaatatccaagaaggcagcaccgttaccgctactggtagaattgctcaagtagctgtaggtgatgctttaatcggtcgtgttgttgacgctttgggtcgcgctattgatggtaagggcgaaatcaaaactggcgaaagtcgtttgattgaatccccagcccccggtattattgcacgtcgttctgtacatgaacccatgcaaactggtatcaccgctattgactcgatgattcccgtaggtcggggtcagcgtgagttgattatcggagaccgccaaaccggtaaaactgcgatcgctattgacaccatcattaaccaaaaaggtgaagatgtagtttgtgtatacgtagccgttggtcaaaaagcttccaccgttgctaacgttgtgcaaactttacaagaaaaaggcgcgatggactacaccgtagttgtcgccgctaacgccagtgaccctgcaactttacaattcttagctccctacacaggcgcttctattgctgaatacttcatgtataaaggcaaagcgaccctgattgtttatgatgatttgtctaagcaagctcaggcttatcgtcagatgtccttgttgttacgtcgtccacccggacgggaagcgtaccccggagacgtattctacattcactctcgcttgttggaacgtgctgctaaactcagcgatgaattaggtaaaggtagtatgactgcattacctatcattgaaacccaagctggtgacgtatccgcttacattcctaccaacgtaatttctattactgacggtcagattttcttatcttctgacttgttcaactctggtatccgtcctgcggtaaaccccggtatctccgtatcccgtgtaggttctgcggcacaaaccaaggcgatgaagaaagttgctggtaagattaaactggaattggctcagtttgacgacttacaagcgttcgcgcaatttgcttctgacttagataaagctactcaagatcagttagctcgtggtgtacgtttacgggaattgttgaaacagccccaaaacgatcctctatctgtagctgaacaagtagcgattctctacgctggtattaacggttatttagatgacattgctgtaaaccaagttaccagctttgttagaggtttccgtgaatacttgaagactggtaagaactcctactactcagcagtacaaggcagcaaagtattgggagatgctgaagaagcagccctcaaagaagctttagctgattacaagaagacctttttagctacagcgtaatcggtgattggtgattggtgattggtgattggtgattggtaaaaggcaagaggtgaaccactgcggtggacgggtttcccggcataaagcaagtgagtggtgaacccgaagggcaaaaggcaaaaggcaagagggaaagggtaatacatattcttccccgcaccctgcacccctgctttctgtcacctgtcacctttcacctgtcacctagccaatgactaatgactaaggactaaatcatgcctaatctcaaagcaatacgcgatcgcattcagtcggtcaaaaacaccaaaaaaattaccgaagctatgcggctagtggctgcggcgagagtacgtcgcgctcaagagcaggtaattgccacccgtccctttgctgaccgtttggcacaagtattatttggtttacaaactcgcttaaagtttgaagatgtagacctaccactactgaaaaaacgggaagttaaatctgttggtttgttggtagtttcaggtgatagaggtctgtgtggcggttacaatgctaacgtgatccgtcgtgcagaaaaccgcgctaaggaactcaaagcggaaggtttagatgtaacttttgtgatcgtgggtcgcaaagctactcaatacttccaacgtcgtggttacaaaattgatgctaactacactggtttagaacaaattcctacagcagcagaagctactaatattgctgatgagttgctttctttgttcttgtcagaaaaggtagacagaattgagttaatttatactcgcttcgtgtctttggtgagttctcgtcctgtggtgcaaactttgttacctttggatactcaaggtttggaaaccgcagatgatgaagttttccgtttaactactcgtggtggtcagttccaagtggaacgggaaaaggtagctagtacagttcgcgctttaccccgtgacatgatttttgaacaagaccctgtacaaattttagattctttattgcctttatatctgagcaatcagttattaagagctttacaagagtccgcagctagtgaactggcggcgcggatgactgcgatgagtaatgctagtgataatgctggtcaactcattagcactttgactctttcttacaataaggcgcgtcaagctgctattactcaggaacttctggaagttgtgggtggtgcggaagcacttagttaatttggtagttggtgatgggtgatgggtaattgaattggtaagattattatttatcacctattgccgattacttgatgaggtttaagaaggaatgaaccaagaagatttatcagacccaaaatgcacactttttcaggtatacccttcaaaatcctggcatctttttcttgtttattagcctcaaaccttcaatatatctagcttttgtctttattcagcaaccgctaactaccttgtcactcgttaaggaatagcgggcaagatgccacaagaaatttttagacattgggaaattttgtattttttataatccaaaatctaaaatccaaaatctaaaatcggatcatcttctcaaaactaactgaaaggaatttaaatatccggtaatagttttttctaatgtggaacgctgttttctagaaactattgccatgacttgatataatcttccttcagcaacatacatcctatttgtagttactttaccagccgaatctatatactgaatttctttacctggatgactgttggaactgcgaatattacgttcactaattaaattgctttgtgttgcttttaaggtattttctttggcttgattcaatatttgttgtgggctagtcatcttagcatagctgtaaggaaattcattgtaagtgactaaatacgcaacttcctgttccggtggttgggctacaaatatgtttaattttatttcccccatgtaggttttctgtacttgactgttgttttttggtctgactggcattaaaacctgaaaactcttatctgggggagtaaatattttccattgtgactgcactacttcgggaacatttggttttttgtgagtagctataggttgggatttacttacctcggcagaaataaacccactataaacaaaagtggcagtaatgaaaggtattaaaaattcaatattcaatttgatattcaatttgatattcataatttgtagccctcgcagatgcggtttttactgttgctgctagttataacctagaagcagataaagccgcacctattaatcctacttgttggttaagaattatatgcaccggtatttcttcgaggatggaactcattctgcctttttgggtgaaatttaacataaaactcccattttgcatcaagggcagaattttcggggcaatgcctccagcaatatataatcctccgtagggtaagagttttaaggctaagttgccggcttctgcaccgtaagcttcaacgaacatttgtatggtttgttctgataggcgatcgcgtttttctaaagctgcactaccaatagcagcaccaggatcaacggttttttctgcttttccggcttcttgttcccaggttctgacagtttgggctatttctgggttttctgtgtctatttgtctatctcttaaaaattggtaaatggaagtgatccctaaaccggaaactactctttctacagatgcacgttgaatatcatatttagctaataaatatttcaacagttgaaattctaattcattgcggggggcaaaatctgcgtggccaccttcggaaggaaaaacttgatattgatttccttgtttgattaaaaaaccttgtcctaaacctgttcctgcaccaataaccgccatcggtgcatcaggttgatatttaccaacttgtaaggtgactaaatcttgtgtggttaaaccaaaaataccataaccgacggctgcaaagtcattaattagggaaattgccggaatatttaattgttttgctaatctttccgtgtctaaaaaccaagctaaattagtaagtttagcggtgttttgtactacgggtccggcgatcgcaaaacaagctttttctggtgtagatgtattgcctgttgatagattcgctgcggctaaaaatttttggacaattggcactaaatcaggaaaatctccactgcggtaactttcctcatacaaagtttttaaacctaaagagtttgaagactctaccaggcgtaaaattgttttcgtgccaccgatatctcccgctaatagtaatgtcataaaatttatcagttagtttgttagtttgttggtttgtgtgtgacttgtactttaattatttacctatcagtaaacagtattgatatttttcaggtttacttccaaataattgctcgaaatcaaatattctgactcctgactccggttggtgagcgaagcgatgcactgagagcgctcgaagtgtcgaaccagtgactcctgacttatacaaatcttactacttcctctactgtagttaaatgggaagtatctccttttagttctagcaaccattgtgattcttgacgcaccacttttactaaagaacataaagtagctttcacttctgctttagctatatcccccacaaatcccattgccgcacctaacacagaagccccatgtgctactaacagaatatcatctggccaaaattctgctgctaaacatctagcggtttgtgcagaacgatgtctcacttgttcatgggtttcgggatattttgctgctatctggggtgtgtagcctgtgtctattctaggaaataatgcttttaattctggggttgagagtctttctggttcttctgtcatccatgcgggatttaaccactcacttaagcctgtttctagtctaatctctaattctaatgcttcggcgactgcgttggcggtttgcactgttcgcaaaaaaggagatgcgaaaatatgtttgattttttcgcctttgagtctttttgctagttgttgtgcttggatcatgccatcatctgataatggtggatcatagcgtttttcggctgtgagaaaccagtcagggtttacaaaatcaaggcggttggcgtgtctggcgatccaaataatttgactcatggggcaaattttacaggtatcaatgcttgtattttgggtatgttttaaatattagggcataattgttatgttttgtgatcttgaagatgattttgtttttttgaatgaaccacgttatgcgaagcatttcccgaagggtagacgcgaaggacacgaagagaagagggaagtgaagaagcaagtaaagaaggaagagaaaaaggacgtgatttttttaatgtcaaccagtaatttatctcttctcaagtaggggagaatctatttctaaaagccaattttaatcaataaattccatattctcattatagataataactagctcacctatcttttctagcggttgattttcttcttggtaagattgattttctggaaaccacgaagcctcaaaagcttttcttagagaccattgataagctaacagagaaaattctaatttaagaaatcgtttattgttgctaaatcctacagaactgcttattagttttgcggttgttgtctgcggtaaagtaattgcttcataatatttatcttgttcatcccaataaccagtgattgtataaaagcattcttctagcagttgtttaactagattattagcatctaagttttctattatttcagttaaatcttgccaaactgggtgatttttcaattggagtgtagtcataattttcagatagattaatgttttgttaccagaccaggaaaatgcaagataccactaatatatttggcgtgaaatcgtctatcaccacctttacctaatactttacactttaaatcatatcctttctttaattttatctcacgtttctcactaaaaaattatcctgtccacaacttttttgagaacgtcttaaaatctccgcactacaaattccgggttcaccatctttagaataacaaaaaaatacttcttgtaaaaatctaccagaatcagaacaaacaggagctatcccattaacattccatgttttgttagcagtaataaaagtagactttaaatctttaatcgtggtgcgaaatggtttttctggacttttataagctgaaggaataactagagaatattttaaatttctacttaatgtcagatattctataggtttttgacctgtacaagttccatgtttttgccattgatgatcaaaaagtcgatcattggggaataaacctctaaacttttgcttaactaatggtggtaatttttctgtagaacagttagcaggataaccttgttgatattgtggccaaagtccatgtaaaacaaaaccgtattttttccctgatccacattgttgtacatcacgttttccatttctggcacaatgatcaggagaccaagataatgttaaaacataaaaatcaaatttaccaggagttcccggagtttgagcgatcgcattatttgtcgttgctaccgtagttattaataaggaagatgcaacaacaagattctttattgacgacaaattcataattaattattctgatgctcaaagtcttttaaattaccataccatatttgtgcaataaataaaaggtcagcatatagatccccgactttttcaataagcaggagatctgaatcacaagaaaatcgccgaaaggcacggaagccacttggctatcttacagtggaggaaagtgttaataatttgtctgcgtttcataatctttttttaatttccattactctatcttctgactgataatgcaatgtatcaggttttttggatcaaaagatcccctactgcttcaggacttacgcacaacacaacgaaggtaggcgtaattcatgaattacccctacccaagaatcaggtttttatttgaatcttgcgtcagtcctatttaatactgattactgatagctgaatgcttaaaattgtgccataaaacgccgatctatacagtctttcccatgccacaataattgatgcggtggtaaggtgaaatttcctcttgtagctactgcgcgtccgtcaccagtaccaattaaacttaaatactctttttgtggtttgtagggttttagcgatttatttaaaatcaatcttcgcaaattttcatacagtggtttaccttgacgcaccgcaaatacacctgcttttggtaggtgataattaatcattgtggcaatatcacctgctgcaaaaatctgtggatgactaatagattgcaaattatcatttactaaaataaaccctttttcatccgtagcaattcctgaatctttgacccaatttgctgctgaggcttgtgttacccaaaatacttgattacattttaactttaacccagattccgatgtaatttctaattgattatctcttgtaggtgcaacttcacagacattttcacctaaatgtaattttacacctttattaattacaacatcccgcataattccccgtacagatgggtggtgatttggcattaattccccagtgcgttgccataaatgtactgttaaattttctattcctaatttctgtaaacctgccaacattgataacgctaattctacacctccagcaccaccaccaaccacaccaatacttaactgtttttgaggattttcagaaaccatattttgtaatttataccaatgttctaaaaattgtttaactggtttagcagcaattgtatattctgccgcacctgatacagacaatttagcgggagtgctgccaatatcaagagatagaatatcaaaatttaccacagttccgttagcacaaaaaacctgattattttctaaatccaaaccaactacttgatcaagatataactgagcattagcaaatttgcttaaatttggcaagtcaatatgacagtgagaataattgtaaaatccggcaatatgtcctggtaacatcccagagtagggtgtatattgatctgaagtaattaaagtcaaatttactccagccacaggttgattaccaaaaagtttcaaaacaatggcatgactatggccaccacctatcaaaactaggttttttaggttttttaggcttggttgagaattttgctgcatctggaaactgcaataaactgcaataaactgcaataaatttcatcagggattcaatatcaatataatcatgattcccatcggttggtgaggaatcatccactcatagccaatttttttaaatatcccagtaactcaagattatttttatgtattttggtaagaaaaatcatccattggacgctggcaattcagaaggaggtaaagaataatcaaagcgataactctcatcaagattatttaatgaaacttctacaacgactggagaataatacaatagaaaccagtttatctgcaattaatgaattggaacgtttggcgcaagataatccacaatttcactggataattatggatatgctgactaattttgtcagagagaaaacagctaatctacccccagaagaagtaattagcgattccttggtagacaaacggatactgattcaatcagctatgattgtaattggtaaaagagacgtaaaacaagacccagaaaatgagcagattgatttaagttacacagatttaaggggactaaacttacaaggtataaacttagcacacactaacctttatcaagttaatttatcacaagcaaatctggttggtgctaacctagagggtgctattctcagtgcagcaaatctagctggtgcaaatctaactaatgctaacttacatcgagctaatttatatttagcgagtttaaaagatgcaattttggatgatgctatcctggagggagcaaatctacgagaagcgaagtttactatttaatagaccatatatacgcgaaaacttctgttttaaggggtaaaaaggaaagggtaaggaaaaaatctttacctttttttgtgtgaaataaaattttacatatctaaaattgcagctaaatgctatactgttttcttctatcatctcagtaataactcattattgtgaagcatctttctggtatgtctgctaaaaagacagatgcaacattgcattggttgatcactatcatcgttattgtgcttctgtcattgatactgattgtcttcgcatctactaatattgacaagttatcacttcaacagcaaatatctcaaaaaaatcaagcattaactactattgctatagtttttctgggtgtagctgtcatagttaatgtttattatgcagccaaaagaactcaagcaatagaaaaaaatgcaattacatctgagaaaaatctagcaattagtcttgaaaataccaaacttcttcaagaaagactgatagcagaacgttttattggcagtatttcccagttaggacatgacaaggtagaaacgcgcacaggagctatttatgctttagaaagaattgcccaagattttccccaagaacattggacaattatgcaagttctcactgcgtttgtccgcgaaaatgcacccatacaactagagagaaaagtacaaaaaccagaagatttcatgactattgatttcggaaacaatcgtgatcggatacgccgacaacagcaagcaaattattctctaccattagaatcttggaaactgcgtactgatattcaagcagctttgactgtgatcgggaggcgcaattttcaacatgatcgagaaaatcaaaaattagatttacgtaataccgatatcagacgagttgatttagcaggagctaaactgcaaggggtagacttacggggatctgatgtgtgtggtgcagatttgcgaaatgcggatttaagtgaggcggttttggatggtgctaaactcatcggttctattctttatcaagctaacttatttaaggctagtttgcggggagctaatttgagtcgttctaatctcaatcttgccaatttatatggagtcaacttgagttccgctaatttgtttggtgcaagtttgcgttcagttaatttgcaatctgccaacttgtataaagctaatttgcaacaagctaatctcaaggctgctaatttatcaggtgctaagttatttttagctaatttgcaaggtgcgaaattagggaaaactaatttacgtttagcagggttaattgctgcaaatcttaatggtgcaaatcttaatggtgcaaatttacaaggtgcaaatttgaatgctgcaaaattacagcaaacagatatttattttgctaaccttagtgcagctagtttaacagaagccgatttaaatcacgctaatttgatgggtgctaatctttctcaagcaatacttgatgaagctgatctttctgaagctaatctcatcggtgctaatttattaggcgctcaacttgatgatgttaaactgactggggcgattttaaatggtgctaaaaacctgaaatctgaacagatcattaacgcagtgggcgatcgcactactcgccttcctgattatatcgaagcgccagctaattggcgagaatctgtttaattctctaattaattatctaaaactgtcttttttgctactttcggtgcattctacctgttgatgatttttatatttattgttattaattgatcatatttatctagttttaagttattaaattatgacttattttttgtcagcaaagcttgattttaaaacaatgaattcgtaatcaaattagcttttcatctgagaggattcatagtattttttaaccaaggggaataactgtaagttttaacgttgtttcaaacttttatctgacaaagtttgaaaaataaagttggaaaaattcagactgcgaaaaaaagatcattattttaaggataaaagtctgatgacgttgaataatactaactctttttcctcccgtcaggaaatcaacattacacctgtttactcaggtgatgcttttgcaactcccattgacaatagtttaagttggagtaatcgtagtagcttaccaaaagatgcaaatattcagtctcatgtgactgcaaacagctataactctcaaaatggttatggtttagtcaatgcaggaaaagcagcgagtaaagcagttggtgtaaccccctatccagatgctccaaaattgggtggaaataattggggtgcagacatggtaaatgctcccacagcttggcaaaatggacatacaggaaaaggtgtcattgttgcggttttagatacaggcattgactataatcacgaagatttgaaaaacaatatttggacaaatcccaaagaaattgctggtaatggaatagacgatgatggtaatggttatgttgatgatgttttaggttggaattttaatagtaacaacaataatattttagataataatggacatggaactcatgtttcgggagctattgccgccgaaaataacggtattggtgtaactggaattgcctataattctcaaattatggcagttaaagttttagatgaaaatggctcaggttcttatgcaaatatcgctaatggtatccgttacgctgtagataatggtgctaatgttattaacctcagtttaggaggaaattctggtaataatactctcaaatcagctattgaatatgcgagcagtaaaggtgtaattgtggtgatggccgcaggtaataatggcgatgctacaccatcttatcctgctcgttatgctgataagtcaggtattgctgtgggggcggtagatcaaaataatcaactcactgatttttctaatcgttctggttctcaagaaattaaatatgtgactgctccaggtaaggaggtttattctacaattcctgataatcaatatgctagttatagcggtacttctatggccgctccccacgttgctggtgtagtagctttgatgctgagtgctaacccgaatttaacagaaagtcaagtgcgggaaattatcatcagtacggcggaaaatggtacaaatccccaacaaccacaaccttcaaatccttcgccttctctaccttctttctttccgcctttagattctttttttcctattgatatgattgatattggttctcaatttcctactgatattggcaatattggtggtagttttcccttaccttttcaatcagaatcaactcaattaccgtcggttgttgtatctattagtaatgaagatttaggattaaaatttgatgattttaatgctaaaaatcccaatttagaaacccttaattactacagtgagagcaaagatagatgggaattacgggactatgatatgaatctagaaaatatagatatttggagtttagactatgtttagttttacccagaagtgttgaatgttaagaaatttgtgataaaaattgcccaaaatatattaaaatttgggcaacctatatcaaagtattgatttgataatgacaggatttacgcaaaagagaacgaaagtaggggtaattcatgaattacccctacgcaagaataaggttttcagtcacatcttgcgtaagtcataaatgattataaatacatttcccaagattgtcaaagacatcctcaaatccttgccaaaaaatgattatccggttttgaacacccgtctttacgttgagtgttagttgggttatgccttggatatctgttcctaaagaatggggtaataaaatgttagataaattccgctatcttcaagcttgtatgtgtcaacaaatcagttatgttcattggatggaatatatcatgagatgttgacattttcacccttaatagaactactataactgaatatgtaaacttttataacgacattcaacatttctggtttatctacaaatagatttaattcaaggtgcggttagaatctttggaaaataaacaggataattgaggatgttgaatttgattaatatttatcaactataaaaagggcgggcaagacttgtactgagaggttagtgagcttgtactgagcgacctgtactgagcggagtcgaactatgtcgaagtatgcccaccccacaagattttgcaaatatttaataataattacctcacagaaaaagcctcactaaatctgcgggtaattggctcaacaataaaggttaaaatcgacttcttccgcgtcacaatctccgcatttgccaccatccccggcgtaaattccacctctttaccccgcacagtcatggaatgcttacttaacttaattctcgtcggaaaaaccaaacctaatttttcatcaaccaccgcattcggactaatttgtaaaacttccccatcaactacaccaaattcttgaaagggaaaagttgctaatttcacctttgctttcattccctgacgaataaaaccaatatcccggtttaaaacttttacctctaacaacatttcttccccttcgggtaaaattgacagcaattcttccccagactgtacaggtcctttggtagctttgactttataaattgttcctgctactggtgctttaattgtttctccatctttttcttgtttcgcttgttctaattgtcctgcaacattggctaattcttctttacgtctatttatttgcgttaaaatttcactttttctttctgatgctaatcttaaaccttgatttttggctgcttgataagcttgttcagcttggttaatttcttgtttttgagcagcaatatcttttcctaaagatgctactttatcctgtgtttctgtaactctatttttggcattagttacttcattcgtggctctaataatatcagtattggctcgatttaatctttcctgggcttctaaataatcaactctgggaacagcaccaggatttaataaggttctcaaattttcttctcgttgttgggcaatttttaaactttcttctagtttagcacggatattttctgcatttactaaattagtttgagcattaatcacactggttttagcattagctaaattttcttctaaccgagttaatctaattttcgcttgtttgataattgaaagttggcgttctgcttctgcttctgctgctgcttgtctagctttataatctaataaccgggaatttaataactcatcttgtaattttgttcccgcagtatttcctccggttctttcagcttgtaatctttgtaaatcttcttcaattaatttactagatttagctaatctgtttacatcggtttgtttaaaattggggtcacgttcaattaatatttgatctttagttacgcgatcgccctcattaactttcaccgctacaatagatccattacctaaagatgtcaccggtctcacttgagtagaagcaattaattctcccggtgctgtcgctacttcatcaatttctgaaaaatgcgcccaggaaatagtaccaaagacaataacactaatagttcccgctaataatcttgtataaagtggtggtaattcctgtacagctttacccaattcataggataattgttcctctggtttagcaaaattttcttttgtttgacgtgcttgaacaggatttgcagatagggaatatttcatatatttggtaattggtaattggtaattggtaattggtaattggtaattggtaattggtgattggtaaaaataaaattgattacccagtcaccattcaccattcacaaaaattaaattgctaaataacgccgcaaaaagttttctacagtttccaattgaaagttataaattctttctaaattggcaatttcttctgatgtacagtaaaattcattagctaataatgtgcgaaaagttcctaaacttgtttgtgctgaagagttcaataaacctaatgctccccgtaaaccatcaaccgcaaataaaggaacattaatgatgattggttgtttgttaaagatgcgactaaaaattttgggaatgtcctcacgcaataaaatttctggtcctcctactggtaaaatttgattacgagcctcagcaacagttaaagaatctaccactattttggctaagtcatcggtactaataatagatgtgcgatttttgggatcaccgatgagcaaatataaaccagtttctcgaaaccgttccgctaaaggtagcaggtttgatgctaaaccagatgggcgtaaaatagtgtaatttaggccactactttgcagatatttttctactgcgcgtttagctttgaaaacgggagcgtcttcatatcctctttcagcacctaaaacggatatcaagacaaaatgctcaacaccctgaatttttgcctgatcaattagttcaatattagcgcgataatctaaagataaagcatcatttcctgaaccgtgggcgctaatgatatatttcacaccttgacaggtttttttgatatcctgttctcgccgcaaatcaccaataaatatatcagaaacccggtgttctaactcgctgtaatgagacgtaagacgaacaaaacaccgtacagatttctgttgttgacgtaataaccgcaccacgcggcggccaatatctccggttgctccagttactagaatcataacctttggatttgagtatggggctttatgtagttaagtttaatcactattttcaaatcagcaaattcctaaaatccgaaattctacaatttttgtttaaaataataatgttgggattagttgggatttagtaaaactgatgcaaataccagaaacaaacccaaagctgaaaatacctgtatccagtctctatgttagtgacttttatgcttggacacaggaacaagctgatttactccgcaaccatcaatggcataaaattgattggcaaaatttaatggaggaagttgaatctttgggaaaacagcaacgtcaagaactgcgaaatcgtttgagtattttaatcggtcatttattaaaatggcaatttcaaccacaaagccgcagtcgtagttggttagcaacccttcgcattcaacgcttagatactattgaattacttgaggaaaatccgagtttaaaatcctatcttgaggaggcacttggtaaagcttatttgaaaggtgtggaattagctgttaaagaaactgatttacctcgtagcaatttttctgctacttgtccttatagtttgacggaaattttagatgatggtttttatcctggtgaagctagtgagttagtcaatgagtgagaattgttaaacatttttaatagtcttattagtgatattttgtgtagtcttgattttacggaaataagcctaaccgaatccataattgccttgctatcacttgtgattgactatttagttctaaagtttttacagttgctcgtccgataggcgttatacctataatcaaaccagtttgagaattaacttgaaaatgatcttcccatctgtcttctctgggattaaaaagacgaacttctatattagattcaggatctatttcactaatacgtgttcctttacgcagattacaagaacgacaagcaagggcgagattaaattcaacattagcaccaccacgagaaataggaactatatgttcaacctcaaagggaaaattaaatactaattcgggtgcatgacaatattcacaacgatgaatggcgcgatctgccaccagattataaaatgggttcattgacttgatcgttgtgctaaatatgctgttctggctgtagcagcattgagttcaagattaacaagattatctaactccatttgtatttctggggaaagtatctgtccttgatctcttgctgttctccacatattcattagctctgataaacgttgttgttgctcgctagtaaagaattggtcaggatgaaagttatcaataactaatatggcacgaaattcaactttacctaactgcgtagtcaaagcatctaaagcttgacctgcggttttgccaacacattgtttatcaccagcgatggcacgataacacacttcaccactggcatttgatatgggcaaaatagcaactgtagtcataatgctgatttgggtatctgttgtttattaattataagctctactgaaaacaggcgatcactttctattttttagcttgataaagtgcgattgcgcggagcgcactgccgtaggcgatcgctttacttgctatcctctaaaattccaccaccaccggcgtatgatcactaggtttttctaacttcctgggtgcaatatcaataatacaactttgagcgcgttcataaagcacaggtgttaaataatgatggtctattctccaacctaaatttcttttaaaagccgccgtccgataatcccaccaactataatttcccccctcttgattaaactttctcaaagcatccgcaaaacccaaatcaagtacatcttttaaagcttggcgttctggtatagatgccataatgtgattttctatttttactttgtcattaatatctatatcttccaaggcaatattaaaatcaccacacatagaaatagccggatttgataatagtaattgctgcaaatatttccgtaatactgttaaccaacgcagtttatattcatatttttcacttcccaccgatgaaccattaggaacataaagattaacaattctcactccatcaattacagcactaattacccgcttttgttcatcccaaactggatctaaatctgttaacactgaacagaaacccatactcacatcttccaaaggttgacggctaatcagtgccactccgttataagctttctgtccgtaaatataaagatgataacctaagttttcaaaagaatttaagggaaaatcctgatctacaaccttcgtttcctgcaaacacaaaacatcaacaggattttcacttaaccagttgatcacctgttctaaacgagtccgaattgaattgacattccaagtagcgattttcatgagttacttatcagtaggatagtaaataaagaaatatagaatatgtaaattttttgtaatcatttttgattgttaatttttttgatctatcttccattcacgcaaaaataagctataagtaattgatccctgttgtaaatgcgtattcgcaaatacaaaataggcaaaattgtaagttaggatacagaacattataaatgattatgatcccccagatagatgaaaatataaaatacttgcttgtaaactaataaagacgttaattgttagcacttgctacgactgtgatattacatttgtgagtgagttgataatacagttaaccgagaatacgcttttctaatagtcagtcagaaaagttaacttaaatggaagaaaagtaagtataaatgcttttacctcataaaataatttcaggattggtagcaggtgatgtcaaatcaataaatcaatataaatcaatatatatgatgttgacactctttgtagaccaaaccaagaatcgcaagatatagcatattagctcaattttcaccagaaaatatcccaaaatatgcaaattctgtcaccaagcggagaggttggaactttcacagatacatccatttaggtgtaatcaaaatttttttgctcgattacaacaacaaacttttttaggaggacattggtatgagtaatagagccaacacttgcccatgctgcggtggatcaatcctacgtcatgtccgtcatggtgaactatattggttttgcctttcgtgccgacaagaagtaccactgttaactatcagtcgcttatcaaatcatttagaaacccgtaacacaggagtagttactccgtctgctgttaactcagtagagtaatctactgcggctggttctgaatatctacagagtggaaatagacaagtgaataccatatttcttgagagcaagcgtcaagctagagatggcgcttgcgctttggtttgactttgttgccagaacagcggataacttccagttaatgtcgatatgatataaaagtagataaaacttaaagaatattcatcaaatgctgattcactcatctgacttgcccaaagtcaaagactcagtaggcaaaaaaattctcttaggtaatgaacctaaaccagaactaattgcgattctagcagtctactttgttcaaggcatattagggttatcgcgtctagccgttagctttttcctcaaagatgaattgcaactgagtccagttgaggtatcagcactgttgggaatagttgctctaccttggatgattaagccattatttggctttatttccgatggtttgcccatatttggctaccgtcgccgtccctatctagtgttatctgggatactgggggctggtgcttgggtaagtttgggaacaatagttaatagtagctgggcggcaacaattgcgatcgccctatcttccctttccgttgccttcagtgatgtcattgtagactccctagttgtcgaacgtgccagagtagaaacccaagccaacgctggttctctgcaatctttgtgctggggtgctactgctcttggaggcttaattactgcttactttagcggcttactcttagaatatttcagcacacgcacagtatttttagtcactgcattatttcccctcattatctccgtggtagcttggttaattgcagaaacgccaattaacaaagacactataaaacctcaagcaaataatcttctctccacctccaatcaaattaaacaactgggtaaagcgattacacaaaaagcaatttggatacccacagcatttatctttctgtggcaatctacccccagtggagaagcagcttttttctactttttcaccaacgaattacactttcaacctgaatttttaggcagagtccatttagttaccagtttagcctcattaattggaatttggattttccaacggttcttaaaatccgtactatttcgagtaatttgtggctggagcatcgtcatttctgctgcattaagaatgacaatgttaatattagtaacccacactaatcgagcattaggaatagatgatcaatggttcagtttaggtgatagcttaatactcgcagtcatgggacaaattgccttcatgcccgtgatggtattagccgcaagaatatgtcccttgggaatagaagccacattatttgctctcttaatgtcaatcttcaatttaggaggagctatttccagagagtttggggctttaatcatgcactggttaggaattaccgaaaataactttgataccctctggttactagtaattatcaccaatgtaattgcccttgtaccattgctatttatcaaatttttaccaggtgaagaaacagaaactatcacatctactcaaaatccagtaattcagtgaattaattaaaaccatttaattttcatttctgttttttgaaaagtacatttatgatgtactgttgaaaaaatatcatcttgtcttgaaaaaaataaaaaacaccaaaatatgcagattttagaacctcaaaaccagcaaacgttagcaaaatcttacaatcaagaagattggcaaaaaggatatgaatcactcaaacaagaatatgattattggattgatgaaatagaaggggtaatacccgcagaactacaaggaacactattgagaaatggacccggtttattagatatcaacggacaaagattacatcatccctttgatggtgacggcatgatcagccgcattacatttactaacggacgcgcccattttcgtaataaatttgtagaaacagaaggttatttagcagaaaaaaaagctggtaaaatcctttatcgtggcgtatttggtacacaaaaaccaggaggttggttagctaacgcctttgattttaaaatcaaacatattgctaatactaatgttatctattggggtaaaaaactattagctttatgggaagcagcagaaccttatttattgcatccccacaccttagaaacattaggcaacgaatattttaatggtgttttatcccaaggtgaggcatttagcgcccatcctcgcatagatcccaatggtaaattagttaattttgccattaaaccaggactatcaaccacaattacaatttttgaactcaacaccaacggcgaaattatcagcaaacaaaatcatagcgtgcctggtttttgctttattcatgattttgtcatcaccgaaaattactgtatcttcttccaaaaccctgttaattttaatcccatacctttcgctttaggaatggccagtgctggacaatgtattcaagtccaaaaaaatcaacccacaaaaatcatcattattccccgcaaagatagtcaagctgagaaagaagaagtcagaactttagaaacccaagcaggttttattttccatcatgtcaacgcttttgaagtggaaactgaaattatcattgattcaatttgctatgaatcattaccagaagtagaaccaaatactgattatctacaaaccaactttgacaccaatgcaccaggacaaatttggcgatttgatattaatttgccggagaaaaaagtacaaagtcagttaatagataaacgtgcttgtgaatttcctactattcatccaaataatgtaggaaaaccctatcgttatttatatattgctgccgcacataaccctataggaaatgcacccttacaagctatttggaaagtagacttagcaacagaaaaacgagaaatttggagtgcagcaccacggggttttatgggtgaaccaatttttattcctcgtcccaactctcaacaagaagatgaaggttgggtaatagctttggtttatgatgcagaacatcatcgctcagatgtagtgattttagatgctcaggatttttcaaaaggtgcgatcgctaaattacaccttaaacatcatattccttatggtttacatgggagttttacaccagaaacattcatttaattaatgtaggttgggttaagcgtaagtgcaacccaacaaaatcatattaaatagaacggaaaaacacctttaaaccatcactcggttgaggtgtaggtgtcatttttaaatctaaattttgtcctggtacaagttcccattcataaccacgcaacagtaaagcagcaaatattttcatttccaacttagcaaattctttacctaaacattctctcatcccaccaccaaaggtaacataactaaaaggtttagatttttcctcatttctctctacactaaaccttgctgggtcgaaagtttgagaatttttataaatagtttcatcttggtgggttttccctatttgatacagtacactccaaccttgaggaatactatatctattaaattcacaagttttagttacagaacgaaaaccaccaccaacagggggaataactcgcaaaacttccttgagtatttggtctaaataagtcatttgtttcagatgttcagaggttaattcacctgtagaatttatttgttgttgttctgttcttgctgctgctagaatgtctgggttttgtgctaacaacaaacaaaaagaagacattgccgaagttaaggtttcatgtccagcaaataataatgttaaaatttgatctttgagttcatttacactcaaactattaccatcttcatctttggcatttaacaacaaacccaaagcatctttttctgaattttctgagattggctgcttttgacgttgtaaaattatattttcaattttcgctaataacagttctcgactttttagagctttaccaaacttagtccaaggtaaacgaatgggaagagtaaataaaccttgacaccattcttcaaataattcagcaaaatgaggatcattagtagtatctgttcctactaataatttacaagccacatcaaaagtatattgtctgatttcaggataccaggttaactgacctaaatttacccatttttgtaaatagctattagtaatttccaccattgtaggtgtataacttgctaaagctctgggtagaaatgcttgagctaataatttacgtcgggtttgatgaatgcttccagtttgcgttgctaaagatgcaggaccaagcaattctgaaacagtcttaggccattgaattataaaattctgattttcaccactaaatacaaagcggtttgcatctgctcctatcatcataattgtaggagaaccaaagatattagttttaaaaacgttgccgtatttcttttgtcgtttattggcaaaatttctatccgttaaaaaactaattgtttcaccaatgataggtaaaccaaagtttcccggtggtaaaggtaattgattattatccttgctaatactgaccatatttattttcctttgtaatttttgattgtttattttaaaataatatcacttaaacctagtgcttaaactgatatttatttttggatattcggatttttttctaataaaagattttccaattcttgaattctatcaagtaatttttgataactatctgcggaaataatcacatgactaggccgtgactgtttaatgagcaaaacaggttcaaccgcagctttatcaaaaacctcaccgtgtttattacgcgcatctgtgagagtgtaggtttgcatagcatgactaatttagacattttgactataattttagcaaaaatcaagcaacccacaaaattaactccacaaaattaactttggtagcaattctgccacatatccagaaaaataaaattgtaacgaaaactacaaaattcttattttttcaaaaaaacagggtaagctaaccatacatatccggttcaccaaagtaccgtgatgaggagtaaatgttatggtgacaacatcgcgcccattgtgggaaaatcattctccagcccatatttgcccgtttgaccaagcttgtagttatttggaatgggcaggtaaagaattaaaattagatcctggtttattagaaatacttagtcatccccggaaagtcgtcaccgtttccatacccgtcaaaatggataatggggaagtgcgagttttagccggacatcgggtacaacattctgatattttaggaccatataaaggtggtattcgttaccatccggcagtgactttacgggaagtttcggcattagctatgttaatgacttggaaatgtgcattgttaggtattccttatggtggtgctaaaggtggtattcccatagatccgaaacaatatagtgtagcagaattagaaagaataagtcgccgttatatcagtgagttaattaaagatattggaccatcagtagatataccagccccagacatgggtacatctgcgcgggaaatggcctggatgatggatacctattctgtgaatgttggtcatgctgtacccggtgttgttactggtaaacccctttctgtaggtggttctctgggtcgagaaatggctacggggcgcggtgtaatgattattgtccgggaagccttggcagatcaaggtaaatccctggcagatgtaaaaattgctattcaaggtttcggtaatgtggggggtgctgcggctgaattgttataccaagcaggggcaaaaattattgcggtttccagtggtgctgggggtgtatatgcggaaactgggcttgatattccggctttaaaagcttacgctgctcaaaatcgtcgcagtgtggtgggttttccccaagctattcccattagtaatgcagatttactcattttaccttgtgatgtattaattcctgctgctttggaaaatcaaattacggaagaaaatgtgcatcagattcaagcgcaaatgattgctgaagcagctaatggacctgtgactttggaagctaaccgagttttagaagccagtggagttacggttttacctgatattttagctaatgctgggggggtagtagttagttatttggaatgggtgcaaggtctttcttatctgttctgggatgaggaaagagtaaaccgggaaatggaacatttaatggtaaatgcttaccgtcacgtgattcaacaagcacagactcgcagagtaaatttacgattagccgcttatactcttggtgtgggtagagtggcgcaagctttgactgataggggtttgtatccttagttatagggttataactcgttcccagtctctgactgggaatgctattacagagtctctgactctatcatcatagaagccagagtcttctgatgttcattccctcatcaggtaaaaataacggcgaaattgcgcgaatattagatattagtttggatatggctcggttatggcgaaacttgaaattaggcgatcgctctcaaccgtcaggtgatatagtaaatttttgcttgataatcacgcttttactatttaaattgtttccaatttatttcttcaactaatttaagtttaggaatatcttgtatggcaagttgataactatcagttttagacaatatatcaactaatgataacaaatgaatactttctggttttaggtatggatgaccaaatagacgatctttaaatgttttcttatatcctacacctgataacataacactaatttctgctcggtgatacatcatatcagcatataaaatttttgcatgatctaccgtcaattctgattgactaagcttactttgaaaatagaataacctaccatcttcgcggataaccccatcaattccaccatctttacctagtggtccaggatgaaaacctaaaattctggcaaaagtacgaccaagttcttgttttctttttgaacttgttctcactattcctaatgccagattatatgctatgtactgttccatgtaaatactaaaattaataattaaaaaatagccgatgtttctaattcaattaatcgggaatgcaagagaataattcccaaattcaaatagataaatattgcatcctcaattccagattttaataaggtatcaagagtgcattcattaacttcaaacatcaaagtttcttcatctatgatcatatcttcaactttttttctcagatgttgaattttgatctgattttgcattgactcatgataaccataagcaaatgccatatttaaaatagttttctcatctacttgcaaccgcatttgtagatcatccagctgtattttacattttttaccaacacgaactggagaaggttgcattttaccttgacgcaaagatttgagagcagatgttttcattgtctctcttatatagtcttcttgttgacgtttcaattcatctttactacgtgcgatcaagttaggatctcgatgcttttttggtggacgagtagaagatgtatgattagcttctgccatttttttactccataactactcttttgtagtaatcccataggtgatcacaatctggttcattccataaatagtcataattaatgaaaactgcattaccagctttcataggcaaccaatcaacaggatcaagaatttaataattagtaaaccgattatcaataaactgctgaaaatcatattttgatactcctattggtacaattttcacctggatagaaccaataataggacgtgcttgttcaagtgctattagcatatcatttaaacttacaaatgaacctatatcatcttgcttaactcctagtaataccaaatcaggtgtaacctcaaacaagaatttagaaatagatgttagatcaggtgaaacatcaataacagtatgagtaaattttttattttttgctaattttcctaaagttttagctaaccggtcagggttactcttatcactttcactgacgactgtaagtttatcttcttgggttacaagtgtttcaccacctggttttggtgctgatccttcgctaaagaatttgaaactgtgagcttgagagtcaccatctattaagagtaccttattgcccatattcaggaaaactccagtaatatgaattgcagttgttgttttgcctactccacccttatggtgaacacatagaactttcataataagctatactcatctaatattttattagtttttctaaaataacatcaaaacgttctcacatcggtttcttatgaaaatccgctaaggagtatatagcagtgtagccagatttagtaggcttagaaatcagcaaaggtgaactaaaacgcttaacagggtttgacacagaggacgtatttcgtccttcaattatggcggataagcaaaagcgcattggcttttttattaacgaagctttggttgctttagcactgacaccagttattgttagttttatttatcaagaacataagtgatatctgcactgtaactgattcgagaagatttagttcgcgctttgaaaagtgaacggattttgcgccataataaaaaactgcttgctaataaccaagagttacttgcaaataacttagccaatttgcaaaccttagaagttagtaatcaagctggggaatatgcacaacttttaaatcaatcattgcagattgctttagatgtacaagcagaactgaaaaaattacaaaaagtctaattaagttgtctacacaaaatctgatgaataaccaacccaaaataatcgttttagatgatgatcccaccggttctcaaactgttcacagttgtttactcctgatgcgttgggatgtagaaaccttgcgtttaggtttaaaagatgatgctcccattttctttatcttaaccaatacgcgatcgctcaccccagaagatgcagcaaatgtcaccagagaagtttgtcataacctcaaaatcgcactagcagcagaaaacatcgaggattttctcgtagttagtcgttctgactccaccttacgcggtcattatcccatagaaaccgatgtcattgccgaagaactcggaccttttgacgctcattttctcgtacccgcattttttgaaggtgggagaattacctgtgacagcatccattatctaattattgatggtgtacccacccccgtacacgaaacagaatttgctcgtgattctgtatttagttacaattacagctacttacctaagtatgtagaagaaaaaaccaaaggacgcatcaaagaagatactgtcaccagatttttacttgatgatatccgtaaaggaagcttagaaagattattgcaactgcatgataatcagtgtggggtagttgatggggaaacccaagccgatcttaacacctttgctgtagacatattaacagccgccagtcaaggtaaacgctttttattccgttctgctgctagtatattaacagctttagctgctttacccccccaacccatagctgcggaaaatatggcagaatatgtgcgtggtggtaaaccgggagcagttattgttggttctcatgtgaaaaagacaactcaacagttagaatcactgttaacagttgcgggaacggtagggatagaagttaatgtcggaaaattacttgatgatggagtcaatgaatctgctaaactgctaaccgagattctagaacaaatccgggaagtacataacgctggaaaaacaccagtagtttatactagccgtcaggaattgacttttaaagatgtcaaaactagattagactttggggcaagagtttcggctttactaatggatattgtaaagggtttaccagctgatataggatttttaatcagcaaggggggtataacttctaatgatgtcttgagtacaggtttaaatttaacttctgctcggttattaggtcaaattttagccggttgttcaatggtaattacaccatctgatcatcctcagttttctaatttacctgtggttttatttcccggtaatgtcggtaatgctgatgccttggctacaatttatcaaagattgactaatcagtaatcaggaggcagaaggcaggaggcagaaggcaggaggcagaaggcagaaggtaaatatttctccccaatcaccagtcaccagtcaccaatcaccaatcaccaattacccattaagaatgaattctgattctaagaaatcaccaaaagatttggaaatggagtcaaattctgcatttaccgatgcagaatcaatctctattaatgatgatagagaggaaaaaaatgtcaaccctgttgataaagagggagatactaatgtagatgttaaagatagtgattctatcattcccaatggagagctaaattctgttcttgtctatttacaagctcatgcagatgggaagatagactctaattctgaagaaaaatctgaagagaaatctgaagataagaaaacagaaacaagcaattttgaattgattgatctgaacagcgatgagttagtatcaacaggaaaaaataacaacaataatattcaagttcagttaaaaaccgaggagggaagactattattaattttgccaacagaatctcaagtacctgcttctgagttcagttgctccgagatttggcaacaaatgagacagagactaaatggtagcgatcgcctacgtatacctaatactatagtacatttggtagcgaaagaccgcttattagactcaagacaactgcaagaactggcacaaactttaaatgaactgcaactagaattaaaatcagtcgccacaagtcgcagacaaaccgcaatcgccgcttgtacattaggttattctgtcgaacaaatccaactacaaccatccttcaccgctgacgctcaaccaggtcctaaacctctagcagatgcgctctatctagaaatgacagtaagatcaggtggagaaattcgccatcccggcactgtgattattttgggagatatcaaccctggtggtattgtggttgcagatggtgatattctcatttgggggcgtttgcggggggtagctcatgccggcgctgggggaaatcgtgattgtctaattatggctttgcaaatggaaccaacccaactgcgaatcgccgatgcagtagctagagcgcctgaaaaatcactaacacattttttcccagaagtggcacatatcacacccgaaggcatccgtattgccaaagctactgatttttctcgcagtcagttaagtaaaattaatcaaagtctctatggcaggagtcaggagtcttaggggcgaagcattcggaaagcaaccttggacaaaaattgataatttatcgcccgaatgctgatacttccagcacgcttcgcgaacgcccgtacaggagtcaggagtaaaacctgatcatgctgaaagtttcatcatatattgatgttatcagcgccccgtctactgctataactatttctaaatattctctcaatatttagtattatttccaccaaccctaatcgagcgcattgctgttatgagtcgtattattgtaattacctccggtaaaggaggagtgggtaaaaccacggtttccgcaaatctgggtatggctttagccaaaatcgggcgacaagtggccttagttgatgcggattttggtctgagaaatttagatttgttgctaggactagaaaaccgcattgtctacacagcggtagaagtgttagctagagagtgtcgtttagatcaagctttagtcaaagataaacgacaaccgaatctggtactactaccagcagcccaaaatcgtaccaaagacgcggtaacaccggatcaaatgaaactgctagtaaatgcactagcgcaaaaataccaatatgtagtcatagatagtcccgcagggattgaaatggggtttaaaaatgcgatcgccccagctaaagaagccctcattgtcaccacgccggaaatctccgcagtccgcgatgctgaccgggtagtaggattattagaagcacaaggtgtgaaaaagattcatttaataatcaaccggattagaccggcaatggtacgagcaaatgatatgatgtctgtacaggatgttcaggaacttctcgccatccccttaatcggggttgtccctgatgacgagcgtgtgatcgtctctactaaccgaggtgaacctttggtattatcagaagctccttctttggcagcctcagcctttgaaaacattgctcgtagattagaaggggaaactgtcgaatttcttgatcttgactcccccaacgacaacttattttcccggttacgcaagttgttacggacaaagattgtttaatttttttcagttaccgccttataacctagccagcaatgattcttgaacttttagaaaaactttttgttcgcacaccaaacaccagtcgcactgaagttaaacgtcgtctgcaagtagttatagcccacgaccgagcagacttagatgcccaaaccttggaaaaaatgcgtcaggaaatcctagcaattgtctgtcgctatgtagaaattgaaacagatggtttggagttttctttagaaagtaaccaacgcacaactgctttaatcgcaaatttacctattcgtcgtgttaaggaaaacactcctgaagtagaagaaacagagacatctattgaggtttgatctcaatacttttcggttaagcccaaaacaacaaaataacgtaggttgggttgaacgaagtgaaacccaacaaacccctgtaaatgttgggttttgttcctcaacccaaccttgtatcttagaggagggtgggttaggagtgtattaaatttgcactgtaagctcttgtcagaatcaggatttttcgtttttttaggttcaagacttgacaagtcgcaaaacttgttgtacagttatattatgagtagaaatatgtagagtcagatatagtaaacttttaaatattcaacatcgttattttcactcgcattcaaaaaaaccccactaccaatttatcaatcacatcctgaaaatcctttaatcctggttatcctgattcagacaatatgcaagcttggacacccgataagctgttgtgcatttaatttgtataagtggaacaggcatcttgcctgttaaacaagagttcagaatattaggattatacaatttagctgtgtaacagcttaatttctggagatgtctaatgtttggttgtccgctttgttttctggtgtatctggtagtagctatattgaatattgttaattttagtaactttagctaatttttcactcattgtattttcaaggcgttgctgatttttgggatgaaaaacaattttgcatatacttaaaacccttgtagagacgttccatggaacgtttctacacccaaaaaacatcccgcatttatgcaatgccaaaaatctttttttccagaagatcaagagaacgcagataaactgataactgataactgataactgataactaattaaatcaatcctgctgattcataaagtcttttaaacaaagctttcattttagttccataatctaaatctgcagaccatcttcctgatagttgatctacagaaggagcgacacccctagtcacaaatctaaagcgaggatctacttcttgttgtaccaaaggttctaaactagcataggcttttaaatgttgaatatgcgctctcactcctattctggcactaggaaaagatgctgcttctgaaccaccacctattgctcctaaaccagcaaagttattttgttgaggtctaatatctccaccaaagcgtaaaaagccagtttctaaacacatttgacaaaaggcaagatcatgatttacgccttcaatgatcgcttcttctcgataaagtttaggaatgtcaggaaactgcactagagcgttttcattgttattccgcaaaaagatttgtagctgtacttctgtggtatttccatgagaaataatttgatcaatgtgtgccggacaaattgttaaaatggaacggagtttaagagtacgagctgcactatcccaactaatagaaatattaaaatctcgcagttcgatagcttggatataaactacacgccgataggtgacacggttaacattagaagcccttgataaatcaatccgcaaccgatctactaagtcaataggaatgtaggaattaccattaattaatactccttgctctggataattttgcccattgatgttaatattaattggtggataattcggttctacaggagttcccggatttggatcaactgctcgactccaagctattaatccgtcaacaattcctaatgcaaaatcacggcgacgagtttgcaataaattgcgatcatctggactgctgagaaaccctacttgcatgactaaagccggtagagtagtgcggcgacaaaactgcaaactacctaagccactgtctgtatctggtctgactccgcgattaggtaattgaggtacacggcgcaacaatcccatgagtaacgtttctgcattttgcttgcgttgattgttgctggcaatgtggtaaacactagcacccctaacagtaggactactagcagcatcagcttgaatttctacagccacatcagtggaacgagcgcgagagttaatccaggtgatagtttgggcagcacttaaatcatcaggcacagctaaaacttccacagtacgcgcccgcagttctgttacaattaaatcccgtaacagaatcatttccttagcttcagttgtaccacctgcgatcgcaccaggatcaataccgccagcttccctacctccatgcgcggccgaaataaaaatacgtcccatctttaatgattcccattgttaagctccagcatgaagcaattttaacgattattttgggtttgggatcaagaattataataaggcaggagtcaggagtcaggagtcaggagtcaggagttttgatttttccccaatcaccaatcaccaatcacccaaaaatgcaaatcccccgtttacatccagatacaatagaagaagttaaacaccgggctgatattgttgatgttgtctcagattatgtagttttacgtagacgaggcaaagattttgtcgggttatgtcctttccatgacgagaaaacccctagttttacagtgagtccaagcaagcaaatgtattattgttttggttgtcaagctgcgggtaatgccattaagtttgtcatggatttgaataaacggcattttacagaagtcgttttagatttagcaaaacgttatcaagttcctgtcaaaaccttagcacctgaacaaagacaagaattacaacgtcagatatctttacgtgagcaattatatgaaattttagcatctacagcccaattttatcaacacgctttaaggcaaaatttgggtcaaaaagcgatgcaatatttacaggaaaagcgactattcaaaatagaaacaattcaacaatttggtttaggttatgctccccctggttgggaaactttatatcgttatttggtggataataaaaattatcctgtgcagttggtagaaaaagccggtttaattaaacccagaaaagaagggggaagttattatgatgtattccgagataggttaatgattcctatccgcgatattcaaggaagagtaattgcttttggaggcagaactttaacagaagaacaaccaaaatatttaaattctccagaaacagaattatttagtaaaggtaaaactttatttgctttagatcaagctaaagatggtatttctaaatcagatcaaggggtagtagtagagggatattttgatgcgatcgctcttcatgcagcaggaattaataacgtcgttgcatccctgggtacagcattaagtatagaacaagtgcgactattattgcgttactcagattccaaacaattaatacttaattttgatgcagataaagctggaattaatgccgcagaaagagcaattggtgaaattgccacattagcatataaaggcgaagtacagttaaaaattctcaacattcccgacgggaaagatgcggatgaatatttgcatagtcatacagcaacagaatatcagcaactattagcaaatgccccactgtggttaaattggcaaattgaggaaattattaaagatagagatttaaaacaagccgccaattttcaaatcgttacaaaagaaatggttaaactcttacagaaaatcgttaatagtgatacacttaattattatatttcctactgtgcagaaatactcagcttaggtgacgctagattaatacccctaagagttgagaacctactaactcaaattgcacctgctaatgtgcaaactccaccactgcgaccacgcaaaccggagtcaaaaacgccaaagctatctctagtaaccactgaacggagtttattagaacaagcagaggcgttattattgcggatatttttacattgtcctgaacaaagaaaggtagtatttgcagaattagaagagagaaatttagaatttagtctttctcatcatcgctttttgtggcaacaaagtttagaatttccattagaagaagtagacttaatttctaacttacaaaatcggtatttagaattagaagaagatttaaaaatagtatctcatgtatttcatttaaacgagaaaaacaaaacagaaatattaagaactccccaagttgtacaagcaaccttagcttgtatggaacgagtgttaagagaaaaacgttatcgtcattttatggaactgtggaagaaaattgatccacaagcagaaccagataaatataaatcttatgcagatgctatatatgctgataaaatgcggatacaagaattagataaacaaagacaatttcccatttccgaattattttaatcctgtaaatcttgaaatagtgaaattatcattgagacaaataaacctatgaaactacaaacaactatccaagaaatcaaaactgttaaagcctactataccccagaagaatatttagaactagaagaaaaatcagagtataaaaatgaatatagagatggggaaattataccaatgacaggcagaacaacaaatcataataaactagcattaaatttagctactagcctgaatttagcattaaatgatttagactatgaaatttatattggagatgtaaaactgtggatacaacgttatcgagaatttacctatcctgatgtcatggtcatagaaggtgaacctatttattatagtacaaacaccacaattgtcaccaatcctttattaattgccgaagtcttatctcaatctacaaaagactatgatcggggtgataaatttctttattatcgttcaattcccgaatttaaagaatatattttgattgatcaacataaacattatgtaatgcaatatgtcaagaataatgaaaatcaatggcttttgacagagtatgaaacagaagatgctattttaaaacttgcatcaattaaccttcaattatctttaaaacaactgtataaaaaaattaactttttggaacaaatagagtaaaattttcaattgaaaattgacaattgtttcattaaatgcttccgccgtgagcgtcagccgatagcgtagcgtggcgttagccatacggtttaaaacctctcctttcaacgggaaaaataaaaaataagctttttcaatcctctcccttcaatggaggggtaattgtcaattgttcattgtcaattatcaattattgaatattcacctataacctgagctttggtaaaatagatttagataacattccatgaacccctttttgtggactattaaccacttgagtaatatgaaaatttactgctaaactgcataatacataagcatcttctggtgataaattggcaaaactttctagaaaataaatcatattttttaacgccaattccaaagcatcatctaaagtttctgcaaaacccattgtgataaaatctgtaggcgtttctgctatgggtgttgttagttgtaaatatttccgcaatactaatttaattctaccattcatagaggtttcaatagcagttacatttacctcaccatctccttgtgcagaatgtccatcaccaatagaaaataatgcaccaggaacatatataggtaaaaataattttgcacctgcttgtaattgacggttatcaatatttcctccataagcacctggaggtatagaattacggttattttctggggtagcaactcctaaaatgccaaaaaaaggtgtgagaggaattttgatatttgaaccgggtggaaattcggcaaaattattttttaaatcgaggggaataaatcttaatgcagcttctgtaaactgctgtggtaatgctccccaacctgcacgaatagcgttaaaaccaacaggtaaacgcggtgaaattgactttaattgtacttctaaaatatcccctggttgtgcattattgatgtaaattggtccggtgagtaaatggggtcctggtgctattttttgttctggtggtaaattttcacagatatcaataaattctggtgtgagaaattctgaaggagctttgtcgtaaacgtaataacctgtataagtttcgatgtctattgtgtcatgggaatcaacaaataatgctggttttaagaggtgagaaaagccacctaaatgtacagtttctttcgtagcttttaaaatgtggtgagtcatttttgcagatgcttatggctgaataaacaattatcaattatcaattgtcaattgtcaattgtcaattgataacaggttattttgaattttcagaattagttcagtgtttttcccagcaacctaatataattgcggatatcatgatctttaactcgtgctgaaatgaagttgtaactaaaccaaggtcctagtcgtaattgttgacctacatgactatatcttccttgccaccacctgggtaatgcaggtactatatccatgccataaataaagcgataagtgttaggaactctccgattataagattgacaaaatttcttattgcctactttgggcgagccaaatgtatagacttctaaagaagataattgagggtgaaaattatattgaatatctacaccacataaggttgctaatgctcctcctaaactatggcctgtgacaatgatattagcagtttgattatctttgatatattgatgaatctgatctctaacggaaaggtaagcattgctaaaaccagaatgcatgagtggtccagggttgttgccttttttatatgggtaaatttgctcggttttggcaacaatttgttgttgaattattttctcatcaaattctttatttttcttctgtagatcaatgtctttacctatcttgccagtatcgaagttatatcgccagtccattcttgattcagtaccacgaaaaactatagttactgctgaggaatctgctaaaatcgccaattgagtatcggtggttttgtcgctaatcagaattggtttttcagtccagctgctaaaggctattttagagaagtcttgataaatttcttgacagcacactgccattttcactgctttggaataattcactgtcatcactaagtcctcatcaaaaattttgagtaatattttgaccaatattcagatgttctagaacaccaattcattaatcgtaacggcgttcgcgtagcgtgctggaggcatagcattcggacagaatatgaactggtttcagcgataggttatcacccgaatgcttcgcccctacaaggtaaaaacagattacctagcattactgaatcgacgttctaggaaacatctatgtattattggtgatttgacggatatcatagcattgtttatttacaaacgactagagtgcagcaaaatataaaaaaatataaatttatattacaaaaatacctatcatactcagatccccgacttttttaagaagttggggatctaggggatctaaaagtaaaaaaaatataaaatttccaaatttagcagatttgtgtggtaatgaattgaatcacatccgctaaaccgattttggtttttaagttagtgaaaataaagggtttatctccacgcattttttttgcatctctttccatgacgtttaaatctgctccaacgaatggtgcaagatcaattttattaatgactaataaatctgatttagtgatacctggaccacctttgcggggaattttatccccagcagcaacatctatgacatatattgttaaatcaactaattcgggactaaaggtagcggctaaattatcaccaccactttctaaaaaaactaaatctaaatctataaatttttcttctagttgttcaattgcagctaaattcatggaagcatcttcacgaatagcagtatggggacaacctcctgtttctactcctaaaatgcgatcgctctccaatgcttgagaacgtactaaaaattgtgcatcttcttgagtataaatatcattggtaacaaccgctaatttatatttttctcgcagtgctttacacaaagcatctactaaagctgtttttccagaacctacgggtcctgctactcctactcgaaaagcattcataagtaattggtaattggtgattggtgattggtgattggtaattagtaaaattattacctatcttctcttactgttccctgttccctagcttctaaataatctagtatattgggtttcatgctgcatactagctaaagataaaccccaactacaacaaattagattatcatcttctaaggtgagaatttctgacattgtaatatttaataatgtttgcaactctaataataattcttgtccagcagtttgaccaaggggaatgagtttgactccagcagtaattaaattatttgcccaactatgcagatatgctaataatgccgcatcagtgttaatttgccaatgagcgcaagcaataccaaaggcgatcgcataattgcaaggataacccacagcggtagctaatggtaaagtttctggtgcaagtttacttaataattggatgagcgatcgccccatttgccaactaccagcgcgtaattcttctgtatctctcaccgcagataaccacaaattccatcgttttaaatctgctaaatttcccatttttgcagcttctaaacctctaatcatcacagcgccatctatgcgaattgacccataattcaactcagcttctaaccaattttttaagctattactattcttaatagtaccattttctaccaacatttccaaaccttcagaatagctataagctcccacaggtaaagccggactagctaactgtaaaatagataaaaaatgactatgagtgagagtgatggtgtacataagctcctccataagcgcctaattctggttgaaaagttacaacttcttccttaatttctaaacccaacttttccaacattgtgcgtaaaactgaatcaggagataagcgtaaataattaggagtaatttccacaggtacatgacgattacccaaatgataagctgctcttaataagagtaaaggtgtgtgtgcaaccacagttaaaacaggttcaggtttagcaataattctgatgaaattgttttgagtttcatctgtgagaatatcatcattatgtaaaactgtacctctcggtaaacgcaaaaaaacctccttcccatctgctaatgtaaatttgtgacggctacgggtgcgttcttcagcggtaagtggaagaatgaaatgaacgtcagtattaaaatcgggaggttgaatttgacttaaaatcaacatcattgaggaagtaagtttaagttatagatatctttgtgaattttacgccctaatggtgcaacaaaacaaaaaaaatacagcaggagtcgtaggggcgaagcattgggaaaatagcctgttcataaaactgataattggttgcccgaatgcttcgcccttacaggaaaatagcgttagagaaaaattaatagctgttcgcttgaacgcttccccctgacaggagtcatgagtacaactctctctgtctaggttttaaattagattctgtacctgattgatatgcaatctagtgtaacagaaaaaaatccctgacatctcacagaagtcagggatctatatatgtatatcctgtaccttttatatttaattttcatccctagcatgaatttgagccgggggactcgtcgcttcaactgctgtaaatggttgcagaattctataagaatgaattgcaccttttggtacaacccaagaactacctttttctagtaaaattgtctgaccaaaaatatctaattctgcttgtccatcaattacataaccaacagtttcatattcccgttgagttggtactttttcctcacctggttcttcattttcccatagtcgcattgaaacagttttccccgatgctagatacttttgaccaagtttacctgtgggagaataggcagaatctacttttttaacacttgtgtcactcatataatttatgatccttattaacaagttatttgcggaatttttggcttttttctccttaaaaatggaggttttgaaccttgaatgaaacagttatcaattatcaattgtcaattgtcaattgataatttcccattacaaaaactgcctcctgccttcgttatctcttgtctctcaacattctttctggtggtatattctcttgataataacctggtttatcaccagtaattggctctaaacttttgtcaatatttgtgcgtacatcttctaaaaactgtctggtagattcaggaataggttcatcaagattgagtttttctctaatattatcagcagtttcttgaagttgtctttgagtattttctagcgactgctcatttctgattgcttcttgatcaggagtacctttataataagtaccttctggagttgtcacggtatcagcttgtgctaatagcatagcattactagagctaaaagcttggaagccaaaaaaggcaaatactacaaaagaaattactagcagacgtaaaattagacgttgaaaactcttaaaaagacgattcataattatccttgctaatagggttttcctgaataataaatgcttacaccacagcagcactagaagtaggtttaggaggcttaataccagcagcaattcgtgaacgatatagttcaactaatcgctgttcatatttacctaaatcattatgaatttctttaaaaattgccgttgctactgggtcagtatacattgccgacaaatggctaacatcaccaatacctgtttgtacatcacccaatgcacaacgaatttgatagatatcatcactaccagtcaatgcagattttaccttagcatattgattagcaacattagcgccaaaagatggtttttcatgtaatctatgcagataagtttccagtttttgaatgtgacgttgcttattaattatcatttcttgaaacaggttttttacctcctgttcagattctttttctagatacttttctagagcttctaaagaataacgttctccacctaaagcaatatttaaacctttaacaatttcattcttggttgaaccaccccaagcatcagctaatttccaccattctgcacttgtgtctttttcatcaggcaaattagcatctttaccaccataacctaaacgttttaaaagtgccgttgtaaaaattgccaagtctccaggttcacgagatgtaatcaaattaccatccacaactacaggctcatctatataatttgctcctgcattactgatatctttacgaatagcagtaaacccagttacttgtttacctttgagtaaatcaccttcaattaaaacctgtggtccatgacatattgcggctattaatttgccttgcttcatggcttcccgcacaaagcaaactgtgtgacaattacgccgcattttatcaggagccatacccccaggaataaccactgctgcaaattcatcaactatagcttctgttgttgttccatcagcttgtacgctcagttttccccttttacccttatatttttcattcatccttgaacccaaaactactacatccattcccgcttgtttgagtgcgtgacaaggaattataaattctaaatcttctactgcttgttcaacgagaatagcaacttttttctgactagaatgatgattattgttgatcattggttttctttccctggctaattatcaaataaattgattttttaaacttattcagtttcagtgatttgagccagccatctcgaactgtaattgattgttatagaaacaatcgggtctaaaaccggacttcgttcaaattttttggagcagtgtctaaatccctgtaaaatagacctcctgccttcgttatgctggcatttcacttgttgatgaagtggcaaataattcctcataatcatgggtaaaataagcatgaaatttcttgaatttctctggagttaccgcattttgtaaaaccgcaaaaactgcccgcacgtgcattgctgctgtagttggttctatattttctttctgactagcacgctcaataaactcttgcagatgaaaagattgactagcttctgtttctctgccacgtaaatatttacctaattctggtggtatttgtgcagctaattcttgtgcttcatctttaggaatcagttctctcactgtttctaatgtcgcacgagtagcaacttctgcttcttcacgggaatttgattgagctagactttgtacatgggtaataaactctgtatattccattttttaatctcctctatttattaaatctgaaaatctgaaaataatttcttaccaattaccttactaaactaattgctagttataattgctaatgatttaccacctactagattaatacttcatagattgcttcacttctttctcaagggatatattttttataactaaagttataaatctttagttagataaatatatttggcgaaaagttataataaaaaagttataataaaaacgttaagaattcagccctcagccatcagccatgtagctaaaatattgaaatacaaagagtgaaaataaacagatgcagataaggttcatgaaattacaatttctaaatctttgttattgcagcaagtagctattatcatgacaaaaaaacgaaaaaaacaggaaaataaaactgatgatttgccacagggaattactgaatcctatggtacaggcgtaaaaaacttaccgggatataatattggtgagcgatcgctgtgggaaaatagacaagagtatacagaaaacagtcctgaatttcctgctgaataccctattgcgggtgatgaagttgatagttattggcaagatacggtaggagatgaagctgtgggtggtactgttgctactcctgagaaaaatgtaacggaggaattagaaacagcagtaggtttagaaatgaaggattatgcttttcttcgcaccaacgatattttaaaacatcgtgatgatgcacgttgggaactagatccgaaatcttctgaagattatgaacaacgacgagatgaaaataattcataatcatttaggagtcagaggagaattgaaaaaacggaatttttgcctttttcccctagaaagggaaggttttaaacttttaataaaaaattatcaattgtcaattttcaattgataaacagataaacacagagtaaacactatgcttgttactctgtgttttttattttggtgattggcgcagctgcacccatcgtcacgccctttgcttcttgtctgctaatttaaagcgatttaaattagtcctcatctgtcctgagactggtttaaatttagggttttttgattaggattctgtctttttatagtgtttacagtcagtgattattttttcatacaaatgccaacatttgtagtcacatttcaagttttatatatcgaattttaccatgtagatttaatgacccctacctcataaattaccaggttttaaagggagacctttattgatttcccccctgaataaggaatgtttacctcatctcagaaagagtaaagagtaaaggtgttattactccttaccctttcacccttatttgttacccaaaagtttgaggttaaatttaattcaactaattcaaagactgattagatgaaatataatcctgttgacaatattcctgagttggggttacagaaaccacttccacctctacaggtttttctggtgtggggttaataataaattcactaggacctacatggggtttttgtggatttccccaatcataggtataacctaaaccagaccaaggataatattcttttttcgcattgctgaaagaattggtgtatattgtcttaattacaggactactatctggtactggtaaaggtaaaacattacaactagcatcgtcaatttctggatcaatacatggtctgattaaatcttctgcttttacccacatttccacaaaatgggttttgctagaatatttgtttaaaatcaatcccaaatattgctgtaaccttagtgaaagttcaattttatcaggaatattggcatctatggcttgatattgctggcaaaattctttaacttgtggtactgctgtaaaccatgtttgataagccagttgtttttttgcacctattggccaatctacactggggttactcacatatctccaagttgacattaaatattcaattttgccattattttctctccatttaattctaggattactgggagataatgcccacagatcactcactacttcatctgctaacggctgttttgcatcttcaacagcatctgctaatgtcttgctcaaaacattataagtttctggttgatattgcaatagatactcataaacattgacaggtaattctgcttgggctaattgtgcatttagtatttgtgtactatttgcagctaaagcccgctgtgaccatccgaataataagaaaacacaacataataagcctagcaaaaattgttgttgccaattcttcatggtaaataacctagtagtgtttattgctgttggaaagtaatactaggtcagattttataattattttttacgaaataaccaacggtgtttattttttttaactaaagatttatgtataagtaggtaggcgttgaaatttatcgttgtggcaaggcaggaggcagaaggcaggagcgatgaggtttttaggcattttacattttgttagataactttttttcatgcctacttacttaaataaaaccgaaaatttacgattttctcacaaatttcaattcccctttgaattgagcaaaatggttattttcaaatttgttctaaaaacaaagtgttttatcttcttagtatatctactagataaaagctgaaaattgaaattggattatacgaatttttactgaaactatttaatctaagtctaaccatatagttgtattttacacatttatctcaaaaatttactcaagtaatttccctagatgtgttgtgagaattgatacgtggattaaaacgtcgaatcaaaagaacaaatgaagaggtttaaaagctgctgaagattcctatataatgactggtaaacctttctgctttcacgtctaggattgtttcaccatgcaagtagtttttaactctaatttgaattatcaaattttcagcctctatcctcaacaggatcaatggggctaaacaattgattaacgaacagggtatactgtcaaggaataatagttataacggaaacttaacataataaattttctagaccaattcaaccttcgtcaacactaaatcatagtatattaaataaagttatgtcagcgcaaaaccccaatgctgaagagacaatagatttgaattttggtgttaaccaccaaggaacatatcaggtacaaacacactcttcacctgtagttagtctggctcccaaaaaaggaacgatttcccagtttcttgctcccttaactcaggatacttttaaacaagtagttcaggaagttgagcataaattgaaaattgttaacgaaaccttatccatgttggattataaaggttttgaaacaatccttccagaaatgctgcattcaattaccttgaaaacaggggaattactaggagcagatcggacaacgatatttttattagatgaagaaaaacaacaactctggtctatcttagcagaaggggaaggaaagcgaccattagaaattagaattccagcggataaaggtattgccggggaagtggcaacttttaagcgagtcatcaatattccctatgatttttataacgatgtgcggtcaaaatttgctcaagaacaagacaagagcaatggctaccgcacttacacaatgttagctttaccgctattaaatgaaaatggagaattagtagcggtagtgcagttattaaataaattaaaatacctacacaatcccgatgatcctctgaaagaacgcattgataaaaagggttttaccagtgcagatgaaaaattatttcaagattttgcgccgtcaattcgcctgattttagagtcgtctcgctctttttatattgctactcaaaaacaaagagccgcagcagctttgatgaaggcaattaagtctttaagtcacagtagtttagatttaaaagataccctcaaacgggtaatggatgaggctaaagaattgatgaatgctgatcgcagtaccctgtggttgatagatggcgatcaccaggaattatggacaacaattactcaagataacggtacaactaaagaattacgagtacccataggtaaaggctttgctgggatcgttgctgcatctggaaaaaccttaaatattccctttgatttatataaacatccagattcacaaactgcccaaaaaatagatcaagaaaatggctatcgcacttgtagtctgttgtgtatgccagtatttaacagtgatcaaaaattaattggtgttactcaattagtaaataaaaagaaagcaggagattttgcaccttataatccctccctttggcctcaacctcctgaatgcttccaagctagttttgacggcaatgatgaagtattcatggaagcttttaatattcaagcaggtgtagcattgcaaaatgcccaattgtttgccaaagtcaaacagcaagaaaaaatgcagggggatattttgcggagtctttctaatggtgtaatttcctcggataagtctggatatattatcactgctaatgaaagtgctaaacgtttactaggttattctacagaggcgcgtttagaggggaaattagttagtgatgttgtcaatattaaagacggagattttagccaatggtttgcagatgctttagctgcaaatgatgtcaaagatacccagcagtattatccagatcgtacacttctaactactacccaagaacagcacagcattaatttatcactcaacactattgctgatgcgaatgacgaaaataaagtgtgtggcgcactggtggtaatggatgatatcagcgatgaaaagcgtctgaaaagcaccatgtaccgttacatgactcaggagttggcagaagaattactcaaattagatgatgctaaattaggaggcgatcgcaaagaagttactatcttattctcggatattcgtggctacaccaccctcacagaaaatatgcaagctgaggaagtggtaagtatgcttaatgaatattttgaatcaatggtagaagctgtatttagacataaaggcactctcgataaatatatcggtgatgccattatggctgtatttggttctcccttacctttagaaaaacacgcccgtatggcagtcgaaacttctctagaaatgcgctatcgtttgcaggaattaaatcaccgtcgagaagccttaaatcaatccaaaatcaaaatcggcatcggcattaattctgatactgtaattagtggtaatatcggttctagtaagcggatggaatttaccgctattggtgatggtgtcaatcttggttctcgattagaaagtattagcaaacaatatggttgcgatattatcatcagcgacaatacctttaacttctgtcatgatgatatttgggcaagggaactagatttaattcgtgttaaaggcagaaatgagcctgtatctatttatgagttgatcggaatgcgttctgattctattaacagtgccaaacaagaactaattgaacattatcagaaaggaagagagtattatctgcaacgtcagttttcactggctcaaatggaatttgtcaaagctttaactgctgataataatgataaagcctcaatgttatatctgagtcgttgtcaacattggttacaaacacctcccacagatacaacttgggatgctggtgtttggacttttcatgaaaaataaaagtcagccatcagctattcaggagaaagaattagtttttctccctatctcgccagtccccagttcccagtcagtagaaggaaataatactgtctactatcttaaagctgatatagtgatcggatttgattcatgaatttttcgtagaggcagggaatagggaacagggaacagggaacgggaaagaaggctgtcagtatttatggtgagcgaagccgaaccatgtacggagttctgttcaaaaatcaaatattagtcctatagctgaatacttacgatttatcttatcttcaccagatttagcacaagtttttgttttttaattcttcttattatttggtaataaaacttaaaaaaacaacaaaaattaattcaaaaaacattataaaaatgttgcatatagtcttgtttgtaacagttaatttatatttgttgtcaaagtggttttcttagttagaaactagaaatagatttaacaaagcaattattgttatgaacactatttctaacctgcaattaaaacgctcaacttggcaaaccgccactctgttgactttgggcttttggctcagttctagtctagtattagattgggtaattatgcctagcctttacattactggcatgatgaaggaagcgaattttaccactgctggatatgcaattttttggaattttaaccgcttagaattactagctgctgctgttgtcttgacatctatgctggttatttgcaagactaaatctaattggtgtttaggaagtatatttttatcttgcttgctgttaacaatagctttgctggatacctattttctaactccgcaaatgtgcgctttgggtagtgatttaagtctatttgctagtgcaggtggtgttccctacagtatgaatttactgcatggtagttactttatgctggaagttttgaaagtattagcgtctggggtgctgttaaatcgttgttggaaagaagcttagaggttgtttgaaaagtctctcatggggtatcaaatatttttaccgggatctagtctaagtggactcgttgaatcaaaaatctgcgctcctttaggacctttgggttaaatttactcattagcatctccataagcgtagcctaaaactgttggggacaattcatgaattgtccctaaattcatttcaccagatgtcaattgataattttcctgactaattctaaccattagacttgtccagaaaagaaattagggtttgctgaaaaaatgcaaaacgcagataaatcaaaagtttgaggctgataaataggaaaaaagtgcaagggttttgaagggtatacgtgaaaaagtgtgcattttttggtatttcgagagatggaaaaggaattttcaaacttcctcctgactcctgactcctgactcctatcccctcatggaaagactttctcagcaagtccaaattatggagcctataatattagcatttttttcctgtactttggtctcttgaattttctaattcctaacttttcatccccttaaaccgttcttttgccccttcaaaagcctcttgcatgacattttgaattttttgaggatctggcttttttccacccattaaatccccaaaatacacacaagcagcttcacctaaagaccatgtataagcacccgcccaagatgccgcaataatagtacccaaaccagggacaaatttaattaattcccgtgccactgcttgagctaaaaaaccaccagcaatggtacttacaatacccccagcttgagatggtgtcaatgtctgaccatataatttacccaataatcccaccattgaaacttgtaaagctgttaaaactggcatagttgcaaaaggtaaaggtacagcagctaaagtacctgccataatggaaaaaggtaaaatatatcttctagcagcatcacgataaatattacttaattccttacctgcttgtttatctaacaattgataaatagcttttgattcagcttccggtaaaagttcagctaaattatctcgcagtgcttctaaaccataaaatactggagtataaccatctgcttctaaagtaaaatcaatcaaaactgcccgatcatataaaccagtaaaattatttttaatttctgtaaaagcccggtttaattcctcaaattctgggggataatagggatgattttctatttcgttgggataaatttcatgcaaacaagttaccgctaacaaacagggaatattgggatattgttggcgtaatttttgggcaatatttcgcagagtatccgtagcaaaatcattaattttcacagtcaaaaggaaaaccctagcaccattaatttcggtttttaaatcagtgattaactcttgaataatagtttccgtatctttattaacatcccccaaacccaccgtatcagtaaatacaattaaaggtaaatcatcagcaggataagcataacgttgggtattttgagtatgggggcgaaaaccctggccaataatttccgcagaaacccccgttaaaccgcgaacaatagaacttttacccgtttggggttttcctattaataaagcttctgtagtcggtagttgagtgcggatagttgctaaaatttctgcaacttgggcatcattgacactaaaccattgtcctatattttgttttacttgttgttttacttggtctactggtaggagttgggttaatttagcagtagttttactgacaacaccaacaatgcgattttgccaagaatcattttctgacttgggttttggtgcatccgttagtgtgttggatgagtctgggttgggttgttcagtcatgggtgtaattttaatagtccaccattcctagtataacttgtcttgtgaaccatgtaagcagcaatcaagaatcatcaaccttcataaattatgacattaagaaaatggataatgtagagaacttacgaaaaatatctctagaaccctctttcctttgtgtcctttgcgttctttgcggttagtttttccgtgagttgtgcgtaagtcctaatgtagataaattaccatcaaaagattgcaaattgagcaataccaaaaactcaattttttacctgttttgttctttgaaataacctatgatatcagtctcaatcagaacactgaagattaaaggatttttaggatgaactgattttgatcatctaaagcaaaaagatcattaacatcacatcgttatgaaaaacatcctgtaaatccttaaatcctggatatcctgatgcagacagataaaatgctgatcccatagtttagctaatcagcaaatttattttggtaaaatgtcattcagtcgaagttctaaattcggtaaaatgcgagaaataattgactcaccaagacgatactgtttttggctataatcatcaccactcaactgacaaacggtgaaagttggctgtttcggtctaccgataaaagcgacaccacccagccctcggtaatcagcaatccaatattcagggattcctaaaagggcgtattcttcaaccttgcgagcatagtcagtttcccagttactactcacaacctcaacaactaatttagctgaacgaccatgagtgattactggttcatgttcccaaagaggttcattaaagagtacggtttcatccaaaacaacaatatcaggtctacgggcagtaatagcgtcagcaaaggggcgaattaggcaagtgcggggaataaaccaaggtagttgggcattagtaatagcaataccgattttagtcgctagtttgccactgacggtttcatgaagtccagtaggttccatatcaattagttctccgtcagccaactcatagcgcggattatcgctatatttgtccagaaaatcctcaaaggtaagaagttttgatggtacataagtcatgggacttttcctttttacagtatatttcatgtcaatgaggtacaaactgaaaccataaaacccttgtggaacaggcatcctgcctgttaatcctgtaccgcataactcagtaaactgctgtatcaatcttcctgggggcaatcatcccacaaagtagtaatttctcgcaaactctgatgagtaccattacccaaaatcaaatgatccaatagaggaatatttaaaagttgcgcccctgataataattgccgagttaattctatatctgcttcactaggttctagattaccagaaggatgattatgggccactatcatccgtgtagcaccatgtcgaataacttcccgaaaaatatcacggggagaagctaaagtttcggttgcagtaccaatggtaatgatttttgtccccaaaaaccggtttttcacatctaacaataaaaccgcaaaccgttcttgactttgccacattaagtcttgactcagggtagcggccgccgcaaggggactatcaataaccgcaccctccgcaggacgggataaaaaaacccgtttacctaattctatcgctgccagaattgatgtagcttttgcagaacccacaccatgaatttccattaactctgcgggggtaacatcccgtaaagcagctaaaggatctctttgatcttttcctaactcttgtaacataagttgccctaaaccgacagcagacagtttacccggtccttgtccagttcctagcagaatagcaattaattccgcagtggctaatattttcgctccatgagtcatcaatctttcacggggacgctcattttcaggtaggtcggcaattctgaggcaataggtcatatacaaaccaagggattatgcaccaagatggaactatattttatttatcccttgttcaagctcaaaattatatctgggggggaaaatatttgttaaggagtcaggagttcaggagatggggaggtggggagaaaaagattttttccagtcaccagtcaccagtcaccagtcaccagtcaccagtcaccagtcaccagtcaccagtcacctacccactaacagcttcttgataaattatctcttgaaactgaatgatgtctttttgaggatcagcaatgctgacttttactaatacttgttcacctaaacttacagaacgcctaaaaaccattggtaactgtaaacccaagtcttctaagagaattaatgctaagttgctatcttcccgtaaccacatcaaaattgtgacttgccatatttcttgaggattacgacgtaaatattctaaagcataatacctgttggtttgccgttctaccattgttagttcttgggtggtagtgctgactgtcatcatcacttctttgagttgttcggcagaaaatggcaaatcttcaccccgtaaatgtgctttcagttgaaagtgggtaagtaagtcactgtaacgacggatgggggaagttgcttgagtgtaagtatctaagcctaaaccggcatgacgtactggggtaatactcatttcacttttaggcatacagcgacgcagggcgcaaaaacgaacgaaaccggcgggaagctgtaagagttcttcttctggggggagttctggttggggttgtccgcgaaatggtaaggggatgttatgggtttgaccataacgtgctgctacttccccagcaaggatcatcatttctgctactaactgccgagatggagaatcatctaatatatcaatgctgatatcatcgtctttgactttgatcattgcttcgggcatattgatgctgatcgcgccttggttatatcgccaggttttccgcttttgtgccaaattggcgatcgcctctatttctggttctgcttgtactcccaactccagcatttcatctacatcttcgtaggtgaggcgataggtaggtttgattaaagtgggatggatagtatagtcttcaactgcaccgctttcatctaaaactacaccaaagctgagagcgcaacaaattttcccctgtaccaaactcattggacctgtagctaagacttcggggaacataggtatcattcccgtaggtaagtaaactgtactaccccgttttctcgcttctaaatctaattcatcttctggcattaaccagcgggtaggatcagcaatatgcacccaaagccgttgtcgtccatcggcgagattttcacaacttaaaccgtcgtctatttctgtggtactttcatcatcaatagtgtataccttgagatgtgttaaatccagacgattggtgtctaagtctgctggtggaaaatccaaatgttgttgcgccacttctaataccttactagggaactgaacgggaattgaagaacgacgcaggaacaggttttcatggggactccaccaacccaagtcgatcaatagttgcagggctgcttggggagttgcagaacgtcccagcatattcatggtttctaatactggggctgggggtggataattccgtaccaaggcctccgcatttatccccattcgcacaatatccgccacgaaagtcgcatatttttctaatgcttccaaacgctggcggtctggtttttgccattctacgctttcgccttggagtgcctgttctacacgcgctagaaattcctgctgtcccttggctttttgcgcttctacttctatttggtgtttccgttctgctacttgtgcggcgctacgtggttcgtaaacatcgcctttttgcttgaaatacattttatcatcggataacaagcaatgggcggcgtaacagtgctgtggttctgattctgaaaacagcaaatttgccatttgactgggagtgactgtttccccgtcttccaccaatatttcccaagctacttctaaactagatggatctagataggtttgaacttgacttaaaaagctgggaatatcagcaggtttataagtttgtccattaactgtataggttagttgtcgcggcgcgaggctgtgggattgacctcgttcatctaccacaaaccaacgggtctttccgtctggacgatctaccactcccagacggcgatcgccttgaaccctaaattcaactagcgtccccttctccacaactctcgcactcttttactaattttagattttagattttagattttggatttgttttaggttgttaatgggtaattggtaatgggtaattggtaaacactctttgctgtcacctgttccctgttccctgttccctgttccctgttccctgttccctatttcctatcacccaaatcccaggattggaaatctcgaagcatattatacactcctttggctggaagcgaaattttagattttggactgaaagtaaacgtttcattgttattaccaacgttacttttgttggatttttacagcagattacagataaatctggtacacagtctcacttgaaacctagacagaaagagagttttacttctgatttctgactcttgtaatggcgaagcattcggacgaccagttatcaatttttgtccaaagtaagggcgaagcatttgagcgaacaatcatcaatttttatcaccgtttattttccgaatgctgcgcccctacgactcctgacttctgctctaaaatcctttcatccaaaatccaaaatttttttagccttcggcgttgataaatggcaataaagccacaattcgagcgcgtttaatcgctaatgttaattgccgttgttgttgtgatgttaacccggtaatgcgtctgggtagaattttaccacgttcagtaataaatttacgtagtaaatcaacatctttataatcaattggttctcctggcttaattggcgacaggcgacgacgataatagctcatctcttacttaatttccttgtgaacagtgtgtttgttacagtgggggcagaactttttcagttctaaacggttggtggtgttccggcggtttttggtgctggtatagcgagaaacgcctggagaacgcttgtctgggttggttcgacactcggtgcattctagtgtcactattatgcgggcacctttactcttagccataattttacaaacagtaaagccgggagagatttaacacaaatgactatcttctcacatttcgctgcactttttcaactaatcgcttaatttttagcttaatttttaaatccagcgaatagccacgccgtgaggaaacaattatagttctagcatagcggtcatggaaagcccgtcgcatctgaggatctgacaatgccgcaccacagtcaatgactaggggaagtattagcagtatagcagtgggattagctattatattcgttaagcaaatggaaaccaataaacagctaccgccaataatcgcttcacgctgtaataatgcttgtaattcgggtattctgcttacgggttgtccattttctatttctaacacttttaaatttactgcccatcttcctaaactttgcccctgattgttgtaaactatgatgacccgtagaattaaccaagcaaggataaaaacgaaaatttggataaattgaatacctagattatttgttcctaaaaaagaactaactaaccatgctcctgtaaaatctattcctaatgccatcacacgacgggtaatttctggcttgggatagtgtttttgtggtgttttaatgatagtcataatatttataaaatcaagagaaacacaaataagtaggtaggcgttaaaaattgtcgttatgacaaggcaggaggcacgagggaagaggtttttaggaattttacattttttttacatacctcggttttttcgtgccgacttacttaaaccagccggtttttcccacacggatttttatatggtaattttttatattaaaatatccaaaactatcatcattaactataactatgctgtcagtcagagatgcagaagctactattttaaatgctgtgaaaccgctagataaccagctagatgtggaatttgttgatttattaatggcaaataatcgcattttagcaactcctgtgatcagttccctggattttccccactgggataactcggcaatggatggttatgctgtgcgttatgcagatgtgcagcaagcaagggctgataaacccattgttttgcaggtagtggaagaaattcccgctggatatgaaccacaggtaacaattaaaccaggacaagctgcaagaattttcacaggtgcaatgatgcccgctggtgcggatactgtagttatgcaggaaaaaacccaccgacaggaaaaccgggtttttgtgtttattgcacctcaaccccaggagtttgtcagacataagggggatttttatcaagctggaaacgaacttttacccgctggtattcctttaacggcttctgaaattgcggttttagctgctgctggacgtgaacaagtgagtgttttccgtcgtccccgtgtggctattttatcagttggcgatgagttggtgatgccggaacaattgctaaaaccaggacaaatagtagattctaatcagtatgctttagctactttgatgcgggaattgggggcagaagtgttactgttaggaattattcaggatgagccgacaactttacaagaaattatcgattatgcgatcgccaatgctgatatagtcatttctactggtggtgtatccgtaggtgattatgactacatatataaaactttagcatcattggcagcaaaaattcattttcgttctgtacaaatgcgtccggggaaacctttaacttttgcaacttttggtaataaattatattttggtttgccgggaaatcctgtttcagcgttggtgacttgttggcggtttgtaaaacctgcaattaaaaaaatgtcaggactggctaaaggttgggaaagtaaatttatcaaagtgcgatcgcaatcagaattacaatctaatggcaagatggaaacctatatttggggtaagttaaatctggtaaacggtgtttatcaatttcagaaagctgagggtaatgatagttcgggtaatttaattaatttagctcaaactaacgctttggctgtgttaccagtgggtaaaacttttgtttatccaggggaggaagttttggttttacatttataaataggagggaacagagaacagagtttttgacttttgacttgatttttccctatctttgagagtccagatttaataataggctctgattcatatactatttagtgtaagtcagagcctgatagatgacattctgatattataactttaacgtgggactgagaataaagatagatattcctagatattaattcttaggacatgaaccatctttaggttcttgagttattacagtaatgtctttgtaacctgctgctgataatattctttctactattttttttgcgttactattagcagcatctataatatcatttccgcaagcttctaatttaattctagcaagtgcatctttttgtgcttgatctagtagttcaatctcagcgttaggaccaaaccagtttttgtgatgatctaaaagttgagatttatcagcttctagaactgtttcggtaatataaggaggaggtaaagtaattgtaattttctggttgttgatatctacatctgttgctttcaatgctttcatatctataccagcacgtattgtaccttgtccttcataaataaccttagtatctccaacatagaatgaaaacaacctttgctctttagtttcaactaatgatgctttactggacatttttacagtattgagttcacttgtttcttttaatccacccaaaataacatctatcatttttgcactctcatttgttttaacccacggccagctaaaaaacaagaatgctgctagaataaatgctaagataccaaataaaatccatctgtaaatgattaatttatctgtagtagattgtatggtctgttttaagccactgaaagaagtcatttttattactcctaaatccacttgtatttatatccatctcttatagactaacagagtacacaattaagttctacagtagttatacttatttgtgctaatttttacattacataatcttgctctaaaaacagtaagtaccttaaataacaccgaaagttggaatagtttttttagcgttcgcttgacattcaagacagtcgctacataattttctgatttcctttttttttgagcttaaccgatataatattattcagtaataacctagtttaaggagtcaagtatatgcaaaaaaaaaatttactctcgaatactggttagatgatagctggtatgtaggaaaattaaaagaaattccgggaatatttagccaaggagaatcattagaagagttagaagaaaatattaaagatgcctatcagctaatgttagaagaaagcttagaaaatcatccccaagcgcaaactaaagaaatttgggttgatgtggcgtgaaacgaggaaattttattagagaattagttgatgcagggtgctatttaaaacgtcatgggaagaaacatgatatctatattaaccctattaatagaaaacaatcgcctgtaccacgtcatccagaaatcaaagaaagtctctgtcgtttaatcaaaaaacagttaggaatttaaataggaaatgcgcttgaaagtcttttattgatggctagtaggcaggaggcaggaggcagaaggtaaatatttttacccatctacccatttctactgtccccagtccctaagctactactttttccttttcaggaacatagggtttttctgcaccttgggctaaataagcagctaattgactttcaatttcatcacggacaatttgccgatattccacaaaatgttcaatgtgagcgcaggtagaaacgtactgttctatcaccttgggattatgcttgagaatgctaaagaagtgatgccagaatttccagcgagtttctcttttaaaaccttgtctccaaatcacaattagcagtgctttgataactacccattctggcgttttagctggtgctgtccattggggataacccaacatcaagaaacagcgataggtgcgatctaaataggctacaggatcatataaagcacaaaaagcttccacatattccctagccaattcttctaaaggacgggtaggaataaagttcattaatgtggtttgattgatatttccgtctttattctcccgcagtctaccttcttttttcaaacgatgccataaagcggtatttggcaatgcttgtaacatagcaaaagtggtggaaggaatagcagcttgttcagcaaatctcacaatgcgatcgcccgcaccggctttttcaccatcaaagccaataataaaccctgccattggtcgcagtccagctttaataatagtttgtactgcgtctgttaaagaactgcgcgtattttgaaacttcttcgttagctgtaaactatcctcatctggggtttcaatacccaaaaatacggctttaaaaccacagtcaaccatcaactccatcatttcttgatcttgtgccaaatcaatggaagcttctgtgtcaaaattgaatggatattgatgttcagccatccaaacttttaactcttttagcaacaatttcacattccgtttattgccaataaagttatcatccaccatgaacacaccacgccgccaacccaactcataaagataatctaattctgctaaaagttgtgctggtgttttggttctcggtttacgtccatataaaacaatgatgtcgcaaaattcacattggaaaggacaaccccgcgaaaattgcacagacatcatatcataggcattaaattctaataaatcaaagcggggaatcggtgtagttgtcacatctggtttttcagtggcgcggaaaaccccagatgtttcacctttttgtaccgcttccacaaacatcggtaaagtgatttccccttcatctaaaatcaggaaatctgcccctgctgcttccacttcatggggtgtggatgtgggatagggaccacctaaagctaccaacttaccccggcgttttgcttcccggacttgatctaataaatcttgtttttggacaatcatagccgagaaaatgactatatctgcccatgcccattcttcctctgttgctgggcgaatgttacgatctactagcttaaactcccattcttggggtaggatagctgccactgtgactaaacccaatggtggtaatagaacctttctatctacgagttgtaggattttttcataggaccagaaggttttgggaaatattggataaactagcaagatacgcatagtatcacccctcatgattgatttgttatctaactgtaactaaatttaggactgattgacttttttatatgttgccctgctgtgtgtgagaataaggaactgtcagaatcaggatatccaggatgtaaggatttacaggatgaagactaggaaaaataaaaaaatacaaacagttttgagcttattctactcatgcagtccggtcaattagcatctactctaagtgttacaatttacaaaacaccacaaaaaggtaaaggtcaaaaattattacaggaaggttttcaagtcgctgattttccctataatccacctaccttgatggaagttgctactttgcaggaccaaacgacagaagcattgctgaggagttcaacgaaagctatcaagaggggattcttgaggtatatattgatcaggcaagctacgaacagtatttcaaatctcttgaatatcgttatgatgaaaaagatggttgtgagcgaatagaggtggttgttcctcaaagtttgtttcccatccttaaccaatttccacgagtccttaaatcacggtgaatattatggatagtataagttgggaaaatattaaatctaagtataagctaggtcagtttgtacaaggtcaagtagaatttcatacaccatttggcgtttttgtcaatattaatgagtctttggttaaggggttgatcaaaatcccagattttttagatgaaggggggatgagtccagaaatgtatccagaaattggtacaactataggcgcggttgtggttggatacaatgagagtaattgtcgggaagtatatttaaatgctaaacccagtgtactgcataaagcccttgtgcctttgaaaattcctacattagcgagttaggattactttatgtaggtgtaaaaagcagaattagctggtattaagacagtaattttctgtataataattaatgattacttataattagttttttatggctctgctggatgctgtttttaaaggtgttgggtttcttgcttctgtagctggtgcagcagttgagagagttggatcagttgtaaaacaatggggagaaagtttactctctaattttcaagtagcctatggtgcaaatgcagagcctagtaatacaaaggaaaatttggatacactagaagtccttgatgctgaagttattgaactagagagaaagcgatggcgagatggagggcttgctcaacgcgataaaaatagattatatgaacttaatgcacttaaaaagcaagaatttgacaagtatcagcaatctcaaacaatagaatcggctcttgagcaggtatcaaatcctgacaactatgaatctactcttttagataataacaaagctcatattcttcagtaccaaatgggtcagatagtgcttgaaaagaaatgcccgaactgcggaagaccaatgtttctacagcatgaaaagcgtcctgatggtagcccattaatactcagtaatttcttctggtcttgtactggtttctatgaaaataacccagcaatactatgtaaaactacaatcagttttaatactaaagatattggattattacataaagtagatattcctgaactgaatgttaccaacagtgatctttccataatttactcgcaaaaaagtgtccagcaagtaattacaaaaagagtaaaacagcatattcgagaaaaagatggggatataatttgtcaggttcattatgtgcctatgatacttagagaaaaaagagaacataatggtcaggttttagatatgtttcatttaggttgtccacatcctggttgcggacaggtcgttaagcttaaatctccagcccaactagctgcatttctgaggcgcaaggaaggacaaggaatattgtaaaaataattattcttgtgactgctgtttttgtgttaaatcaggtttaaaaattactgattttgtataaacataacccaagtttttgattctgtataagtaggatttataataaatctctcttacacattactcaggaacatccgtaaagaaggcgttttgctatgaccgatgaacaaagagaactcccgatgaaagctaaacagagtctagaagccgcaaaactactacttaacaacaattagtccacaaacacaaattggtaaaattgcccattaatcgcaaattaaacaaatagttttagaggtttaaatctatgacaaaccgcgaacaattaatccaagaactcgaagaaactcctgatgatatagtgcaacttttactagattatttacatcgtgtgaaagctacacgcaaagaccatcccttatctaaatttgcaggaattttaagtgatgcagaagcagcagagataaaacagtcaattgcggaatgtcggcaggtagataaaaatgagtggtgaaattgctttggatacttctgttgcagttcgtttcctaaatggtgacaccgcgattattgaaagagtattagcgttaccggaagttattttacctctagtagtagcaggagaattattatttggggcggaaaattcatcgcgtccattgcaaaatttatcgcgttatctggagtttatttccacttgtactgttgtacctttgggaagagaaacaacttctatctatgctcaaactcgtttaatgctaaagcggaaaggacgaccaatccccatgaatgatatttggattgctgctcaatgcttggaaaaagggtggatattagttacagatgatacggattttgattatgtagatgggttggtattggagcattggtaataaggtctactagccatatctctcctctagcgatttgtgccactaaccttcaaccccgtccgctatagtttgctcccataactgtctctcagaaacctcctcttcccacagagtttcattctgccaacagtgaaagcttcattggctcgtgtcagaaacattgaaatctcaggctaatagcaaaagtcgtctgaagacgactgagaaaatattgaatttttgataattattgagtcggtttgaacagacttccgctatgagactgggaattcattcccaaactgataatactactaaacgataataacgatactaccccttattctctcatcctcctttgcgcctttgcgtctttgcgtgagataaagcccttcttccttcgcttcctatccttcgggaacacctccggtgaatgtgtcttcgtggttcattaccttaaaaataggaaaagaacaaaaatcaccaaacatctacatcatgaacttccgcgaagaatttaaactcctcctccgcgcccgctaccccctcatttacatccccacctacgaagaagaacgggtagaagctgctatccgtgaagaagcgacaacccaaggaaaccgccccgtttatacctgggattttgtggacggatatcaaggaaaccccaacgataccggctttggcaaacgcaaccccctgcaagcattagaatttattgaaaaattacctcctaccgccccagcagtgctaattctccgggattatcaccgctttttagaagatgtggcgatcgctcgcaaacttcgcaacttagcccgactgctgaaatctcaaccgaaaaatattgttttattatccccacggattgctattcccgacgatttaaccgaagttttaaccgtggtagaatttcccttacccgcagcaccagaaataaaaaccgaggtagaacgcctattacaagccactggtaacgcactttccggtaaatttattgatgacttggtgcgttcctgtcaagggttatcaatggaacggatacgccgggttttagccagggcgatcgcatcccacggagaactacaaccagaagacgttgatttagttttggaggaaaaacgccaaactatccgccaaacccaaatcctggacttttaccccgccactgagcaaatatctgatattgggggactggataatctcaaagattggttaattcgtcggggtggttcattcacagaacgagcgcgacagtacggattaccgcatccccgtggtttaatgttggtggggattcaaggaactggtaaatctttaacagcaaaggcgatcgcccatcattggcatttacctttattacgcttggatgtggggcgcttatttggtggtttagtcggtgaatcagaatctcgcacccggcaaatgattcaagttgcggaagcccttgcaccctgtgtattgtggattgatgaaattgacaaagccttttctggtttaggtagtaaaggtgatgcaggaacaactagccgggtatttgggacatttatcacttggttagcagaaaaaacttccccggtgtttgtcgtttccaccgctaacgatattcaagctttacccccagaaatgctgcggaaagggcgatttgatgaaattttctttgtcggtttacccacccaagaagaaagaaaagccatttttactgtacacttatcccgcttgcgtccccataacctcaaaagctatgacattgatcggttagcttacgaaactcccgatttttccggtgcagaaattgaacaaacgttaattgaagcgatgcacattggttttagccaaaatcgtgatttcacgactgatgatattttagaatcggctagtcaaatcatacctttggcgcgaactgcggtagaacagatccaaaaactgcaagaatgggcagcagcagggagagcgcgtttggcttctaagcataatgctttaagcgatcgcattcaacgtcaaatgtaataatattttgctggggactggagaagaaggtgaaaggtgacagtgaagaagaactttctattatttctgattccttgatcttctgactcctgtacgggcgaagtaggggcgaagcattcggaaaatagccttttgataaaatgataatttgtcgcccgaatgcttcgcccttacaggaaaatagccttttgataaaatgataatttgtcgcccgaatgcttcgcccttacaggaaaatagccttttgataaaatgataatttgtcgcccgaatgcttcgcccttacaggaaaatagccttttgataaaatgataatttgtcgcccgaatgcttcgcccttacaggaaaatagccttttgataaaatgataatttatcgcccgaatgcttcgcccttacaggaaaatagccttttgataaaatgataatttgtcgcccgaatgcttcgcccttacaggaaaatagccttttgataaaatgataatttatcgcccgaatgcttcgcccctacgactcctgactccttgatctcctgactcctgactaaaaaatatgaaaataatttctggattttttaaacttatacttggttttgtattagcgatcgcagttttattaggtagcggactgacaatagctctctattttgttaatcgtaccgccattcctcccgaaaaacccatgtttgctaatgatagtcccaaacccaaagcgaacaaaccaaaagtcacaccagtaaaagctactaccacacctaaacctagtcctactagcagtcctaaacctagtcctagtcctactcctactcccactgaatcacctgataccttaccaccaggagcttaccaagctattgtaacttggccgcaaggtttgagtatgcgagataaaccagcctcagatgcacaaagtattggtggtgttggtggtaatcaaaaagttatcatcttagaagaaagcgcggataaaaattggcaaaaaattcgcattgcaggtactgatcaagaaggttgggtgaaagctggtaatactaaacaagttgaagaataattcttgatctttagggaacagggagttcactttcaatttgatcatgattaaattgacaatgataaatgtgaaccttgctgatttttatttacttcaatccgggcttgaaatgcttctttgaggtgaggaatgtgtgtgacagtgagaatacaagcaaaatcagcagcgatcgcatttatggccgcaatcaggcgatcgcacccttctgtatcctgtgtaccaaatccttcatctataatcaacaactgcaacgccgcacccgcacgctgggctaataattttgctaatgctaaacgaatcgcaaaattaattctaaatgcttctccacccgaataagtttcataagctcgtgtaccccgcgcatcagcaattaaaatatctaaggtatctatcaacttggcatttttccgcgttgacttaccacttcttcccgctttctgagtaacaaattgtacgtgcagttgattggcactcaaccgcgccaggagtagatttgtctcagcttctagttggggtaacagattttcaatcatcaaagcttggataccatttttaccaaatgcttgcgctaattcctgatatacccgttgttgctgtttacaatcttgtaattgctcttgttcttgctcatattgattttgcaacagttctaactgatgtacttgttgttctaaacgccccaaataagcaattttttcatccatttctcggcgaaaaatggctattttctgttctaaatcatgaatttgctcaacaggattctcactagcttttaattgctctacaatactatccatttcaatggcaagtttttgtttatctgcggttctgctattataagcatttgttaaatcctccaatcttttctgtagttggggatattcttgttgagcagataaaaactgctgatagggtaactgccaacattgaaactctttaacacctttacgaatattactatgttgctcagaactgtaagcaatttctgtaatttgggtttctagtgctaatattcctcttgctatctctgaatttatttgttctgatgctatttgcgccttcaattcctcaatcatagcttgtagctctggttttctcgttgctatttgagcttgttttttcttggcatctttaatctggacttgtttaatttctgcccatcgtaaattttctactacacttctagctaaagcatgatcttgttcattgtaattcagttgtttgatatattcatctaactcttgaatttctgcttgtttatcaggtgcataatcaccttctaagaccctatgtaacttttctttttctattaaaacctgttttagttgcgtttgcagttcagccgacgcttgtaactgggctgctaatttcccctttttttcccttaaagcgtcataatttgctacttgctgcgatatttctcgatactcctgccttaatacttgaatttctcggtcagaaactgccatctgttcccgcagtacccaaaattgcccttgagtatcttcatattctatttgggttttttgtattactcgatgccagtgattttcatctaaaggatgttcacacaagggacacaaagcattaggattttgaagaagttgtattttttgttctaagtctcctagtaatttttcgtagtctttttgatgagcttgtaaacgttctataaaatggcgacgttcatggcctttgtcctgtaccctttgcaaataaactcgcttcttctccaattcttcaatttgtaaatctacttctatcacatcttgttgtaactgagattgtttgcgaattttagattcaatttgattttctgtaacttgtaactgttctaaacttgctaataatctactatggatacgttctaattcagtttgtaaatttgctctttgttctaataaaggtttgacttgtatttgcaaattttctaaagagttaagatgctcacgtgcagcagataattgagataaagctgtttcaatttctccagactttttcaaaattggtttgatttcttgttgttctttttctaaattatttaattcagcttctgctgcttgtattttgcgttcaatagattgaatttgtttatccagttgttgttgttgttgttgttttaaagtaatagcgcgggtatgttgttcaaacttaatagcaaaaacttcttcttgacattgcaaagtttgaaattgagagtatccagcttgaatttggtcggattgatgtaaaatagattctaaagctgccaattgggatttgacagctaacttgtcttgatgtaggcgatcgcaatcttcactaagattttgatattgctgtctgacaaaactcagtttttcctctaaattttggcgttgactttgaataactttcaaactttgtaattgaatattatcagcagcttgctgttgttgcagatgattgagttgaacttctaactctgctttttctgctgtagttgcttctcgttgttgaagttgagatttaatattatccaaagaacgttctaactcttccgcccgtcctttatactgtttagaattatccttagccttttctgccaacagatcatattgattaagttttaataattccgctagaatttccttccgttctgttggacgcttgagcatgaactcatccgcccgaccttgacgcaggtaagcagaattaataaaagtctcataatcaagcttgatatgttgtaaaatcacatcttgggttgctcgcatccccttaccagtcagaggacgaaaaccagcgggagtttcaatttgaaattccaaaacgctagttgcaccccggacacgagtacgaatcacccgatatttttgtaaattattgtagaaagtaaaatctactctgacttcttttgcgccagaataaatcacatcatcttcaacagtagcacgactttcaccccaaatagcccaagtaatagcttccagaagagaagatttacccgcaccattagaaccacaaatacaagccgtatgcaacccgccaaaatctaaagttgcatcacggtaactcaggaagttttttaggatcagttgaactggaatcattgaggctatagtgccatatctacaatttctattattaacagtacagatgcactttgtgtgagtttacagcaattttcaggtaaataaaccacattttgatttaggtttctgatttaggtttcgcgtcaacaatgtaggggcgttcgcaaagcgtgctggaagcatcagcattcggatgatagtcttaggtaaaaaccgataattaattgtccgaatgcttcgcccttactgtggtctaaagacatgaaaactgctgtcaccatatagatattagctttctagtctggaaaacatctgattacaaaaatttataactaactagggaatagggaatagggaacggggaaaagccacccctcttgataacttttgtaacttatacatcagtgctataaatcatctatcagattcaggattcaccatattcataatctatcctgagattctaattgcttatgtcaaattaaagatgtaaaaaatgtttttttggttttaaatgttgaatattgctcaaatttgttacattaaacccacagcaacaaaatatctgttgtcatcataattcatgtaggagtgaatgtgaatactatgtttctacgtaaacattttatttgtgtaccaagtctagccgccctgacagttttaggtagcagcgtttgtgcaactgcgcagacaacccatccagagtctgctgtcatctctaaacaccaggaaagcacagaacttaacaccactgtgtctaacatacagcaatttcccaacgccgctactctaaaaacggctaatcggacaattatacccattccagggacagtagctacctcatcaacaatcttgacttctgaagatacaaagcctacttcccaaccatctgcgactcaaatagcacagccgaaagaaatagcacaagcagatattgatttaggaagacctacccgtggtggtagtagctatgttggcgttgctggcaatattgggttaagtggcggagcttcagccttgggcgatggtaattttacagtcatcagcaaagttggtttcaccaggactctatcagttagaccatcggcaattttaggagatgatactgtatttctcgttcccctaacttatgatttttccttccagcccataggagatccatttagtgaacctttacctatagctccttatgtgggagttggtgcagctattaaaactggtaacaactcggaaactgctgtcatggtgacaggtggagttgatatacctctaaataatagattcactgccacagccgctatcaatgcaggattttttaatcaaactgatgtcggtttgttagttggtgttgggtacaactttggtggattctaagtaggttaactacccagatcctcaacttcttggaaaagtcggggatctatccagtatacagtatattaacgttttatttcttgctaggcagcaataaaaacatcaatttttgaacgcgtattataaaaatataaacattattatctataaaaaattatctataaaaagtaaattaatacttatttctagagatagagttaatgcaaaaaaacagagtttaccgttaaagaatcaggaattttacaaaaataagttacttccaaatacaaaaagatataaatatttcatttcttgtggtgcgggcatcctgcccgctaattatacaggttatacagggcagacaggatgcctaccccacaacatgagatacttgattaaataggaataattatggttggacgtatagttaaaaacttcagctttaaggaaatcaaaaaaacagacgacggtgcattatctattggtcaatttactaatgttcctgatattaacccaccacaaccacctggcaatattgctaattggtttttaggtacacgggcggaaaatggaacagaatttaaacaacttattgcccaagctgtagatcatattatagattatcggcaaagttatttaccaggtgatccagaaacaattactcaggatgttaaagcttctctggaatatcaagcaggaatgcaagctttaagggatgcctacaatcaattgttacagcatttgcgagaatatggtacgccattttttagtatgcgttatcaaggtcatattctttgggataccaccataccaggaatgcttggttattttgccgcaatgctgcataattccaataatgccaccattcaagcttctactgccaccactttattagaattacaggtagggcgtgatttatgtgcaatgattggttttcctgaaaccgataaaattgaaccttggtgtcatattactgctgatggttctattgctattaatgaggcgacttgggcaacaagagaattaaaattctttccttttgctgcgaaaaaagctttacaaaaacaaccagtattagctaaagctaaagcattagaaattaaaattgctgatggtagtcaaccaaaattagtagaagctacttcttggcaattatttaatatttgcatggatgatattttggctttaccacagcgaatttgggaattatgcggtgaaagtgaaaatatcaaagatgtttatgatgtttgggatttaattattccttataatcttaatgtccggggctggttggaaatgactcgttcttgttttgaggatgtgggggaaataaaaatgattgccccatcctctaaacattatgcttggccaaaagcagcagcagttaatggtattggcacagataatttaattgatatttttgttgatgctgatgccagattagatttaggaaggttaaatcaaactttaaatcaatgtttagaaaatcgccatccaatattgttaactttagcggttttagggagtacagaagaaagtgcagttgatcccatagatgggattttagaattaagagaaacctacaggaaaaagggtttagagtttaatattcacgttgatgctgcttggggtggttatcaaatttctactattcgccgtgattataattttgaagaacaaaaatcacctctatttattgatgattatagtcaagtgatgtttaatgaacacactatcaggcagtttaaacaccttcgagattgtgattctgttactatagatcctcacaaatctgggtatattcaatatccggctggtggttcactttatcgtcatagtttattaaaacatttgacaacttttaccgggacttatattggcggttctaaatctattcgtcctctagaaccatcggtaggaatttacggtttagaaggttcaaaacctggagcagcagcagcttctgtttttctttctcatcaactaattcgtccttctgtaagtggctacggtaagattattaatcaagcgatgtttaatagtaagttgttttatttgcggttactttttatggccgcagaaacagataattttattgttgttccattaccacgtttacctattgatcgcagtgatattagtgatcatattaatggtgaacatgagcattatatagcccatttgcgtcaacatctccagggaaaaaatcaaagtcaaatacttgcagttccggaagctatggcattatttcgagaaattggctcagatcaaaatattctcagttatgcttttaatttcaaacattgcgatcatcgtctcaatgatgatgctgatttatgtaatgagttgaataatcaaatttatgatcgttttcacattcattactaccaaagtggtgaagctgaaaatattcacaaataccaattcatgctaactagaactatttttagattggcagattatggtgagacattcattaataattatgctcaacgtttgggactagcaaccactccagaggaaatgtcaattttgcgatcagcagtgatggatccttatttaagtgatttacccaatgggggatcattttttgatgaaattattgaactgattcgtcaaaatgtaactgaaattattgaacaaaattttcgttaattgaaaatcaatacaggattttataaaataaatacagcagtttctaggtagatgaggtacatcattaggaagaaatctgctgtaatttaattttggcaaataaattgtttttggtagtagtaagctgttacacagctaaattgtataatcctaatattctgaactcttgtagaacaagcctcttgcctgttccacttatacaaattcaatgcacaacagcttaccaggaaaaatgtttactgaggactaactttgtctatcacctttattttaccctcatctcctactgtccaaacatcataaacaccaactacatcaccgttagcatcaacatctacattaccgcttgcaccttggtagttgattttttgcccttctttcagtagcttcagtccttcacagacatcactaacttctgttccttcaccagcagcaacttctcgaagtttagcagcaataccgacacctgtattttctttagcagcttgggctgataatactaacaaagctgctgcatcccaagcttgaggtgcatattctcctggtgttccgccttttttctcttgccacaatttcttaaaggctgctaatgctttaccatcagaaccaggaacagtaccaatagccccagttaacagatatttgccatcagaacctttacccacttgttccgggaaagtatctgattttactccgtcagtgagcatgatctgtactcccttggctacaccttgctggtaagcagctttgaggaataaactacctgtttcggcatacatgactgctaataccgcatctggtttacctgcaaaagcagcagcagcttcagtatcaaaggtttgggctttgggatcgtaacgaactggtttatctttattaactattgttccacctaatttttcaaaagtttctacaaatgctttttcaaaacctacaccatagtcgttgttgatgacgacggtagaaactcgttgaaaaccttttttcttagcaagttgggctaaagctaatgcttggtaagtatctgggggagcagtccgcgcccaaaatccttgaaaatcgcctttttgcgctttttcggtaaatacgggactggtgctaccaggggaaattaacatgactttgttaggggtagcaacggaaatggcagcggtagaaacactactagcaaatgaacccacgacaccagcaactttatctactgttgctagtttggtcatacctgctgcaccagctttaggatctgtttgatcgtctacttctattaatgtgactggttctccgttgactcctccacaagcgttgacggtttctaccagtaggggaactgaaccaaccatttgttgaccgatggaagctaagtcacctgttgttggtaataaactaccaattttcaaacctttagcactgctggttgttgtggtagtgccggcttctggggtagttgtagttccgtttgtgcctgtattatttgttgtagtggtattttcacaagcagccatgaacaaactactggctatagttactaaactcaaggctagggaaacactcaattttggcatatcttcctttcactcctctatgttgaggagcttgaaaatcaattattaaactaactgattagtttagctggttaatggctcaaactccacaagctaaatattaacattaagttttggaaatctaggaaggagtatttattatcaaggaattgccttgaattcttttccgcaactagagtttttataatttgtaaacggagagggagggattcgaaccctcggatggaccttacgattccatcaacagattagcaatctgccgctttcgaccactcagccacctctccagaggtaacactatactatattagcagtggttttttggttcgtcaagagatattttgtgatttgtcagggaaaaggggactggtgactggtgactggggactggggaagaaaattttagattttagattttagattttagattggagatcacaaaaacaatccaaaatccaaaatccaaaataaaaaactcctgccttctgcctcctgccccctgcctccttctatagcacttgcgatcgcatccaagcaactggtaaggtgcgtaatttttgccactggggaacataagcacgttgactgaaaacttcataatcattgcgctcaattacatctaaaatctgtccatagagcatagatgctgcccacactggccaacgggcatccgggtcaagataagtaattcccttatcggctttagtataaaattccctagctcgttcaatttgaaaccgcattagggaacgccaacgttcatctaatacaccttggaaaagttcttcttcgctatagttgaatttagccaagtcttctaggggaagataaattctgccccgacgtgcatcttcgcccacatcacgaagaatgttagttagttggttggcgatacccaaggcgatcgcttcatctatgggtaaatagggtttttgatttcgatgccaaggggcggtataaatgctggtatctacacccataattgtggttgacatcaagcccacagtgccagcaacgcggtagcaatagagatacaaatcctcaaaggtttcatagcgactgcggtataaatccatgcgctgacccgcaatcatatcccgaaagggttgaatatccaaagggaaatgttgcagggtatctactaaagcgacatcgtaattatctagtgggtgtccagcaaaaattgagtccagctgcttttcccatagttctaaagtttctggggtggttctagcagcagcaggaccatctactaattcatctgtacggcgacaccaagcgtatattgcccaaacagattgacgctttgccggactcatcagcaatgtacccaggtaaaaggttttggcgtacttggctgtgagttcttggcaaagtttgtaggactcgtctacagagaccagcgttttcatgcgcgggggtgaatcaggcagttgcagcattcgttgcgggcggtcgagttagcgtttgcaggttggaagtattggctaccgatggcgcttgagagatcgcctgtgctgttagcttaccagaaagcactgcaccttccatactgcctaaatagcgttgcatggtataacttccgcttaaaaagaagttggctataggggttttttggtctgggcggtactgttgacgaccaggggtagctgtgtaaactgaacggggcgttttgacgacatgagacttcagcagttttgctgggttgtctcctgtaaagtggtcagggaagagtttttccaactcggccatagtagcggagatgatttcctcgtcagatttgctaatccagtctttggcaggtgcgagaactaattccagcattgaccgatccgggttagcatattcccgacaggtgttactcatatcagcataaacgctgaggaggggcgatcgcgaaaataatagatgatcaatatctgttaatttccgatcaaaccacaaatgcaggttaattactggtacaccttctaaaccatctaatttctggaaaaattccatttttttccaaggttctggcaacatcacttttaatgggtcaaccgacatggctgaaacgtaaaagtctgctgttactatttcatctggttttccatctaaaccccgcagcaagaaacctttaactgtaccatcggagttcagcaaaatctcttttaggggcgcattgagtctgacttctccaccccgtttggtaatgtaatctacgatgggttggcaaagtctttctgtgggtgaaccatctaaaaaggcaatttttgatccgtaccgttcttgtaaaaaccgattgagggcggttaataaaattgtagaggaaacttcttcagggttgataaaagttaaggctttggaagcagcaataaatacatcactagcgactctttcacctataccttgtctttttaaccattcagcgaagctgtatttgtccatgtcctctacatactgttgaccccgcacgatggcaggaaacaaaccaatggcaaaacggatcttttgttcccaggtcaacatatcattgttccgcataatggaagcaatgatgttaaatggtgagggaatgtcaggaacatcaaaacgggagagagttcctggtttatctggttggttaaaaatcagggtatgctgtttccactggagtcggtcttcaatacctaactctttgagtagttgtaacatattgggatatgccccaaagaaggcgtgtaaaccggtttcgtaccagtcaccatcagagtctttccacgctgctactaaaccaccgagtacatccctccgttctaaaacaatgggagtgtaaccctcatctactagatatttagcgcaggaaagtcctgctaaaccagcgccggcaatagctactcgcatttaaacctactgttttcaatatttcttaatagttttgtcgttttcattatactttgcattctgttacatttggcatggctttgggaaattggtgactggtgactggtgactggtgactggtgattggggactggtgattggtgactggtgactggtgactggtgactggtgactggtgactggtgactggtgactggtgactggtgactggtgactggggaaacaggaaatatttactttctcctgccttctgccttctgccttcttgatattctgaatatgaaagatctacaaaaattcggtaatcatttaattcttggtgtttctggtacaactcttagtgatgatgataagcgggcattgagtgagttgaaacccgtcggggtgatttttttcgctaaaaactttcttgacggtgttccttatccagtttggttagagaagtttaaagatttacttaaacaaattaaagaatatactgaacggaaaactctatttaccagcctcgatcatgagggtggaagggttgttaggactccatttcctattactcgttttccttgtgcttacttggtgaagtcccaagcttatcaagtagctaaagccacatctatagaattaaaatcactgggaattaatctttctttttcccctgtcgctgatattttttccaacccccaaaaccctattattggttctcgtgcttttggtattactcccaaaactgctagtcaaagtgcgcgggaatattatcaaggactcagggaagagggtatacttggctgtgctaaacactttcctggacacggagacactagcacagattctcatttagagttaccaatattaaatttaagtttagaagatttacgaaaccgagagttaattccttttcaaacattaattcaggaacaaataccgctaattatgacagcacatattttgttcccgcaaattgatccagaagttccagcgacattatctaaaactattttaaatcacattttacgccaagaattaaattttaagggcgtgattgtttctgatgatttagatatgaaagctgttgcggatatgttcatgcgtccgggaacagtagcacgggcttttaatgctggatgtgatttatttatagtatcacgaaatatcaattcttcctctctagaaagaacctataaaatagccgaagattttactcattgtttgagtaatggtagtttaaatgaagaaatagtagaagctgctagggtaagagtcgaaaatttattagaaattacacctcaatatccagtttatcaactggagaaagaggttttattcaatcatgcagagttagcgattacttgctgttttgagtagacatctggttatatagcgtttcccagtctcatgaggtacaccctaatttatttactgttaccaattcccaattcccaattccaaattcccatgctataaagtagagacgttccatggaacgtctctacaacttctcaaagaagtagggtatctagttattcatgaattggattaaaagcgggatttatttttagtagttgaatcttagtggaagaagcctataaataaatcaattttgctagtcttcccagccttggtattgggctaacaacgcttccttatctgtgatgctaccaacttctgggggactcaagtaagcaatacccaatgctttgagatatctgctgtaattgaacttacttttatcctctttaccaccttgttcaccttgttcaccttgaccaccgttaatattagcagcaagttcaggagtgagttcagcaaacaattcatttttgatgtttaacatcagtttttctccaaaattcacctgggaaataacgttagttgaaaaatgatttttgttattcaactaatcgcttgatttctatagtaagtttcctaatttttaattacctccgaattagataattgaatttaggtactaattttaatattgtccaactgctgcgagttattgagattaatataaaaattccctgacatatataacgtaaagtttacgttttcagcaaatgagttttggctgatttgtcaataagcgagttattgagaaatcagttaaaaatattagctgttaaatgctgtaactattgtgtggtaatgcttccaatatttgcacttagtaatatcaatttttctatctcagtaatatttggatgcaagctggttatggattaagctttagatgagaaaatgcaacatttattaatataagaagatattttaaaagtcctcttagacttctccgaaaaagatgtagggacaattcatgaattgtccctacgaatgggtttcaggttatgcttatgtaattttcggagatatctattaatttgtcataatttgtaggggcgaagcatttgggcgataatttaacggaacaatcacacatctagatatcccaaatgcttcgccctgcccccataaataggttccataatttcttttctggagatgtctattctgttttgtcggtgatgtgggttatgatcctgatgatatgtacaatcgtgaatatagatttgaagatggtaaaaaaatctatggtttttactttaacccatgatcataattaattctatacttttcggttaaggttttgtacgctatgcccaaacgcctcttagtggttgaatcacccggtaaagtcaaaaaactgagtcaaattctcggtacagattggatagttcgcgctagttgtggacatatccgcgaactcagtaacgaaggtgaagattcactaggatttacaatggaaggtaacagtgtccgttgtaattatatcccccgtgaccaacgggctaaagaaaccattcaacaacttaaaactgctgttaaacaagttgatgaagtcattttagcaacggacccagatagagaaggagaaaccattgcttggcatctcaaagaaaccctgggattaagagaacccaagcgagtagtttatactgagattacaccatcggcggttaaaagtgcgatcgctcatcctagaaaacttgattctaacttaatcggtgcgggattatgtcgagattgtctcgataagctagtaggatacaaaggtagtcctctagtttgggcattaaataatggtgcaaaaagcgtcggtagagtccaaagcgcgacattacaccttatttgtcagcgcgaaagagaaatacaagtatttgtcccccaagattattggagtgtgtgggtagattatcaagaaggatttcgcgttttttacaaaggtacagctaacactcccacagaaacaccagaaacggaaacggaaacccacgatgatgcagctagtaataacccagacaaaccagaatctaagcgggttttatcagaagcagaagcagatagattagttgcagaagccaaacaacatccccatcaagtcatccaagttgaaggtaaactcacctatcgtcaaccccctccaccttttaccacttccaccctacaacaagcagccggatctaaactgaaatttgccccggaaaaaactatgcaggtggcacagaagctatatgaggcgggtttaattacctatatgcgaacagattcagtgatgttaagtcctgaattttgtgccagtgtgcgtaagtggttagaagaacatgatccgcaaaacgtaccacaacaagtaaaaaaacatcgtagtagcaaaacagcacaagaagcacacgaagcaattcgtcctacagatgtattccgtccgtcggtacagttacgagcagaattacctgaagatgagtttaacctgtatgtgatgatttggaaaagagcagttgcgtctcaatgtcgtccggcacaggtgagaaaaactctaataattactcaatcaggtaatattttatggcaagctaggggacaagttgtagaattttatggttatgcgaaatattggcctaatttgggtaaagatgccgttttaccaattgtacaacaggggcaaaaattaactttagaaaatgccggacatgaaaagaaacaaacccaaccaccaccaagatatagtgaaccaaaactcgtacaattaatggaaagaaaaggtattggtcgtcctagtacctacgcgcctacagtggctacattaaagaaacgtaattatattgaattaataaaagatcatcttcatcctacaagtttagggttagaagttgatgagtttttacaaaaggcattaccagatttattagaagcagaatttaccgccaagatggaagccgaattagataaaattgctgaaggtaaaaattcctggcaatcttatttaactacttggaatgaaagttattttgtccctgcgctgtctaaagctaaaactgtggttattaattcaggaaatactggtaataatcatggtaaagttgagcgtaaatatgaaagttcaaaaaccaaatgtcctgaatgtagtaactttttagtgaaaattcctagtagtaaggtgaagaagaaatactttcttaaatgtgtgagtgggtgtgaaaatattgttttgttttggagtgattttcataaacgttgggaagcaccgaaaacaaaaatatcagcagatgaaaagactaataaatcggaaactaaactcacatcttatccttgtccggtatgcaagaaaccgttggaggagtatagttatattaaagatggagagaataaaactatgttacgttgttctggtcaagattcttggaaggataaaaaacataaggatgcggcttattttcataccgcaaaagggtggtggagtcctaagtttgggaatttgataatataaaaataaatttatcatatatatatgttttaaaatactgatttggcatgaaagcagtgggtgatctgagatttgaactcagaaccagcggattaagagactcctaatatacaaaaaatcatgaaaaaatccaccgattgtagtcggtggtattcacaaaaattaaaattttaccagggcatgatacaaaccgctgtgaactgattctgcatcagaatctgcaacgttagctgctgcattttacgttgcactttgtgtatgttttgcggtatgtcataatcttggtgggttcataattttattgcttaacctcgcctgccagttaggttttctatgcctgtaacttaaaaagttatagattgggaagtaacggaagtaaaggaagtgcttgtgttaccgtacttaccgctacttccaaaacttaccattacttacggtcatggaagtgcaattttaaaaatgcaagtgattacgtacaaaaaaaacaccgcaaaatatgagtcgcggtgttgcagatgttgagttaggttttaagcattgtctatatgttttttcagttgtttcaattcaaactgtaatgtatccaagtctgttgtcaagaatccctggtaagcatccagcaatacggctatccggtcaaaattcttttcgctaaactcattcgttagttggattgccatatcaatgagttgactatgccatttgagttcttctaatgcctcaatggacaagttgacagattcaccaattgagctattggtgatttgctgaatttttgtcatgataataatgccctaatcagtggagttgattttggtgaagtcgtgccagtaggagagacggccatctctcttactggggcgcataaccgtaacagtcttgttacgctaattttttcacagttataaaaaaagaaatccagtaagcattaataggaagcgtgcgacgctacgacttatcgccatctgtaaacactgctgttttttcttatgtacacattctaaatcatggtttgatttctgtcaacaaaagttgttgttagtacctgtttacatctatgcagtatttgattacaatgtaaacatcgtcgtctacactatggtcaacaatggcaagtaaagtaatctcgttccgcttaagtgattatgagattgaggtattgcaatctctacagtccccagatgatgaagagtcgttaaacgtaactgctgccagattactgagaagtatattaggcacgtctacagaagataacaagcctgtagacaacataggcattcaggaaataattagacgggaaatagaaaatatcttgggtgcgtctgaaattctcaacagtgcaaatatccaagaactgatcaggcaggaagtagaaaaagcgattgccagtgagtttgatgaacgcctgggggagttggtcgcttgagagataacacccaaactctcaggcagtcagtaaattatgaggcagtacgcgacaaagtattgaaaaagctgaaagtaggcagacaatcaaccccaggtaaggcaattgacgcatttatcaaagaaatcacatcacaaggagtttaattcatgtcagatatagaaaagttcagtgagttggtgcaagatgcacaacgagaggacagctatgttaacgctaccaaatgggctaaggcttttggttatagactagataattggaaggagttgccagaaacaaaagcaagactcaaggcgttagaagaaaataccctgaaaaatagggattcagtgacagaagatgctaataatacagtggatactgaatgcccaaaaattagggattcagtaatggaaggcttcaataatacagccaatactgaatacctaaaaaatagagggacaaaatctcataagttcatttattcaactggtaggggatatggtgctgtaacctgggttcacccaatcatggcagttcacctcgccagctatcttgacccggcgtttgctaactatgttgctgaggttttcgtcaggtatattactgcagatccatatcttgcggcggacattgcctcaaggcaggaaaccaccaaagggctggacattatcaatgaggcggttcaggaacgttataagtttctcaagtctcgtttaaccaggaactattacataattagagatggttggggtcataaattgcgctacaacaccaaaaccaaaggcattgaattagatgggcgtgttctagatttagatgaccttcatctcgaaatagcagtagaccttaatttagacatcaagatccaggatgcgaaagatattgtgaaaaatctagccatagtgaatacctatccttcaatggacgaggaagatcaaaagaggttctacagcacgtactgtcagggaatcaggttcttcaactttgtccccacaaaagactgtccaaaaataaacgttggggatgggaaaaattaaattacgaaaaaaatagaaattttgactttggagatgcgacaggtgtaacaggtgcaacttatcccgaaactattgatatatctacaatccagcctgttgcaccccctgttgcaccccctgtaacaggtgcaacttatcgagaatttcaagaacctacccaagaatctactactgaactagcacaaggtatcaataatttagctgttactccggttacaccccctgcaacaggggtgcaacagctagaaagtagtgatatcaaggaagttgcaccccccccacgaagttgcaccccttagcgtgagttttaaggttggcgattttgttttgatagacagaatggctaatgctgtaaatagtgtttttgaaaagactgttgtacaaataaaaggaattgcccccccgtacttcagaacagattacgggaatcaccttgtctgtgatttagaaaaagtcgaaccttcaataagcgcagatttcctcagagaatgtatatcggctcaagattgggagatgcttgagcaattagctgtaggttggtgtcaggaatttaagagggcggtttatggatgcttgtccagtgaagagcagcaagctatcaaacaaatgaaacagcccgcgccgaagaaaccagtgaaggcgattaacctacctatactcgaagtggggcaagaatatttttccgcaataaatcagcagatggtgagagtagtctcgatccaggatggtctagaagtttgtgactgtgagttgaatgggaagcgcattgtttgtgactttggggatttgagagcgattccgacttcccaaactttagcagttgacttaaacgatggggttgaaattctggtaggcaagtataaaggcaaaaaagctaccatatcaagccaactctgtgaacatggtccccttttcttaaaaattgaaggggttagagcgtccgttagcagcaagttcaagttttgggggcatcagttaaaggcactatgactaacaaatggggagaaaggctatctcctgactcctgactcctgactcctgaaaggcactatgactaacaaatggggagaaaggctatacccatctcccctggtcagttaagtttgttcattcaataaattcttgattccttaattacctttcctttgctgtatacaatggtgaagctcaacaaatctatcttccagatttgataagcgggcggacaccctcttatccaaatttttaattattgattccatagccaaataattggttttggttttggaatcaatttgtaattctatttcctctttaaaatttttgaatattttatataggaaagaggcaagagcaatttctattcctataaatcctattaatatctcgatttccgccacaaattcacctcattttaaaatcgccaagctaatttattaattggtttgttaattgatctattttgaaatttaaatttgcaaattcttgggctaatgtaatatcttccgttgtatcgtcagtccccgtatattgccagcactgcaaactgacagacttaaaccaagtagggaagtagaaagaaagagtatattcaacagtcaccttggggaagaaaattatagttaatttattcacatacaaaaattcgggtttactcgccacatctgaaacaccccccacagttaacccacttctaaattccctaacagcacaacctccaaaagtccagcgccgtccttccggcacggtcgtactgatataggccgcaataatagatgaggttaaaattattggggcggtagccgggggaatagggatgtgagaagattcgccgccagtagtgccagcagtggctgaaaaattaaaaatagaatcccaattagaactattaaattcaactacacgccccataattagaaccccattaacctcgcattttcatcattgatttctaaaaaatcattgacatcaatttgggcaatttccaaacaatcaagaaaatcttgaaaggaaatttcaccagccataaatttctgcctagccagactggcgacttcctctctctctattaaattcttgatttcatcttcacacgcccctccaggatgaatttctatcaagaataaagtcatcagaatttctcaggaatgaaggagacagacctactgggagtttgttcaatcagtgcgataattgcccctttttgttcggagaaagatgggttagaggttgttcttcctagtgggaaagtgtacgacgatgaagcctttgatttgtaaggcagacccgtcagtttggatgttctcgtctgagcggtagttcctgttacattgcgtgcaactgccttagcaggtttgaatcccgctaacttaatagcggtatccccagatggtgctagttgtgctatccctaaagcatcttcggtcaaaccaacaattgaaaacttttcggcactgcgattactgatttccacaattactgaagtaatatcagccgctggatatccaaaaggcttgatttttaccagatttaatgaaccagggagactaggaatagatcgtgggtagtcgagatccaccttaccggctttgtagtcctggaatttccggaggacagtacctgctggtgcgtcaggtactggagatccttctgccgctcctggggttgggactgtaggctatatacctaaacatttctggtaaaacctccacaaatctcctcgtggtatgctatgattatagtattgaggtcgagatcatgttaaggaagaaagttattcgtgttagttctacagagtttgagcttgatgatggttctgttttccctcacgcagttgagttggaagaagtacctactcccgaagaatttcagaagttctatgatcattggttttccatatttgaggatttaactgatggagaggcttctgacgataggacaagttgcaaagcagcttaatgtcacaattaaaactcttagactttgggacaaagaaggtaaactagtagctgtaaggactcctggtagacacaacatatgaagcagagttagttgaagatatgctatctcttatgtcttctttttcggctcgaatttatggtaagcgttcggccgagcggaggaagaagaaatgatattagttgagagacacatgatta

SEQ ID NO: 6 - DNA, 107550 bp, Sphaerospermopsis sp. LEGE 00249
  LEGE00249_15
  modified_base (32)..(32): a, c, t, g, unknown or other
cccattccgaacagagaagttaagtccgactncgcagatggtactgcagtaatgtgggagagtatgtcgccgccttttttttgaaaccctgttctaacgaacggggttttttgttttatatggttttgataaatcaaaactacctgaagcccactgggcttcctcctcttaatatcaaatgccgcctttttttgacccgagcggagcgaactgacgaagtaaaacccctatcctaacagatggttttttttgttttagattatttgcaaactgacgaagtaaatgttcgcgtacctgcctgccggcaggcctaactgccactggcagtgctcctccttaatatcaaatttttataccgggttgcccttcgacaggctcagggtgacatggtcttactgtattgttatttgctgtagggaatagttaagctgtaattttaacagtaacttagtttgagtctcctctaacttaaagcttgttcttgccactagagtttgcgtgagggataggagcaactaccgcgtagtgcggatagcacggccccttaagtcaggctcaaggcaggccaaggggacacgccccaataaaaaacccactccaaggagcgggtttcagtttatttattttgattttctatccattttctggcattaacaaaggcttcaagccagggcgaaacttcgtctttttggcctctgttgggataatatgcccaattccaagggaaggtggagcgttcaatgtgaggcatcataaccaagtgacgtccggttttgtcacacaacattgccgtattgtaatcggaaccgttggggttggcaggataaccttcgtaagcgtatttggctacgatgttgtacttgctttcttcgtagggtaagtggaatttcccttcaccgtgcgacacccaaacgcctaaggttgctccggccaaggtttccagcattacggaatggttttcttgaaccgtaaccgaagtaaagatgctctcatgtttgtgagaatcgttgtgtttcattttaccgtgaacttcatgttcagggttaatgacttccaactccataaacaattggcaaccgttgcagataccgactgataaggtgtcgtatctttttaggaagtttttcaaagccgtgttggctttttcgttgtataaaaaagcaccagcccaacccttagcagaacctaaaacatctgaattcgaaaaaccaccgacagcaccaataaattggatatcttccagtgtttctctaccagagattaaatcggtcatgtggacgtcttttacatcaaatcccgctaagtacatagcattggccatttcacgttcggaattgctgcctttttcacggatgatggctgcttttggtctctcgactgcgctcgagatgacaggcttcagacccgtaaaatgacttgggaattggtattgtaaaggttgttgactgtaattgttaaaacgttctcgggccgtattgtttttagattgttttaggtctagtaaataagaagtttcaaaccaaacgtctctcagcgctctgatgtcaagaactaagtcttcaataatcaatgattctgaatcttgaacttttccgattttgtaaatctcgattccttctaaggctttttcaaaggctgcatcgtctttagcttgcaatactaatccgatgttttctgcaaataggattttaaccaaatcattttcttccaatgacgagaagtcgattttggctcctaaatggttatcggcaaaacacatttccaatagcgttgtgattaaaccaccgctcccgatatcatgtccggcaacgatttgtcggtctttgattaaattctgcacagcattgaaggcctttttaaagaaagcagcatctttgatggttggcgtttcagcaccaattttattttgggtttgggcaaaagaacttccgcccaatttaaattcgtcttgagacaaattgatgtaataaatcgaaccaccatttcgttgcaacaccggttccaccactttggtaatattggaacaattccctgctgccgaaataattaccgttcccggtgcaatcacttcgtcgttcgggtatttttgtttcatggaaagcgaatcttttcccgtaggaatgttgatgcctaactcgatagcaaactcagagcaagcctgaaccgcttcgtacaaacgggcatcttcgccttcgtttttacaagcccacatccagttagctgacaacgaaacactttttaaattgtcttttaaaggggcaaaaacgatgttagataaagcttcggctatggcatttcggctaccggctttcgggtcgattaatgccgaaataggagcgtggccaattgaagtggcaataccttcttttccgttaaaatctaaggccattacgcccacattgtttagcggcaattgtaaaggtccgacacattgttgtttggcgactcttccgcctacgcaacgatcgactttattggtcaaccaatctttacaagctactgcttcgagtttcaaaacgtctcttaagtagtcttgaatataatcggaactatactctaaatcggtataatttctttgtatggttttatccgccattatggttttgggcgaactgccgaacatgtcttccaaggccaggtccataggtttactgcctgttttttgtccttcaaaagtaaaacgtttgttggcagttacgtgtcccacttggtacataggcgaacgttctctttctgcgatacgttgcaaagtatcaatgtctttttgaccaatgaccaatcccattcgctcttgcgattcgttgccgatgatttctttggccgatagggttggatcgcctaccggtaatttgtctaaatcgattaaaccaccggtttcttccaccaattcggataggcaattcaaatgaccgccggcgccgtgatcgtgtatggaaacaatcgggttttcatcgctttccaccaaaccgcgaatggcgtttgcagcgcgtttttgcatttcaggattggaacgttggatggcattcagttcgattcccgaaccaaaagcaccggtatcggcagaggaaactgcggcaccacccattccgattcggtaattttccccgccaaggataacgattttgtctccttcgctaggtttctttttgatggattggtcgagctttccgtagccaatgcctccggcttgcatgatgactttatcatagccgagttttctgtcttcttcctggtgttcgaaggttagaatggaaccagtgataagcggttgcccgaatttatttccgaaatctgaagcaccatttgaggctttgattaagatgtccatgggtgtttggtacaaccattgtcgctcggtcatgccattttcccattcgcggttatcttttaatcgggaataagccgtcatgtaaacagcagttccggccaaaggcaatgaaccttgtccaccggccaaacggtcacggatttcaccacctgaacccgttgctgctccgttgaaaggctctacagtagtaggaaaattatgggtttcggcttttagcgaaatcacggaatcaaattccttagtctcgtaaaaatccggtttgtccgcacttttaggggcgaattgggttactttcggtcctttgataaaagcaacattatctttgtacgccgaaactatatcgttaggatgttcggcggatgtttttttgatgagtttgaatagggaagtctctttttcttgtccgtcaatcacaaaagtaccgttgaagattttgtggcgacaatgttctgaattgacctgagaaaatccaaatacttcagaatcggttagctttcgacctattttttgagaaacacggttcaaataggcaacttcttcttcgcttaacgctaatccttcttgttggttgtaagcggcgatatcctcgatttccaaaatcggttccggttggatgttgatggtgaaaatatcttgggttaactcgttgtacttttgcgaaagcattgggtcgaaatcggtaaagttttcagttactttttcgaattcctcaattcggataataccttcgatacccatgttttgggtgatttctacggcattggtactccaaggcgtaaccatagcggcacgtggaccaacaaaaaaatccgtcaggacggatttttctattttatgagcgttgccaaaaagccagtttaattttgagatgttttctgccgaaagttcgttttgcgtttgtacggcaaaaacagtagtactttcgtttccgaagaaatgaatcattgtctagttattaatgttgttgttgttagtgcaaatttagactaaaaaatgcgaatatggaaaaaggtttttcaacaaattagtcttgaaaagttgtccaattataagcgccggcatcaaaaggagttgttcttggatttcctaaaatatcaaaaggtacgctaacatcatctccaaatcctctggcagccgaatcatcgccgatgttgagttggttattttgtacgtttaaaaatttagggttttcgttgcgtttgatttcaggattatcgaacaggaagctgtacaacggattgctactgctaccgaatttcaataaacatttggtgaaagaatggttgaataggcctgaagtagccggatcaagtgatagttcataagtattgcttccgtaaatgatgcagtttttaaagtccgcttgcaccaaatcgaagggtacttgagcaccattttcatcttcgtaataattgttcaacaagacagccacttgtcgggaactcgcccaattgttgttaaacgtacattgtttgaattcgtaacttccacccaaagtacaagctaacgaagcgataccggcgtaattaataaccacgttttcacctctaatctttgcagttttggcgtataatccaatcaatgacgaattgtatatctgagtgtttttaatcgtcataaaattcccgtcattgctatcaatgttcaaaccgactgctgcatttttgatgattacgttatcgatttcatttccggtacttccggcagtcagccaaatggtttgccattgaccggcaacatctgaaaatccaggttctaaacgatcaccttcaaaaatgatattgttttctaaagttccattggctttgaatgaagcgccgttgcccacaattaatcctgagtcggcatggaaatgtatacgagcaccgggttgaacgttcaaagtttttcctccgggaacggctgcataaccataaatgacgtaaggtttatcgttgccccaaacgtattcattgccgttaacggggtcattttcatctaaaaagaaaccatacacaggttcttctataccttcaatagttagggtttcggtagtaccgtcggaaaatcgtttcggatataagaaatacgcatcttggattagtgtcactaaatctacatcttgcacttctccgttggcgtgtcggaattcaatgatatcggtgtataagaaatcggttggattggcttcggctacatccgtagtcacttcgatgaagatgtacatgctgtctttggccaacaactctacatcattaaacactcggttgttattgcctaccataccatcaacggtcatgcggtatttagaagcttgtccttttcctaattgtatggttggtattttgatgtctttattacttcgattgtatacttttaaagtgtaggtactcgacccgatattggtaaaaacagtatctaaatacacggtgtctttcgagaaaaacaaaccacctgtactgggttcaaattcaaaatcttgtcgacaagaactggtgaataaagttaaaccaattacaaaaaagaaaataagatagcgcatcagtattatgaatttttactttgtacaattcgacctaacagtctccggtcgtaaatgtaggtattatagtttgatttgaaaataagtcgatttgaaaatttgactatagtcttggtaaataacggtaaaaataccattatagtattttcgtggtgtcggcttttttccttgtgggaaataagtagtaatttcgtgaaaaatttaagctatggcattggatagagaaaaagtgttacaactttgcaacgaatggagcaaaagcactttgatggaaaccttagaaatagaatatatagacgccggtgaaggctttttaaaagctaaaatgccggtaaattcaagagtacatcaacccatgggattgttgcatggcggtgccacagtggctttagcagaaagtgttggtagtgcggcttcactaatgtttatcaatactgaaaagcaagaagtgcgcgggattgaaatttcggctaatcatttgaaaagcaaacgcgaaggaactgtattttgtactgccaaaattattcatcaaggaagaagtattcatttgtgggagattaaaataacggatgaaaacgacaagctgatttcgttgtgcaagttgactaacatgattttacccagaagataaatgacggatttgtttgtaaaagtcaaagcgcaactggaaaaccaattgccatttgtgctgtatgctaagcccaaagctgaccgcatgattgctttatttcaggcgaacgacagcttaaactttttaaaagattttagtgagaaaggttttgtttttgcgccttttgacggtgatgccattccttatattccacaagccgaatcagaagtttatgtcgagaagataaaggaaacagactttttaatagctcctaatccgatcattgaggctgacgaaaccgctaaaagagattttgaagccttggtgacagcaggagtcgatgccattggtcaaggcgcatttgagaaagtggttttgtctcgtaaaactatggttgctgttccttcttttgagttggaaactgtatttaaaaagttggttgctttttatccgaccgctttcaaatattgtttttttcacccgaaaatagggctttggttaggcgctagtccggagcagtttttaaaaatcaatcaagaagctttgcaaaccgttgctttggccggaacacaagcggtgaccgactcaactcacctagtttggcaagaaaaggaaattgaggaacaacaattggtaaccgattttattacccaaagtttgagcgataaagtttcggaactcactgtttcgagtccgtattcggtgcaagccggaaatttgtggcacatcaagactgatattgcagcgactattggtagcgacagtaacttggaggaaattattaaatctttgcatccgacatcagctgtttgcggattgccgaaagcggaggcaaaggattttatcttgcaaaacgaatcgtatgaaagaagttattattcgggatttttgggtgagttgaatatcgatttggccacattccgaaccgagcaatctgatttgtttgttaatttgcgttgtatgaaaatcaacgacaagtacgtcgaattattcatcggatgcggcattactaaagacagtgtgccggaagcggaatttatcgaaacggtcaacaaatcgatgaccatgcggaaggttttgaattaaagcagttgtatgttgtgggttctatgttgtaagttaaaagcaataaacttcgacacataatttacatgatattataaaaaataaaaagtatgaaattagatattttagcgtttggcgcacatccggatgatgtagaattgggttgcagcggtaccattgccaaagaagtctcaataggaaaaaaagtagggataatcgatttaacgcggggcgaactcggaactcgaggctcggtggaaattcgtgatcaggaagctgctttggcggctgaaattttgggtatttccatgcgagaaaatttaaacatgcgagatggcttttttgtgaatgacgaagcccatcagttggaaatcattaagcgaattcgcaaatacaagcctgagattgtaatttgtaatgccatcgaagaccgtcacatcgatcactgcaaaggcagtaagttggtttctgatgcctgttttttatcgggtttgcgaaaaattgaaaccgagcatgaaggcgtgcaacaggaagcgtggcgtccgaaagtagtgtatcattacatccaatggaaaaatatagagcctgattttgtggtagatatttctgaattcatggatataaaaacacagtctattttggcttatgcctctcagttttattctgaaaactctaatgaaccgatcacaccgatagctactaaaaactttttgcaaagtattcattaccgcacgcaagacttcggtcgattgattggtgtggattatgctgaaggttttacaaccgagagatacgtggcagtcaagagcttaggagatttgatttaaaaaatctaaaaaacctttgcaaaagttaagttttgcactatatttgcactcgcaaaagcaacttaggttctttgcaacaataaatggtgattgtagctcagttggttagagcgtcggattgtggttccgaaggtcgcgggttcgagacccgtctttcacccaaaattcaaaagccccgtatttcggggctttttttgtaactgtaatttaccgtttatttatcggttttgtctactactaaacgttgctctcggttggcaatttcccaggcaatagcaaaagcgtattgcgttcttttggtgagcgcgtcgaattcaatttttcccacttcatcgcttggtttgtggtaatcggcgtgcgttccgttaaaaaggaaaactgatgggatattgtgtttggcaaaattgtaatgatcggatcggtagtaaaatcgattcggatcttttttgtcgttgtatttgtaatcaatagcgagcttaatgtattgttggttcacattctcgcaaatgttgtataaatcggtcgataaataatcggaaccgatgacatatacataattattactgtctttgtgaaaatcatcacggcggccaatcatgtcaatgttcacatcagccactgtattttttaacgggaaaagcggattttcggaatagtaacgagatccgtgtaagccatgttcttcaccggtaacatgtaaaattaagatagatcgtttcggaccgttgccttcgtttttggctttttgaaaagcagcagccatttccattaaagctacagttcccgaaccgtcatcgtcggctccgttataaatctcaccgtctttaactcctacgtgatcgtaatgtgctgaaattacaacaatttcatgcggtttttcagaaccttctataaaggcccaaatattctctgagtcgggtaagttttcgtttcttttggcatttaaaaacgcggccggtactttttggtagtaatcgtcggcacctttgggatacgaaataccgtttttcttgtaaaaatcgatgataaacttgccggctttcttttggccttcgctgcctgtttcccgtccttcggtttcatcggaggcaatataggtaaggttggtgcgcaggctttcaatactgatggagctgagataggtgttcaaatcggccaccttcttattaccggattttgtagggctacaacttactgaaacaacaaaaagtgtgaataagaaaaatattttttttagcatgattaatgaatgttaataaatgaaaagaagaaaagaccaatcaggataaagcttaagatgaacatgttgatgaaaaatattaagatgccctttatgatggttttcaatcggctttgctggtaaaagcgatggtgtgccggaaagaaataatacagcatgtagatgataataatggtgtcggctatgtaaacaatagtatccaacagccaatgatttcccaataagcctataaaaaagttgaccaattctaaaattaaggaagctagtaataaaaaggaaaagtaatgcaaggtaaaaatgccgtggtcaaaatagtaccatcgttttttactttggaacaaccataatacaaaggcaaacaaaggcatataaataaacaaagcctttggaatgttgtggataaatgcttcggagagtttgtcgaaaatttcatctttggtctttccttttttagctaacagtatctttttgtgaaaccaatagccaaaatctccgagcttttcctccggtttgccatattgctggatcgaatctaattcttcgatggagcggtatccgaagttcatgtaatcgccctcgtcgtattcatgatttcttttggcagcagccaattgtaaggagtcagctgtctgtttatcaatatggccatcttgttccaactttttaatccatgcttctttttgaagcgtgtctttagattgcgcaacggtatcaataggagctgcagtaattttctcggtagatttatggttgttgacttcgttaatattagtcacttcttcccctgagctatcaggtagaattgagaaaagaaagaaggtcacaaaactgataaagatgtacaatcggatgggcgccaaataagacattcgcttaccggaaaggtattctttggtaagggaagcaggtttaaagattaagtttcgaatggttttccaaaacgaattttcgtaatgggttaaatcttcgaagaagtggacaaataactgtacaaatgtttttcgggtatctgtattttcctgaccgcagtttggacaaaaacggtgttctaccacatgcctacagtttaggcaggttttatcttttcttaatgggcttttcgacatactacagtaatgtgattggatacgtaaaactattaaaataatttctatttttgaggaactaaatacaaaacgatgcaatcaaaagcacttacaccatcagactatatagccgaattgccggaagaccgtaaaaaggttatggagcaactcagaaaaaccattacggataatttacctgagggttttcaagagggaatgggttacgggatgttgggttatgctgtaccacattcaatataccccaaaggctatcattgtaatcccaaagatccgcttccgtttatggcattggcttcgcaaaaaaactttatagcattctaccacatgggcgtttatgctgataaaaatttgtatgattggtttgtggctgagtatggtaagcgttgcaaatacaagcttgatatgggcaaaagctgcgttcgtttcaaaaaaatggacgatattccatatgacttgattgccgaattggtgcaaaaaatctccgttcaagactggatttcgctatatgaatccgcgttcaaaaaatagcagatgtttagtattgttcccaatacagataatcaatttgcagtcgtaagagcaatcgctttcgaagtttggcctaaaacctacggtgcaattttaacggaggcgcaattggaatacatgcttaatatgatatacagtgtggctgcacttcaagaacaagctaatttcaaacaacatcattttgtactgatttatgctaatgatgaacccgttggatttgcttcatacgaacacaacttaaacaagtccgaaaaaactaaaatccataaaatctacgtactatcttcccaacaaggaaaaggaaccggcaaagctttggttgattatattgaacagcaagcattggcttttggtgataaggctttgtttttaaacgttaataaatacaactccgcgattcaattttatcaaaaaaccggttttgtgattactaaagaagaagttatcgatattggtaatggttttgtgatggatgattatgtaatggagaagacattcaaaagctaaagactattttaattcagcctataaataaaaaagtcccgaactatattcgggactttttttattgtatttcaaagaaatttattctttgatgaatttctgagagtaatctttaccgttactgtctcttaacattaagatgtaagtccctttagcaaggtggttaacggtaaccgtttggttgtttaccggtgtttggtaaaccattctcccgcttaagtcatatacttgagctgtaacaaattcaacaggattggctgtattgattgcaatgttgatggtgttttttacagggtttggatatactgtaaatacagaactttcaaaagcatcaattcctaaagtagcgccttccactacatttaatggttggttggctgtaacgttgttgtaagtatcaactataccagatggccatttgataattacttggttgattactgtagaagtaccaagaccgaagtaagcatttaaggagctcatgtaacggaatccttcaccactacggatatctctgatttgtttgccccatgggccataaatttcaacgcgagcaccaattccgtttctgttgctttgaataccttgtaaagtcacttttaaccaattgttgccattaggtacaccatagcgaatagtggaaccattttgaatgtctaggaaaccgtcattatttaaatcgccaacagcgccaacactaatggcgttataacctaccggcgcaaaaacattacttccttggttaaacataattttattgccaccacttaaaacatcaactttaccatcgttgtcaaaatcgtaagcaatgttatcaatgttggttgcagtgttggtatcccaacccgaaccggcagtgatgttggtgaaagcaactgtattggtgtttttattgtttctaaagaatttgtgagcaccggcattagcagtaatgattacatccatgtcgtcgtcgttatcaaaatcagcaattgccgaagaccaggtattgattggagttacgttgataccggcttgagcagaaatatctgtaaataccccattaccatcatttctgtgcaattcacacggaggtccggaacattttgagataaacatatctaaatcaccatcattgtccatatcagtccataatgaagcataatttccaccactggcagtaacacctaacatgtaggctccggaagtacctgattgatagtaattcatattagcacttccatcgttcatgtagtaaacatttggagcgatatcatgacaagagaaagcatctaaatgaccgtcgttgttgatgtcaacaaagttagttctttgacagaaaatgtaatctgaaggattgatattggtgtatgatgtaccgttgtttgttgatctccagaaagtcaatcctgaaccacttcctaacagtaaatcattgtatccgtctttgttgtaatctcctgcggccatactccaagatggcatgtcgctggttcctgtaattgggaaatcagtaacagtaaatgaacctggagtgtttccttggaaatgcactcttaaattattgttacttacgccaacaatatcatctttaaaatcaccattcatatctacaatacagatattgtaaccactattgatggttgaaacagtttgattgttataggtgataggaattacgatatgcgtttcggtgatttgaaaattaaaaccggcggcactccatttgttatcccatacaatgtaataggtggttcctgcagaagcgataaatgtataagttgaaagataggaattagtatttccaaagttacaggccaatacacccgaattatcatcgctcccaacacaagtcaatccagaagtacaattcccggaataaacatttaggttagtatctttacaaagattaactgctaaatcagaggtgatagttacgctggcattaacggatggcgtgtaagaataccatttagatagagctgcagtagaacaactggtgttaatattggtttgatcaatagctgctactgttgtagttccagcactcactgcaatagctgcattgcatgggttgtatccggcaggaatttcacttacctgaaagttgaatcctgtagattcatagcggttgtcccaaacgatgtaataagtttgaccggcaacagcattgaaagttgcttttgataaataggcattggtgtttcctgaattacaggctaaaactccggagtcgtcatctgccacaacgcaagtcattgtagtacaattaccagtgtagattcttacccttgtgtctctacataaattttcttgtaaatctgatgaaactgtaacagtgtagttttgagttggagtatatgcataccactcaacggcagttacattggcattggtgtagctacaagcggtggccggcaaaccggtaccatctattgtattgatagtgaaagttcctgcagtagtaatgggaatagctgtcgcacaagtattttgtgcaaaagataaactgcttacagccaacaaaaagaataaaaatgtaatttttttcatgttattgaattattggattggttttatgttatgggcaattttgtaatgagttgatccactcttcaattaaagcaacgccttcatcatgaattaatgatctaccgtgtaaaggcatcatgtaactttcattagtagtattaattctgaaaaacagcattgattgagatggtttacttggtgtgataagattacttaattccggatcaaaatcctgcatgtcaacggtaggaacacaaacacccatattgctttgaccgttaagacctcctgtttcagagaagttaagtctaagtggtctgtaatcacagtgcccggattctttgtggcagtgcgcgcagttgatgtcaaagtaagagcgaactcttttttccaaaggttgggttgcgtcgctgtagtttattgtagtgtgttcaggggtagggaaggcaaagttgttttctaaatagccttgttcaatccattttgtcaattggtttttagtttcattaccgtagttgtaattgaagtttaggttttgcggtttaatacctataggaataaaggtagtaatttcttctgcaccggagccttgcttgtacttatgacatacaatacattgtacttcagatggtattctgtagttaacattacgaaccacattattatcatctttaaaagttagttgcttgtaacttccatttaaatccaaaaaggcttctgtttgagcttcattccaaacatagtcagcaaaaatccaaccatcagctttgcgaatcatgatacgtgtttcaatgattaaaggcgtatcagaaggctgaattttttcgtaataaaaatttttaattaagacagcaccaaccggtaattccaatattttatcatcaccgttaaaggttgcttttgttccatcaggcatccaaacaaaacgctttttgtgtgcataatcgctaaacaagatgctggcaggttcatacggaattacattcaacgaaggcgttaagttttttaaatcaccttcaaaaaaatggtaatccgataatttaggataaggaacttgagttaagtcaacaactacaggagataccggcgtgtaatcctcatcatcgtcattgtcagaacaagaagagaaaatggtaagtgtaaagaccaaaagtagtgcttgtaagtaattctttttcataaaatttttaaaatgcagtccaaatataataatattttggtaacaatctaaaaattaacaaatttcccttgatcaagttcaatgtttttatgaaaaatgtatgatttttgtttttttatatagaataatgaatcttattcggaatctttattggcgcgttgcaatatgttttccggtaaagcttttttggctttagcgcccattttttttaacttttcaacgctgttgattaggtttcctttgccgtcaaaaagtttattcatagcattgccgtactctacttttgcttcgtccatttttttaccaatttttactaaatcggatacaaagccttcaaatttatcatataaagcaccggcttgacgtgcaatttccactgcattttcctgttgtttttggttggtccacatgctgtcgatggttcgcaaggtagccaacagagtggaaggcgttacgattactatgtttttttcaaaagctttattgtacaagctggtatcttcgtttaaagccaaggcaaaagccgattcaatagggatgaaaagcaaaacgaaatccggactttccatttggtacaaatcgtgataatttttttcacttagttgatccacgtgtcgtttgatggcgattaggtgttctttaagaaattgcactttttcagtctcatcttcagcgttgatatatcgttcataagcggttaaggttactttcgaatcgactatcattttcttaccgtccggtaaattaatcactacatcgggaaacaagcggtttccttcttcggttacaaaactttgctgtacttcgtattctcgccctttttccagtccggatttttctaaaacgcgttctaaaaccaattctccccaattgccttgcattttactgtcgcctttaagtgccttggtcaagtttaatgtttccttactcatttgttcgttcatctcacgcaagcccaaaatttgttggcgtaaagcggcgtgataatcaatactttctttatgcgtgtcttcaactttcttttcgaataattggattttatcttgtaaaggggaaagtatgtttttgaggttttccttgttttgctcagtaaatttaaccgttttttcttctaggattttattcgccaaattttcaaactctttggtgaatttttcctgaagtttttccacttcttccttttgttctttatggcgttcccacagatgatcaaaatcagtttcttttttcgacaattgaatggccagtgtttctttttcggtgcgaattttttcacgctcctgaacaatttgattcatttggtttttgagttgctctatttgttgcaacaaactgtttgtcttttcttctaacgaagctttatccgatttggattgagcggcaaatagtgttttacccaagaaaaatccaatagctagggcaataataaaggcgatgattatcattagattatcgttcatataattccacaaaattaaggtctaaatatacagcgttttatgagataaagttatagtaatttcaaaattgtttcctaaattggcatcgtttttgaaaaatgcttttttagagaaaacaaactaataataaacctatttaaaaccacagtaagctatgattagaaaaattactttttcagccttaatgctctttgcttcgctttcttttgcacaattaggacctgtaggtcatttgaccatcttttcggaagacggcgacaagtttaccttaatccttaacggagaagtgattaatgatgttccgcaaaccaatttgagagtggaagatttgaaccagccttattacaatgctaaaatcaagtttgaagacaaatccttaatggatatctccaaaaacaatttgatgttaaccgatgttgacggaatttttgccgatgtaacctacaaaatcaggagagataaaaacaacaaaaccaaaatgaagttgaattatttctcctctatcccggttcaacctgattttattccaccttccaatgtacatgtaattcattacggtcagcctcgccctgttcaggtagttgctccggtacaacaaccggttagaggtgttactcaaacaaccacgactaccactactcaaaccggcggtactgctgtaggtgttggtgtaaatgtaggtggtgttaatatgggtatttctatcaacgacaacatgggtggcggagctgttactcaaactactactaccactaccactgtaggtggaggtcacgtagtggaaacagttgaaccagttagaggttgtaacggaagaagttgtatgactgccgggaattttaatgctgctttagctactattaaaaagcaaagttttgaagacactcaactaaaaacagccaaacaagtaattgcagctaactgtttgaatgttgaccaaattatccaaattgccaatacttttagctttgaagataacaaattggagtttgccaagttcgcctacgattactgtatcgaaccaagaaactatttcaagttaaatggcattttctctttcagtagcaatgtagatgagttgtctgattacgtccaaagtagacaataacagaaaaatattttaatctgaagaccatccttagtgatggtctttttatttttgctcaaattctgtcatgaaacaccatcattttttactccacaaaccgcatggttttttaagccaatttgtttacgaaaaaaaacggcacaagaagcttttgggcgaactgtataattttcccgaaggcactatggctatcggccgtttggatgaagattcggaaggcttactattgctaaccactgatgggatgatgagtgaaatcgtacgcagccaaaccatcgagaaagaatattatgcccaagtggacggcattatcacaccggaagcagtaacacagttggagaacggagttgaaattggttttaaagggattcgctatactacgaaaccatgtcaatccaaaattattactcagctacccgaatctataggcgagggcaggagaatacgtgatgaacgccacgggccaaccagttgggtttctattactttaacggaaggtaaattccgtcaagtacgaaaaatgacagcagccgtaggatttcctactttgcgattggtccgaattcgagtaggaaacataactttgcaaaacttaaaagcaggagaagtactgccggtaagtcaattcaatctttaaattgtctaacaatctaatcatctaacaatctaaatgcttaacatagttttagttgaaccagaaatccctaacaataccggtaatatcggtcgactgtgcgtgggaaccgaaagtcgtttacacttaatcaaaccatatggttttgaaattactgataaaaatctaaagcgttccggtttggattattgggtgcacttggattggaaggaatacagtaatgttgaggaatggattgcccaaattccggacaaatcccgagtgtttttaatgagttctcatgcaacaaaatcgatatacgaagtagcctttcaagacgaagattggctggttttcggtaaagaaagcgtagggttgagtcaggaagttttggcccaatttgaaaaccatttaaccataccgatgtcgaaacttattcgcagttacaacatcgctaattctgttgcgtttgtggttggtgaagccaagcgacaaatctttacaaagtaatcgattaggaaataatgaactttcctttttcaccatcaaacgcaatggattcatctttgaaaagcgagctgaaaacaccttgcgtaattaaattacaaggttggtcttggtgaacttggttttcagtcatcactatcatttggtcactgagttgaatggccaaatcaatgtcgtgtgtagaaaacaagatgcacttattcgtttctgaagacagttttttcagcaatttaaagacagatactttgtgaactaaatctaagtgcgtagtcggttcatccaaaataattattggcgtatcttgtgccaaagccctggcaataagtacaatttgcagttgcccgtcactgatttcgtaatattttttattagtcaagtgctcaagttgggtaagtgaaatggcttgctttattttttcgtgatctgcttccgagagttgtcccagccaattggtgtaaggttgtcttcctaaggcaatcagttcatatacggttaggttgttaagtggtaatttttcggttaaaaccaaacttagctcttgtgctatttctgtcgttgtaatatcatgaatgtttctctcatgcaaaaaaacggaaccctgtaatggtttttgaatacctgtaatagtgcgtagtaaagtcgattttcccacgccgttcgcaccaactaaagaatagagttgccccgaagttaattgtaaattcaagttggaggcaatggtgttggttatccttttggaacggtaacctatactcaattcttgggtgctgatgatgttggtattggtactcattaagacatactttttttgctgacaattaaccaaactactacaggagctccgattatagaggttatggcattgatgggtaaggtaaactcaaagccgggcatctgggaaacggtatcgcaaaccaacatgatgatagccccgatgaacaatgtacccgtaaataaaattcggtggctaccggtttggaatattaatttcgacaaatgtggtaccgctaacccaacaaaggcaataggtccggcaaaagcggtaatacttccggctaaaatactggtcgctaaaatcagtaataatcgtgcttttttgatattcaagcccacacttttagcatagttttcacccaacaatagcgcatctaatggttttaaggtgagtaaactcagcagcaaaccaaatgcgacagaaacgctgagtatcatgatactttcccacgacaaattaccgatgcttcccatcgaccaaaaagtatatttctgcaattgttcggccgaactgaagtagctgaaaacactcacaatggctccggtaaaactactgaacatcaagccaacgatgagtatcgacattgtatcacgtaatcgttgagaaaccactaaaatcattagtaaaacaaacaaacttccaaagcaagacgctaagatgattccgtaagatgacaataagaattctgaaaaaaatgaaggcaaaaatccggcacccaacaacacaaaagccacacccaaactcgaacccgagctcaagcctaaaacataaggtccggccattggatttcggaaaaatgtttgcatcaataaaccgctgacagacaatcccatgccgactataattgcggcaatggctttgggtaatctgaaattcataatgatgtattcccaagtatctttttcggcttgaccgcccagtaaacttttaaagacttctttgatcggaatagcgacttgtcccatggaaatattcagaagcaatgtcagtaacatcgttaaagacaaaagggaaaagagtagtgtatttcgactttgattgttcaatttattgtaatttctcgaaaaaataaggtttgtagctttttaggagttccgggtgtaaaattttgacaatgtctttcaaaacaatatccggtcggttaggcgctaattcataatatacgatgccaccggttttaccttttctaccactaaacgaatatacatttttattttgaaaggctttaaactgactgtaatgcggattggcggcagtcatttctcgcaaggaagaaaattgtccagaagttatccaaatatcggcatttttggctttttccaatacggtttcaaaagaaagcgataagctgcccgttcctgtagtttcagcccataaatactggcctttagcttcttttaacagcaaacttccccagctgttgcctttgggtaaataccaacggtcttcaaacatgtctccggccaatatggttggtgtttctttggcgttttgggcaattcggatggtttttaaatactctttttctattttgctgaagatttgctcagcctttttttgctgtccgtataaagcaccgaaaagcttgatccattcggctttacccaaaggagtttcttcattccaatcgccattcagcagtacttttaaaccgcttttttgcaaattatccaaggttggattgttgttgtcgatgccgtaaccaataatcacatcgggttgtaaattgagcagtacttcagtgtttaaattttgattcatccccaattctttcacttttccggcatcaattcgggctctgactttttctgaagagatataatcgagattagggaagcctactaaggttttttcctttttcaacatttccaacgaaggaacgtgcgtagttgaggttactacgatactttttatcggaaccgaaataattgggttttgtttaaggctgtccgggactataccgtttttttcttttaagatgtaagtataggtttttgtcgctttaggccaaggatttcgaaccgttagtacggtataaccttcataattttgaatggaaaaacctttggcgtggcgaatggtattttgggaatcgattcgctcagcagttacagtctcttttttgcattgtgcgaatagtgtactaagcgccaaaacgcacaacaaacggaaataggttttcatccaattatttttttgcaaaaatagaagtttgttgccgaatattttgagtcttgtaacatttgatgccaaacttagatttttaactgcttaattttactgaaaaataaaaccatgagagacgattcaaatacctttatgtacctcgttggcggaattatcctattgcattttttagttggatttatttggctgattgtcaagttttccaagaaaaaagacgaataaattcgacttgttgggattgaaattatattatttctgctacatttgcagtcgaattatggttgcgcattttgaaattcaaaatcgcattaaaagggaatttggtgcaataccaaagctgttcccgcaactgtaagctatcaagcttgttgttatctgcaacaccactgtttgtgaattagaaattaggaattaggaattaggatttaaatccttaatctataaattcttaatcctaaatcagaatgggaaggtcaacaacaagacgcaagccaggagacctgcctaattcattgagtaacaaactttcgggaaaaaaggtttgggtatgggtaaattctatgcttttctcccaacattagtaattcagtaaaattaaaaatgatttttaagcgtttctgagttttcagtcttgcagtaaatgatggtttgattttattgagagtgtttaatttaaaatgaaaaaaaacagtacaatcagtgcattcttcgcactggtcgcaacttgtgcttgggcgcaagaacaggattccgtaaaggtgaatcctttgaaagaagtggtcatctctgataccaaatttgcgcaacgcaaagaaaaatcgggaaaaatcattgaggtcatttcggctaaagatttagcgcaaaaaaccggtcaaagtttggctactgtcttgtcgcaggttaccggcgtggaaatcaacggcaaccaatcggccaacggtaaaaacctcggctactacattcgcggtggtaaaaaccgacaagtattaattctaatcgacggtattccggttaccgacgcttccggcattagtttagaatacgatttgcgtttgcttccggtagaacaggtggaaagcatcgaagtgatgaaaggcgctgccagtaccttatacggaacaggcgccgcaacgggtgtaatcaacattaccttgaaaaaaggctcgaaaaaagaaatcgaagggaacgcttatctgaacataggcaccaacaatacttcgaccgataaaaaatacaacggtcaggattttaaccaaggcatttcggtaaacggcaactacaagaaagtgaattattttgcaggaatcaatagtacggaaaccgcaaacatgtcgcaaatagcgccgcctaatgaagcggttacctatgaagatgatcgcttttcccgtcagaatgccatcgctaaatttggcttcaaagctacagagagactaagcttaaatttctttggcaattacgaccgattgaagaatggctacgatttgacttttgacaataccggttttaacgatacggccatcaacacgacgacttcggagcaagtgcgttttggtttttcgcctaaataccaatacaaaaaaggcgagtttattctaaattcaggtttcaacaaaattgtacgcgattacacagagttcaatagtttttcgggtactacggattattcggtttacgaatctagaaatgtggtccttgacggagtgaacaagtacaatatcaacaaagattttgcggtgattttgggtgtgaattaccaattcaatgatatgctgagcgaaacgccttttgggaatatcgagaatcaatcgactaaattcaatatcattgacggttattccactttggtttatcattttgatttcggtttaaacctcaatgccggtggccgattgaacaaccacagtgcttacggcaataattttgtgtataattttaatccgtcttacaatttcaaaacggcttttccattgaaattagtggcttcttacagcactgcttatattacgccaagtttgtaccaattgtactctgaatacggaaatgctaacgtaactccggagaaaaatgctactgctgaggtaggttttgaaacacaattgttatccggcaaattaaaatgggaagcagtagctttttaccgtgatcaaaccaattccatcgacttcttttacaatcctgcaacatttgaatcgtactatgtaaatattaacggaaccaacaaagccaaaggcgttgagacggaaatgacttatgaattgaccgcgaaaatctcgctgaatgcgaattacacttttactcaagtggataaggctttagaccgattgattccgaaacacaaagccaatgcaagtttgaattatcagcccaacagcagaactttgttcaatgtaaactaccaatattttgacgcccgaaaagatgtgttttttgatggcaatacttttggcgtaaccggtgtggtattagactcgtatcagttggtgaattgtttagccaaatacgaattggtgaaagggcgaatgagtgtttttgccacagcaaccaatatttttaacgagacttttgtggaaaacattggctatacaacccgtggtcgaaactttaaattaggtttgaactttgttttgtaatacagtaaaaggtcaaacattttgtttaaaaaaaaaggctaactttcgggttagccttttttgttttatttattgacgctcaatgtacatttcagttcttaatggcgatagggatttgacatcagcaaaatcacgttgcaagttacttggtcttggcggagttggtcggccgctgccaataatttggttgatggcagcattgagcaaaggttcgctagggttacccaaaatgcccaaatcatccatactttccggtaaaggcgtagtaggagcaattcctgaagtataatcgccgaaaccatttttatcgactatttttaacactataggttgtatggcatatttgtgacgcggatttacattttgtttggcaaaggttggcgaatcatacaaagtaatcgaacccacatttttcccagtagtggtggtgccgatttgcactaccgtaatataaggtttcaagcaattgattaccaattcactagccgaagccgtggcgttcgtagttagcacatacactttgtttaggttcaaactgtttaggttgcctaaaaatcgattctctaaacttgaagggctgttactttcataatagctttgggctttggcattccattgttgtttggcaaaaagttgtccggtaaattgtccggtaatcatactggctaatttcgtggctgtactgatagaaccacccgaattgtaacgcaaatccaaaaccaaatcggttacattttgcgtttggaatctgccaaaaacggtattcaattgattgtcataagtcgaataaaaaccgttgtacattaaatagccaatcttgtgagaaccgttcgtaataacggtgtttaataaaatcggattttctgctaaagcggttttggtaagcgaaaccgtttggccgtttggcgtaatattaccaccatcgtaatcggctaagttgatggtgtaagtgtcgttagctaataaagagcggtaattgtcaactgtgagcggtgttccgttgatggcataaaaaatcgtaccgcgttgtatcggtttggtagcagcatcagaatttggaataatgtaacgaacccaaccataaatatcggtattactaccggttttatagcgcagggcgaaatccattccgttgttcagtgtatttccggaaagtacgccttctaacaccgaataatcactgtaaataacactgaatcggtcgatagaagtatctattctcaaagcattgaacaaagttgtaggttcgtcaaaaccttccaaaaaagtattcaattgacgctgattggcaaaacgattatccgccaaatccggtacatccgcttgccacaaataatataaattcatccctttccaaacaaaatctttgatctctaaacttgccggaacaggattgtcatcattgtctgtgcaactgaaagtaaaggtcagtaaacacaaatacaatgcggttttaaataagtttttcatagcagttctttatttaataaacgtaaatttaataagtttagattaattatttgtattttgtttgtaacaaaaaaaatcatggttcgtcttgcttgtataaccgttaaccaaatgttgttttaatgaaccaaaaagagtttatgcaattggtaaatccttttaaggataaggtctttcgaatggcgaagcgattgctggtcagtacggaagaagccgaagatgcaactcaggaagttttggtgaagctttggcataaaaacgacaatttagacgagtataaaagtatagaagcggtggccatgacaatgacgaagaactattgtttggatcagttaaagtcgaaacgcgccgggaatatgcgtatcgtgcacaacaattttacggatagagaagccggtttgcaaaaacaagtagaagataaggatacttggcaatgggtagaacgaattatgaacgacttaccggaacaacaaaagttaattgtgcaaatgcgcgatattgaagaaatggaatttgagacaatcagcgctattttgggaatgaatgagtcggcaatcagaactgccttgtccagagcccgaaaaaccatcagagaaacaatgacaaaaacccatcattatggcattggataacatagaaaaattaatagagaaatacttcgatgcagaaaccactttggcagaggaaaaagaattaaaggcctatttttcctccgataatgttgctccgcctctagagcaattcaagcctatgtttggttacacggcacaagcaaaacacgaacagttcacaggaaccattcctttaaaagctaaaaaaacggatactgtactttggctctctgtggcagcatctgtggttgttttacttggcgtaggttttttcactttcaatcattataaccaaccggtatcagaagatttcggtacttatgatgatccggaagtagctttcagagaaacgcaaaaagcgctgcaaatgatctcgcaaagtgtaaacgaaggtatcgaaagtatggactatttaagtgaatacgaaaaatcaaaaaacatcatttttaaataaaaaaatcaagaaatcatgaaaaaaatatttttaagtctgttaattctagtagtaaccaatgttgcttttggtcaaagtgtctttgataaatttgaagaccaagagaaaatcagaacggttatcgtaaacaaaaaaatgttttcgcttttaagtaaaatgaaagtcgaagacaaagaaacccagcaatacgtgaatttgatcaaaaagctggagaatcttaaagtttttgcgactcaaagcgatagcaaagccgaggaaatgaaagctactgcggagaaatacttgaaaactgccggaatggaagagttaatgcgcattaccgataagggaaagagcgtgaagatttatgttaaatcaggtgctaccgattctcaaatcaaagagttgttgatgtttgttgacggcagcggcactgaagaaaccgtattgatgtcgttaacagggaacttcgatttggacgagctttcagtgcttaccgagaaaatgaaattacccggaggagaagatttaaagaaagcttctaaaggcagtaaaggtccgaaaggcggcaaatagtatagttatgaaaattaccatttttacggctgtattattttctttactcttgctaagttgcagtaacgagccgagtattcaaaagtattttgtagaaaattcaggaaagaaagattttatagcgttggatatttctccaagtattatcaatatagataaatccaagttgactccggaacagcaaacggctttgaattcttttgagaagatgaacgttttgatttttaaatcgaatgaaaaaaacgaaacgcaataccaatcagaaacccaaaaagtaggcgacattcttaaagatgagacttaccaagaattgatgaaaatcggttccggaaaagacggtgcttctgtaagttttgtgggtgatgaaaacgacatcgacgagtttattttttttgccaaaaaccaggacaacggatttgcagtagtcagaattttgggcaacgatatgaatccaaataacattatgaacatgattggtattttacaaattgccaacgttgatatggagcaattaaaaccacttcaaggtttgttaaaataaatttccctcaaaaaaaatcccgacactgtcgggattttttttaattctttaaatattttaaaggaacaatcagcattccgaagcattcgccatcttctttgccgatgtgtttatggtgcattttatgtgctcttctaacggctttggcgtaacgattgtttgcatttctgaacaacttaaagcgttggtggataaaaatatcgtgtaccataaaatatgccaatccgtaagcaaaaatgcctaatccaattgccaatccaatctccaaaatattgttttgccacaataaaaagaatccaacgctgactaccgcataaaaaataaaaaaggcgtcattgcgttcaaaccatgaatcgtggtcttttttgtggtgatcggcatgaaggttccataaaaagccgtgcataatgtacttatgactaaaccaagccataaactccattccgcaaaaagtaattaaaaaaacaactatatgtagtaacatgattttagattaaatttaaacgataattcacataactctttgctaacaaaccaattttctcgtaatccggcactctaattcgggtgtttttgatttccatagaaggtgtcttttttaatttagacaacaactttttatagtacacaaaagccgtgtaaactccgaatttggcttccaaaggcagttttaaaacaccttcaaaacctacttgaaaatcagcttcaatttctttgataatttcgtttttcgattgttcatccaaacgagataaatcggtattcgggaaataagttctgctcaagtcttcgaaatcagctttcaagtcacgcaagaaattcactttctgaaacgccgatcccaatcgcatggctgaatgttctaattcggcatattttttatcatcgccgtttacaaatactttcaaacacattaaacctacaacgtccgcagaaccgtaaatgtattcatggtattcatcataggtttggtattcttttttgtgcaaatccatcttcatgcttttcatgaaggccgcaatcaaactgttcggaatttgatatttgtttaccgtgtgctgaaaagaatttaaaatcggattcaagctgattttatgttctaaagcttcggctaaatctttttcaaatcgctcaaacaattgttctttgttgtaatcgtgaaaagtatccacaatttcatccgcaaagcgcacaaacccatagatgttgtatatgtcttgacgaatgcttggtgctaacatttttacggcagcagaaaatgaagtactgtaggacttcgttacatttttgctgcaatcaaatgatacggtgtcaaagattgatttcatagcatggtattttttagtttttttctataagttcagctactaattttccggaaattaacgacggtggtacgccgggccccggaacagttaattgaccggtaaaaaataggtttttaacttttttacttttcaatttaggtcttaaaaaagcggtttgcaatagggtattggctaagccgtatgcattccctttgtacgaattataatctttgatgaagtcgttgacacaaaaagattctctaaagataacattttcttttacagtttgttgtgttaatctttcaaagcgagaaataatcttttcaaaatacaaatttctcaactcggcagtatctttcaatcccggagctaacgggattaagaaaataccggcttctttgtcttcaggcgctgcattatcgtctgtttttgagggaaaactagcataaaaaagcggttctttaggccactgtggataatcgtaaatggcttctgcgtgtttgtcgaaatctacatcaaaaaacaacgaatggtgttctacgttctcaatttttttgtcaaaacctacataaaacagtagggaagaaggtgcaaacgttctcttgtcccaatatttttcagaataagctctgtaaggtgcatctagtaaactttcgctgtgatggtaatcggcaccgcttaaaataacatcgcctttaactatttctccgtttacaaccaaagcctcagcaattccattttgcaccattattttttcgacattggcattcaagtggaatgttactcctaattctttggctaaacttcccatagctaggataacactgtacatcccgtttttaggatgccaagtacccaaaccaaaatcggcaaagttcataaagctgtaaaaagaaggtgtgtcagaaggtttagcacctaagaacaaaaccggaaattcaaggatttggatgagtttggtgtttttgaaacggcgacgaatatctttggaaatattcccaaaaaactgattgacttttttggctgtttccaatgttaccaattctaatggtgaaacgccggggcgatagaccaaatctttgatagcgatatcataattgctttgggcttctttcatgaattccgccaatttggcaccactccctttttcaatggattcgaaaacggtgatgatatcaggaagattgtcggctatggtcacaaagtccttcacaccgaaatacacttgataagccggattcagtttgattagttcgtaataatctgaaggttttttaccaaaatcggcaaaaaaacgttcaaatacatccggcatccaataccatgttggtccgatgtcgaacgtaaagccttcttttttgagctgacgagccctgcctccgatagtgctgtttttttcgtaaaccgttacttcattaccttgttgtgccaaataacaagcggcggctagtgacgaaaaaccggatccgattattttaattttctttctcatgttgtttaacaaaaatagaaaaaagttaaacaataaaaaaatatttgtctagataaattctactaattctttaatggagttgaaggtagtgattttttctgatatcaacttagaatctacatgttcaatcatccgaccgataagccaaagtctcgaagaatccaccatgatttcggtttgcagttccttcacataggcattgatttctgattttgttggttctacagtcgtgtaacaaatgtaaacaatgttgtcaaagtgtttttttagatcttttaagctttctgttggaacactttctcctaaatatatcgttttgtaaccgtggctcagtatttcataattcaaatacatcaagcctagttcgtgtacttcattgtctggaagatacaacacaaatactttgtcatctcttgcgggttcttgggattgaactacttcagtattggttagaactttttgtttgattaagtatgtgatgaaatgttcatgtgcaggactaatggtattggtttgccacaatagtccaagctcttgaatcagcggaatgaaaacctcgtaaaaaacgtcacggaatgatttttctgaaagtaatttgttgtaagtgttgaaaaataacgcttggtcaaaattcatcatggccaatttaaacgaactgatggcgtgatgtttggcacttttctcagaaatgatttcattcactaattgtggaattcgatcttccgttagttttgaaattttcgaaattttatagccgtgattgtgaagcagtgtaatgtttaatagcttttgaagattctccaaatcatacattcggatattggtttctgttctcataggttcgagcacattgtaccttttctcccaaattctgattgtatgtgccttaataccgtacaggttttccaagtctttgatactaaaaacactttttatattgttcatcttttattaaaattagttaaacaaaattagtaaaattaatttaccacaactgtttttatgctaaaactttcaaaaaaagagtaatagattgaaaaatcacttacaaaatacttttgattgaggtgtatttataagtaaagaatggggagaattgtgcaaaaaaaaacacccctaaaagagtgttttctaattttaaagtgtgaccacgatcagattcgaactgacacgtcttgcgacaccaccccctcaagatggcgagtctaccaatttctccacgtggccgtaaaaaaaaaagtcatccgcttggcgaacaactttttgtgacccgactggggctcgaacccaggaccccaacattaaaagtgttgtgctctaccaactgagctatcgagtctaaaagcatgacaagaaaaattgtgacccgactggggctcgaacccaggaccccaacattaaaagtgttgtgctctaccaactgagctatcgagtcaatttcatttcttgaatgcgggtgcaaatataaggccttattatttatatttcaaagcaaatttgctataaatttgccttttttcaaggatggtctgtaagggcttaatttataaggttttattgcgatggtaaaaattgttttagtgggatatatggcagtagggaagtcgactattggtaaaatattggctgaaaaattgaaaattgccttcattgatttggatgaaaccatcgaaaaaaatgaaaatctatccattagtgaagtttttgcaatacatggcgaaatctatttcagaaaaaaagagcatctcgagttaaagaaatggttggaaaatcctaactcattggtcatcgccaccggaggcggtacgccatgttatgcgaacaatcatttgatgttaaatggagaaggtattacctctatttatttaaaggcttctattgccgaattgtataagcgattgttgtcagagcgtaataaacgaccattagtttccgataaatcagaagatgagttgaaagagtttatcgctaagcaccttttcgatcgcagttatttttaccatcaggccacccataatatgttggttgatggaaaaacgtcacagacagtagcccaagaaatactgcaacttttagactaaataagcgtgatcattttggggttcaaaaaccacttgcacatgttcttttaaggatgtggaaagggaaagtcctttaaaatcagcttttacaggatattttttgtggttgcggtcaataagaacaaccgttttgaattttttcacaggaacctccaaaaagtgctttacaccgtaaattaaagtcgttcccgaattcaatacatcatcaaccaatacaatgcatttgttttgatatacttccggtgctacagaagtagtaatgggattggaaggatggattttgtttatcttgacttcacacaaaataatattactttcagtgatttcatttaaaatttgtccgattttttgagctaaaatgaaaccgttactggtaataccggcaattacaacttcctgttcatcggcaaaggtttcgtatatttggtaagcaattctctttattttatgctcaatttcctggtggttaagaataatgtttttagtcatgttgtgtgtagtagtttgtgttagtacttagttatgcttccggttcaaaatcgaattcaaaatcttctaaatctcttcggtcttttttggttggccgtccaacaccggatttgcgataatgttcttttgatagctttaacatctccaaatgggcaaatgcttcagccggtgtttcatcttttcggtaaatatcgaccaacttggctccaacacgattcaaaggaatatctaatactgtaatgctgtaggtgatttggtcttttcgaaacgtgattttgtccatcggaaaaacttctctggaaggtttggctacctgaccgttgaccgtaatttgattctttctgcaggcttctgttaccatgtttctggttttataatacctaacacaccaaagatatttatccactctcattttttttccaaaatcaacgttaaatagttcacaaaaataaatcaatattgtatcttgcggccttaaaaatagtataaaatgaataatttttatagaattgctttactttttattacggcaatttttattgtgtcttgtactccaagtgatcgcaaccctacagtaccaaaacgagattatgctgagcagtatgcaacagatttagctaatgttgaagagtttttgcaaactcattacatggaggtaatcaataaccccggtaatacagacgatcaagacgtctctttttatgaaatacctgaaggcggtactcaaacttcagtttggaaccaaacacaatatcctttacaagctcattatgtagcacaagatgatatcacctacaagatatattatatttcattgcgtcagggatcgggatcaacgagcagttctccttgtaatgtagacagaatattgacttcttataagggaagttacctttatactaaaactgaaacagtaaacgaggaagaagttgaaacgctaacgtttaaacagtttgaagaatcaatcaatccggaagcatatcttactttatcttcattaattaaaggctggcaagagatattccctaagtttaaaacaggtagttacaatgctaatcccgacggaactgtgtcttataatgattttggtgccggtataatgtttataccttcagggttgggttattacaacaactcttcaggcaccataccatcctattctcctttaattttcagttttaaattgtatgaaattcaaagagtagacaacgataatgatggcattccttcttatttagaagacatcagttcatctattgtaaatgccgatggttctgttactattatcaatggtgttccggatggttatgtgagagttttagaagaaggtgtagacaatcccgacgatacggatgctgacggcgtgccggatttcttagatattgatgatgatggcgatttctttactacggccagcgaaatcaataatccacttacagacgacccttatccttttgctgatattccgctttgcagcgatggcaagaaaagacatttatccagtctttgtaatcacaatcaataaaaaaagccgctaatttttagcggcttttttttataatgatgagaattattttctttttatcactcgttctgcagcttctactatagcttggtgattcaatttgtatttttccatcaattgctccggtgtaccactttcgccaaagctgtcattaacggcaacaaattcttgaggagtaggtgtgttcaaagccaatactctggcaacactttcacccaatccacccaaaatattgtgctcttcagcggtaactacgcaaccggttttggcaactgatttcaaaatggcttcgtcatctaaaggtttaatagtatgtatgttgatgacttcagcagaaattccttttgcttctaacgcttcagcagcaattaaagcttcccaaaccaaatgtcctgtagcaataatagttacatcagtaccttcattgagcatgatagcctttccaatgataaatggttcatcagccagtgtgaaattaggaacaaccggacgaccaaagcgcaaataagccggaccatgatgctccgctaaagcaatagtagctgctttagtctgattgaaatcacaagtattgattaccgtcattccaggtaacattttcatcaatccgatgtcttctaaaatttgatgcgtagcaccatcttctcctaaggttaatccggcgtgtgaggcacaaatcttcacgtttttatcagagtaagccaccgattggcgaatttgatcgtaaactcttcccgtagagaaattggcaaaagtcccggtaaacggaattttaccaccaatggttaatccggctgctataccaatcatattagcctcggcaattccaatttggaaaaaacgctccggatggttctttttgaaatcgtcaaatttcaatgagccaatcaaatcggcacaaagcgccaccacattttcatttttttgtcccaattcggtcattcctgctccaaatccggaacgggtatctttacttcctgtatttgtatattttttcataattttagtagtcgcctaaggtttcattattttgtgccaatccattagccaattgctcatcattcggagcttttccgtgccaagcgtgtgtatgcatcataaaatcaacaccattccccataacggtgtgcatcaatacacaaaccggtttcccttttccggttctgcttttcgcttcggctaaaccggctttgatggcttcgatattgttaccttctgtaatttccaaaacatcccaatcaaaagcttcaaacttggcttttaaattccccaaactcaagacatcatccgtagagccgtcaatttgttggccgttgtaatcaatcgtagcgattaaattgtccacttttttagcagaagcatacatgatggcttcccaattttgaccttcctgtagttcaccgtcaccgtgtagtgagtaaaccaaatgttggtctccgttcaattttttggcttgtgcagcaccaatcgctacggataaaccttgtcccaaagaacccgaagccatgcgaatgcccggtaagccttcgtgggtagtaggatggccttgcaaacgagagtttagtttgcggaatgtagccaattccgataccggaaaataaccgctacgggctaaaacactgtaaaaaacaggcgaaatatggccgttagaaaggaaaaataaatcttcaccgataccgttcatatcaaatccagctttgcgttgcatttggtgttggtacaaaacggtgaaaaattcagcgcaacccaaagatcctccgggatgtcccgaatttacggcatgaaccatacgaagaatgtctcttctgacttgggttgtaaaatcttgtaaatgttgtgtgtttgacattataaatggttgtataattatgcctcaaaagtacttctaattttataggaaggcaaatgattttacaacaagttattaaggtcttatcaataataaagatgcttgcaaaatttcaggaaacaatcactgttaaataaaatcctaaatcctgaatcctgaaactgaaatcttttatctttgccgactgtaaaagcgttttatgaaatttgatttattagccaaagatcccaattcaagtgcccgtgccggaagtattactactgatcacggtgtaattgaaaccccaatatttatgcctgttggtactgtggcgtctgtgaaaggcgtacaccaacgcgaattgaaagaagaaatcaatcccgatatcattctgggaaatacttaccacttgtaccttcgtccgcaaaccgatattttggaaaaagccggcggattgcataagtttatgaattgggaccgaaatattttaactgacagcggtggctaccaagtgtactcactctcagctaaccgtaaaattaaggaagaaggtgtaaaatttaaatcacatatcgacggttcttaccatgtatttacccccgaaaatgtgatggaaattcaacgcaccattggtgccgatatcatcatggctttcgacgagtgtacgccttatccttgcgattatcgctatgcccaacgatcgatgcacatgacgcaccgttggttagatcgttgtattaagcatttggaaaaagtgcctaccaagtacggttatgaccaaacttttttccctatagttcaaggtagtacttataaagatttgcgccaacaatctgccgaatacattgccaatgccggtgcgcaagggaatgctatcggtggcttatcagtaggagaaccggctgaagaaatgtacgccatgaccgaagtcgtaacagccattttaccacaagataaaccaaggtatttgatgggtgtcggaacgccgattaacatcttggaaaatatcgctttaggtattgatatgttcgattgcgtgatgccaacccgtaatgccagaaatggtatgttgtttacggccaacggtaccatcaacatcaaaaataaaaaatgggaagccgatttttcttccattgatgaaatgggtcacacctttgttgataccgaatataccaaagcatatttgcgacacttgtttgccgccaatgagtttttaggcaaacaaattgctaccattcacaacctcggattttacatgtggttggttcgtgaagctagaaaacatatcttagcaggtgatttcagaacttggaaagatatgatggtgaagcaaatgagccagcgactctagaagcggttgcaccgcttagactaggcttcgcctttcagatatatagaaagactaagtcagtctaagaagtctaacagtctaataatctaataatcaatgcttaaaataattgataaatacatcttaaaacgatacttggtaactttttctgtaatgttactgatgtttatccctattggtattgtgatagatgtttcggagaaagtgaatcgaatgattgaaaacaaagtgcctttcaaagaaattgtactttattatctcgactttaccatctattttgccaatttgttattcccgatttttttgtttttgtcggtgatttggtttacctctaagctagccaataataccgaaattattgccattctgagttccggaatttccttcagtcgttttatgcgaccatatattattggggctactattatttctgtttttgctttaatcatgagcgtttttttggtgccgagtgccagtgccggtttcaaaagtttccggtacaaataccttatcggaaatggtcaaaatgaagtcagagacaattccgatgtgtttcgacaaatcagtaaagatgaatatatttttgtgagtaattttcaagaagtcaatcaaacggcttacaatttttccatggagaagtttgaaggcgatcaactaaaatacaaactcattgccaaccgaatcaaatggaacccgaaagaaaaaaattatacgttgttcaatttcaccaaacggaaagtaggggcaatgggtgatatcattgaaactgccgaacgtaaagacaccgtttttaattttgatttggaagatttaacaccggtggtttacatagccgaaacactaccactgaacgaattgcacaagtttatcgataaagaaaaagcacgtggttcatctaatatcaatacttatttagtggtattgtacaaaaaatatagcataccggtttcggccttcattttaacgattattgccgtagcggtttcagccatgaagcgtcgtggcggaatgggagccaacttagctataggtatcgttttggcttttgcgttcgtgtttttagataaagtattcggtgttttagccgaaaaatctaccgcgccacctctgttagccgtttggacacccaatattgtcttcggtattttagcactttacctcttgcggaatgccaagcgataacttaaaaagctatttgcaccttcatttgattgttttcatctggggatttaccgctattttaggcgctttgattactttggatgctttgccgttggtttggttcagaatgctctttgctgttgggtttattgcgatttacctctactatagaaagttgcctttacgtgttcctttcaaaattttaatgcagtttttgttttccggactgatcattgctttgcattggtttactttttttcatgcgataaaaatttcaaatgtttccatcactttggcctgtttgtcaaccggcgccttatttgctgctatcttagaaccaattttgtacgggaagaaaatagtctcttatgagttgtttttcggtttgttggttgtagttggattgtatatcattttcaatgtagaagggaactatttcttgggtattttaatggctttgtcttccgcctttttatcggctttgttcgctgttatcaatagccgattggttcaatcttacgacgcaaccgtaatctcattttacgaactcagcggtggcgtagttttcttttcttttattttattgttcttcggaagtttttcggtatctttctttgagttgtctatgaaagacctactgtatttattgattttgagttccgtttgtactgcctatgctttcatcgcctccacttcggttatgaagtttttgagtccctataccgtaatgcttaccattaatttggaaccgatttacggtatcattttagccgttttgatctttgaggagaaagaaaaaatgagcttcggcttttatatcggtgcttttattatcctactgacagtccttttaaatgctgtgattaaaagccgaaaaaagactgcttcctgaaaagacatcgacttttgattgtttaaaactaatccgtcggaattgctttttatcacaatttaaaattttatatttgctactcgtttaaacaaaactaacaacctatggaatatttagattttgaactccctatcaaggaattagaagatcaactagataaatgccagttaatcggtcaagaatctgatgtagacgtgaccaacacttgcaaacaaatagagaaaaaattagaagaaactaaaagaaaaatctataaaaatttaacagcttggcaacgcgttcagttgtctcgtcaccctaacagaccttacactttagaacacattaccaacttaaccaatggtactttcttagaattgtttggcgacagaaatttcaaggatgacaaagccatggtgggcggtttgggtaaaatcgacggtcaatcgttcatgttaatcggacaacaaaaaggaatcaataccaaaatgcgtcagttacgcaactttggtatggccagtcctgaaggttaccgaaaagcacttcgcttgatgaaaatggctgagaaattcaacattcctgtagtaaccctaatcgatactcctggtgcttttcccggattagaagctgaagagcgcggacaaggagaagccatcgcccgtaatattttggaaatgattcgtttaaaagtgcctattatttgtgtgattattggtgaaggtgcttccggtggtgctttgggcattggtgttggagacagagtattaatgatggaaaacacttggtattccgtgatttctcctgaatcttgttcgtctatcttatggaaaagctgggaatacaaagagcaagctgccgaagctttgaaacttacttctaccgatatgaaaaaaatgaaattggttgatgatgttattccggaaccacttggtggcgcacattacgataaagaaactacttttaaaacagtagaacaatatatcatgaaggcctttaacgaattaaaagacttatcaacagccgaattagtgtcgcaaaggatggataaatacagtaaaatgggcgaattcaaggaataaattctcacaaaatttaactcaaatccgaagccctatggtttcggattttttttgggttatcaacaaaaaaagcaaacttattaacatcgtttttgaataactcaatctcgttaatttgaccaaattggttactttcgtttcatggaaaatctcagaaatattaacccgattaaagtagataaaactaccatcatcaatttagaaaaaggcaaactcccgccacaagctctcgatttggaagaagcggttttgggtgctatgatgatcgataaaaaaggggtagatgaggtcatcgatatcttgcaacccgacgctttttacaaagacgctcacaaacacattttcgaggcgatttttcagttattcaccgattcgcaacccatcgacttgttaacagtttctgcccagctcaaaaagaacggcaaattggaattggcgggtggcgatttctatctcattcaactcactcaaaaaatctcctcgtcggcgcacatcgagttccattcgagaattattttacagaaatacatccaaagaagtttgattaaaatttcttcggaaattatcgaagaatcttacgacgaatcaaccgacgtattcgatttgctcgacaaagccgagtccaaactatacgaagtaacgcaaggcaacatcaaacgaagctcggaaactgcgcaaagtttggttatccaagccaagaaaagaatcgaagagattgccaataaagaaggattgagcggtattgccaccggttttgaaaaactggataaagtgacttcaggttggcaaccgtcggatttaattattatcgccgcacgtccgggtatgggtaaaacagctttcgtattgtcgatggctcgtaacatggcaattgactatggcgcaccggtagcgctattttcgttggagatgtcttccgtacagttaattacccgtttgatatcctcagaaaccggtttgtcttcagaaaaattgcgtaccggaaaattggaaaaacacgagtgggaacagttgtccaccaaagtaaaagacttagaaaaagcacctttatacatcgatgatacgccttcgctttccatcttcgatttaagagcgaaagcccgtcgtttgtcttcgcaacacggtatcaaaatgattatcgttgattaccttcagttgatgacagccggtggtaacggtaaaggtggcggaaaccgtgaacaagaaatttctaccatctcccgaaacttaaaagctttagccaaagagttggaagtgccggtgattgccttatctcagctttcccgtgccgtagaaacgcgtggttccagcaaaagacctttgttgtcggatttgcgtgaatcgggtgcgattgagcaagatgccgatatcgtttcttttatctatcgtccggaatattacaaaattgacgaatgggacgacgaagaacaatcgccaaccgccggacaagccgaatttattatcgctaaacaccgtaacggttctttggaaaacatccgtttgaaattcatcggtaatttgggtaaatttgacaaccttgaagaatacggcagtagttttgacgatttaccgtcgcgtatgaacagcgatgataatccgttttttactaaaaacctaccatctgccaatgaagcttttggtagtaatatcaataccaatgacgacgacagcgacgtaccgttttaaaataacaatcccgattcagtcgggatttttttatgattattttcacagtaattctgttatctttgggtaaaatattgctgcgaatgtttaaaaagtcactgtacattttcttcctattgctttccttttccgctaaggctaattttttattattgccgatggatgaagtggcgcagaaaaaccaccttaaagcttacggtattacctattgggcacttgacaaacaatataaagcgagttggttgctcaactatcgcggcggttcttttttgttgcccgatgtacctgaaattcgcaaagagtgtcagattcgaggcgtgagtttcgaagtggtttccgatgccgaaatgcagtccattttagatgatatttccagtccgtcacaaaatatggaaaccgtggtgttagagaaagcgcctaagatagccgtttattcacctccgggcaaacaaccttgggacgatgcggttacgatggtgctgacttatgcggaaattccgtttaaagtgatttatgatgaagaagtattgagtgaccaacttattctatacgattggttgcatttgcaccacgaggattttaccggtcagtatggtaagttttatggagcctaccgcaatgcaccttggtatattgagcaaaaaaaagaggcggaagctttagctgctaaattaggctatggtaaagtatcgcaagagaaattaggagtagccaaaaaaatacgcgactttgtgattggtggcggttttatgttcgccatgtgttcggcgacggatagttttgatattgcactttcggcggaaggtgtggacatttgcgaaccgatgtttgacggcgataacagtgatgccaactaccaatcgcaaattgattacaacaagactttcgcgtttaagaattttatcctcgacagaaaaccggagcattacgagttttcggatatagatatgacggagaaacgccgcattccgtttgaaaaagactatttcactttgatggaattctccgctaaatgggatgtgattccgagtatgttgtgccaaaaccacacgcagttggtgaaaggttttatgggacaaactacggctttcgacagcgagttaatcaaatcgaatgttttaattttgggcaaaaacgaactcaacgatgaagcccgttacatccacggccaaaaaggaaaaggcttctttacgttttacggtggacacgatcctgaggattatcagcatagagtaggcgatgagccaacggtgttagacttgcatccaacgtctcccggttttcggttgatattaaataatgtgttgttcccggcagccagaaagaaaccacagaaaacctaacggtatacgttttaaaggagaaatcccaaattccaattcacttcgacaagctcagtgtgacaattgaaatttggaatttttttagccccgattggagcggcatactttttcgttttagctttattcacttgttagtgaattcggaccgacgaaaaagatatagcggaaagcgggattagctcctatttattattctcaatcacgtagttcaatactttttgaatcaaatgcactcggtctttaccggttacgttgtgtttgtgcattgggtaagggaaataatcgacttgcttcccggcttccacaaactttttgactaacgataaattgtgttgttctactactacatcatcgtttgtgccgtggattaaaagcaattttcctttaaggttttttacgtaattgtacacggtgttttcttcaaatcctttggcattttctgcaggtgtatccatatagcgttcgccatacattacttcgtaccatttccagtcgattaccggtccgccggctacaccaactttaaacgtatcaggtttgcgcagcattaatgaagtggtcatgaaaccaccgtaactccaaccgtgaaccgccaagcgattgccatcaacataaggcaacgattttaagtattccacaccttttaattggtcatccatttcgttgttacctaaattggcgtgaataatactttcgaaagcaaaaccgcgattgtccgaacctctgttatccaacgtgaataccaaatagccttgttcggccatccaatacatccataaattcgccccgtcaaggaaagaattggtaatcatttgcgcatgcggaccgccgtaaacatacactaaaaccgggtattttttcgttggatcgaaattacttggtttgattaaacgcgtgtataaattggtggtaccgtcggctgacttgatggttttgatttcggctgttccgatttcgtaaccgttgtatttattcggactcaccaaaagggttttggcttttaggtttttatcatacaacaacgattttgatggtgtgtcgtggttggagaattcgtcaaagaaccaatttccgtcggcacttggcactacattgtgaacaccttggtctttggtgattaaagtttgtttgccttttaagtcgactttatacaccaacatattggttgggtttggtccggtagctttgaaataaatttcggttccggctgtattggttccgatgatatcacgagctacaaactggttattggtcaactgcttgatgagtttaccttctaaagtgaagtagtataagttttggaaaccgtctttttcgctaaaccaaacaaagttattcgatttggcattcgggaaaaatgcttcgtgttccggctctacccaacgtggatttttttcgtttaaaatggttttaataaatgtaccggttgcagcatcatacaagtttaggctcatgtcgttttgaccgcgattcaactcagcaatcaaaacaaatttctcgtccggtgtccaagataagttggttaaatagtcgtcttgacttccttttggagcaatgaaaactgttttgccggtggcaacattgtaaatgccaactcgcggtttttcgcttttttgcccaatcatcgggtatttgatgttgaccaatttgcccggtgtttcggtgatgtctaacaaaggataatcggctacttcagtttcgtctttttgatagaaagccaaatacgaagctttaggtgaccaaaaaataccgccgctgatgccgaattcgttacgcgcaatcgattgtccggatacgatacctttattggtttcgttggtaaccgttactttttcgcctttgctgttgatgaagtataagttgttcgcttctgtgaaagccaagttagctttgttgctgtcgaaagttgcattttcagccgtttccggagcttgtattgtttgttttccggttttggtggacagattgtattggaaatatttgccgttttcagtcaccataaaagtgttggcgtctatccattgcaacccaaagaagtttcgcaatttggtacctaaggctgtgttgatgtcggttaaagaaaccaattcgactgcaacatcattggtggtggaagccgattttattttggtccaagcatccgtgtaaaacacatatttattggtattgggaatccattgaaaaccggttaaaccatcggctctaaaggcgcgaccttgttgtagtacggcttcttctaatgttatttttttcttttgcgcttgcatagataatgccataaacaagctgaggaaaaggataatctttcggttcatgaagtaaagtttttgttgaccgtaaatgtataaaaaaaggacaatctttacttagaattatccttggtttatgatgtcattaacgattttcaaatgatgtcgggtatgcagtttcaggaaccaaacggctgctttcaaatttaagtcgccaaaatacggatgcctaaaatagctgtttttgtgaagtttttctagcaaggccatattgtttttcgctgttgccaatttgttttgtaaatcttccattgataggatgtcaaccggacttacttgttttggcgctttggctttgcctctgggaatcgcgttacgacattggatataagtgcggttcagattaaaccgccatttataattaacgggattggatttgcttaattgtaaaacaataccattaataaccaataaactatggtccaattgccaacctacagttgcttgagaaatggtcgtattttgtttttccaaatgcggtattgcattttcaatttggagtaataaatcgtttagatttttcatagtaatggtattaaaaaatcccaaacctgattcgatttgggattttattactgaaccttttataattggccgccctcgttttctttatccaagtattcctgaacaatttcgatggcattggttactacatcacttaaagcggtgatgaaagtaccttcttgagcgctgttgatggcgtgtttgatggcttccacttctttggtgatgatttcgtgggtaacgtttctaccagaagcattgatgccgtccatgatgagaccgatgatttcatcttcggttctgcctcgcaagtgtttttcctggcggatgatgatatggtcgaacatacgggcggcgatagtagcacattcgcggatgtcttcatcacgacggtcgccaacaccggcaataattccgatttttttactggcttctactgtggctaagtattcttccacaccgcgataaccggccggattatgtgcaaaatcgatcaaaactttgaattttttgaagtcgaatatgttcatacgacccggtgtttgagcagcgcttgggataaatgtttgtaacgataagctgatgtcttccgttttgaatccccataaataactggccaaagtggctgccaaagcattcgcaatcatgaatttggcttttccgcctaaagtcaacggtacgtgcgtggcgcgttccactcggattttccattcgccttttttgatggtgatgaaaccattttcataaaccgctacaatttttccttctttggcaaatttttgaaccgtaggattattttcgtccatgctgaagtaagcaatgttgcagcttagctcgttggcaattttcaaacattgttcgtcttcggcattgagaatggcccaaccgtctttttttaccgaacgtactaccacgctttttactcgtgctaaatcgtccagcgtatgaatatcggccaaacctaaatggtcttcctgaatattggtaatgatggcaatgtcacaacgactgaagcctaagcctgatctcaagatgccgccacgggctgtttctaaaacggcaaattctacggtcggatcttttaggatgtattcggccgataatggtccggtcgtatcgcctttttccatcatgtggttttggatgtaaatcccgtcggaagtggtgaagcctactttataaccgttgttttttacgatatgcgccaacaatcgggtagtagtggtttttccgttggttcccgttaccgctataatcggaatgcggcttggtttgccaggcggatacaacatgtcaattaccggtgcggccacgtttcttggtaacccttcgcttggtgctaagtgcatgcggaagcccggagcggcattaacttccaagatacaaccaccgttttctttgagcggttgtgttaggttttccgccatgatatcgatcccgcaaatgtctaagccaatgactctggaaattctttcacataagaagatattttccgggtgcatcatgtcggttacatcaatcgatgttccgccggtgcttaagttggcagtcgattttaaatagactatttctccgtttttcggaacggtatcaacagtatagttgagtttctccaataagtctaaagtatctctgtcgacatcaatttgggttaatacgttttcgtgtccgtaaccgcgtcgcggatcgcgattggtttcgtcaatgagttgttggatggtttgtttgccatcgcctattaagtgtgccggttcgcgtttagcagcggctactaatttgttgtcgatgaccaacactcggaaatcaaatccggtgatgaatttttccacgataacgcgacggctgtattttttagcatattctaacccggctacagcatcttcccaagtgactacgttaattgaagcacctttgccgtgattcccatcaagtggtttgattacgattgggtaaccaatttttttgatggtgttttccaaatcttcttcgtctacgcaaatgctgccactggctaccggaatggaggccaagtcgagcatgcgtttggtttcttctttattacaagcgatatcaacggctatgttactcgttttacaagtaatggtcgcttggaagcgcatttgattgacgccgtaacccaattgtactaaggaattagttcctaagcgaatccacggaatatctcgggcaacggcttcgtctacgatactgcctgtcgaaggaccgaggcgcacacgttcccgaatttcacgcattttttgaatgtcggcttccacatcgtaatcggtaccggcaattaaggcttcggctatggcgactgaactttcggcggcgaacatacccacgctttcttcggtgtagctgaagactacattatatatgcccggtgttttggtttctcgggttcttccgaaaccggtttccataccggctagggtttgaatttctaaagcgatgtgttcgattacgtgtcccatccaagtgccgcgttcgatgcgggaaaagaaaccgccacgaacgccctcggagcagcgatgctcaatcatagtgggaaatagggcttctatgcgttcgcgaaaaccttcgattttgttggtgggaaattgttccatttcctctaagtctaaacgcatttggattaattttttgcgttggacactccaaagattcggtccgcgcaaagcttgtatttttagaattttcataaagttgaagaaattgtaatgtgattgtgtaatgattttgttaaaaataggaaataattgtctttattcgacaagttttttaaacaaaacctaaaaaagaagattaagcgcttcttgtttattttttgagtctgatagccagtggtttaaacttttccggcacaaaagaccattactttttagccccgattacagtggcaccttgtagaacggaaagcgggaataagccccgaagcttcggggcaaaaatgcccgagcctttaagctccgacaaattcggctatttgttggtagagtgttttgtcgtgcatgctgtggcctaagccttgggtttcgatgtagatggcatttttccaggcggcggcgtattggcggccttcttcgactttgattaccgaatcgtctgcatcgtgagcgatgatggctttttgggtaaagttttgggcaaataaatgtccggcaaaatcgttgatgtgtatattgaacttttcgtgataatattgttccaaacgattttgcacttttttgttcaaactcagcaaactgataaagttatcgctgatttttttaaagctggatggcgcgcctaacagtacaattttgtcgatatgatcattgggatatttgttcaaataaaaggcaatagcagcaccgccaatggagtgaccgattagcgttttaggctgatatttttgaagtaacacatggatgaattcggcataacgaggcgcattgaattctttaccggtactttggccgtgcgccggcgcatcgatagcgatgatggttttcccaagtggttttaggtattgcaatagttttttccagcgagaggcattgctttcccagccgtggagcagaaggataatttcgttattgcccgaccaagtgtagtcgtagtttaatgtttcttgttgggcgctttgcagcgttttggggagttttccgtttttgattttgccttttcggggttggctgaaaatggtataggcgatttgcttggctttttcgggatggaagaagctgatgaggttgatgtacaaaccaaccaatttggtgagtagaaagtattggattttcttcataaaaaaatcccgaactggtcgggattccttattataagttagcaaataatgcttgcattttttctctttcttcctgagctaaggcagcatctactaagattcttcctgagtgctcatcggtgatgacttttttgcgggcagcaatttccacttgtgtttgtggcggaatcgtaaagaacgaacctgcagaagcgccacgctcgatagatactactgctaaaccattgcgcacgctggaacggattcttttgtaagccgctaataaacgctcttcgattaaagcttcatattcggctgatttctccatcaagaagttttcttctttttgggtttcggccatgatatcgtttaattctgcttttttgtgttttaagtgcgcacttttttgttccaaacgctctttagaagaagcgattacttcttttttatgttcgatagaagctttcaattctttgatttgtttttcagccaattggatttccaactcttggaattccacttctttggttaacgagttgaattctctgttattgcgaacatttttttgttgttcggtgtattttttaatggccgcttgatgctcttcgatggcactttttttggctttgatttggtcttctatagtaactaaatcactttttaatttgtctaaacgagtgctcaagccggtaacttcatcttctaaatcttccacttctaaaggtaattctcctctaacgtttctgatttcatcaattctggtatctatgatttgcaagtcgtagatagctcttaatttgtcttcaacacttagttcttttgtagtcgccatattttataagtacttaactggatttgtattttcttccgaaaaaatgatggcaaaattaagaattttttccttaagaaaatcaacaatataattttttgtaaatctttcactttcaaagtgcccgatgtcggctaaaaccaactgattttcagcttcgtaaaagttgtggtactttaaatcggctgtcagaaagatgtcggcgcctgcttgtttggcatttccgatggcaaaacttcctgagccgcctaaaacagctactttttgaatgggttttccgagcaaagcactgtgacgaatgccgccgcattgcattttatctttcacaaaggctaagaaatcatcttccgtcattggtttttcgagttcgcctatcatgccgagtcctatgttttggttggcattttgcaattcgtagatttcgtaggctacttcttcgtaaacgtggttttggaagagcgctttcagtattttagactgtaagtgtttctcgaaagtgacttcgattttaatctcttcgttttctacaaattcgaagcgttgaccgatttcgggattgctgtcttcgttacccatatacgtaccgatacctttggagttgaagctacaatcttcgtagttaccaatttttccggctccggcgtcgaatagggcattgcgcagttgttctacattttcgggtatggtataagtaactaacttttggatgaaattctttttgggtaccaatattttggtgttggtcaagccaagtgcattgcagaaaattttgttcacgccgtgtttgtgattgtctaaagccgtatgaaccgcataaatggcaatgtcatttttgatggctttgagcacagcgcgttccacataattttttccggtaattttttttaagcccgaaaaaagaataggatggaagcaaaccaccaagttgcactttttagcaatggcttcatcgattacgctttccaacgcatcgtggcaaactaagattccggtaacttcggcatcggcattgcctacgagtaagcctacgttgtcaaaatcttcggcataagctaaaggagccatttcttctaaaaccgatagtattgctgttattttcatattttatttataagcgtcaattttggtaagtttgatttgccagtttttatccacatcgaaaaagtaacggatgtcatcaaaccgttttgttcggtaagcttcgagttctgcttcggtgtattccgtttgactcttatcgttttcatctcttatcgaaatggtatttttctcgatgtacagcaaacagatttgtttcagttgtgcttcataaatacattccacttcatattctttgccttcctcatcagtgaaagacaaagagatgttctcttttcttaccagttcgtctatagtgacatttttaatcacggcacataaagcttccggaaaaaattgttccatgttgaggtcatactcatcactagtcaacgaaatgtcttcgccaccttcggcatctcgctccttggcataatgccaagacatgtaagtgtcggtttctataggaaatcgcatgtaggattttagtgctaccaagtcgttttcaaaaagggctgttttgaacgcatcaaagttggatttggaataatcattttgcgtttgaacttttcttttaggtaccggattgcttatctgaatggcttggttatcttgcttacaagaaaagcaagtgatgacacctatcaggcaaataattttttttatgttataatttacgttgcccattcattcaagtattcctttataatccattcgttgttgactttttcgagcaataagaatcggccactattgtgttcgatgtttctgtaaaaagccactttaaccaaggcaaaatggtttttggcaaaataaatcggtttattgatgatgagcaaacgctggttgttttcaccgaatttttcactgatttcttgaaatgtttccagggaaacgcaatcgttgactttactcttcaaatattggtgttgattatcaaatagcaaattgtattcttttgaccaattttcgttcaggccaatgctaatttgctttttgatttcggcagcattttttttcagtagttcatgtccgttaatcacttcaataacttcctcgttattaggagctttattgcaataaagactcaataattggagtcggcctttggcaataaccttttcagttttataatatttggtgagtatgattttgagaatagccgtattgtctgcttcctgagcgaaagcagttatttgaaacaagcccaaaaaaaagcacaatgcaattttagttttcatgttgaatggttcagctgagttgattcaagttggctgtttgacattatagcttcaaagataaaagatttaaaaataattcgtgcattcgtcctaaataattactttcgtagtatgacttggttgcgaaaattattgtttccgatagctgtattatacggctttattacttcgattcgaaattatctgtatgataaagggtttttaaaatcgcatgcttttgatgttccgattatagccgttggtaacctgagtgttggcggtaccggaaaaacaccgcagatagagtatttgattcgtttgctttcaccacaatataaagtggcgactttaagtagaggttacaaaagaaaatcgaaaggctttattctggcggatgccaatgccaatgcggaagtcctcggagatgaaccgtttcagtattttcaaaaattccctcagatacaagttgccgttgatgcagacagacgaaacgggatttcccaattattggcgcaaaaagttaagcccgatgttattttactcgatgatgcctttcaacaccgcaaagtaaaagccggattttacattctcttaaccgcttatgacgatttgttttgtgacgattggatattgccaacgggtaatcttagggaaagtcgttccggagctgaaagagctgatatgataattatcaccaaatgtcctaatacgatttccgaaattgcacaagaaaaaatcaagcaaaagattggattggacaaaccgattttcttcagctttgtagattacgatgatcaagtttacagtgcaacagatagtttgtcggtatctgaaattaaaaataaaacgaaaattttgttggccggtatagccaaacccaaacctttcttcgattttttgaaggctgaaaatgatatggttatctcatatcccgatcaccatcatttttccaacgctgagattgaggctttaaaatcgcaagccggaggaaaaattattgtcacaaccgaaaaggattttgtacgtttggaggctgaaattttgcgaaaacaattatattatttacctatcaagagtcggttgatttcaaacgcgacggcttttgatcaaattattttagattatgtgggaaaaagtttgaataaatctgtaagtaattgtaaaacaattaaataatattaactaaatgaatattgtgaagtttttgtgaagttttatgtaataaatattcacataaaagaaaaaagagagtataggttttctaactctcttttttttattgaaaatgtatatacaattatatacatttcatccataaaaaatccacattttcaaaacctcatctttttttataatatatattttatggattgaaacgatttattcgattgtttcaactttcaaaaaataaagtatataatgaaaaaaagaaaacaccttcaaacgaacttctttaagtttattattgagaaatacaataaagaactccaagacgaattgaatgacgaagaaacaaatgtttcggatgacgaacttattgacgacatcgacaatatcgaagctcccgaagaacctaaaagaaaattaaaagaggatgacgatttagatcttgacgaattgattgaggaatacaacaaactctccgaaaaatataagaatttgagaaatgattattcactttataaccgaagataaaaaactttatgatgttgaaaccattacaagaatcctaaatgtttcaaagtcaaaagttcaaagagaattaaaaaagcaacaaccggaaatcattaaatacaagaatctgtttttatatccggaaactactttatttgagttgatggaagttatattgattgaaaaattaaacaagcaaaatgattgactggaacaaggttcgggattatcaaggtaagatacagatatacaaagacaaattgaatatcgaaaaagattttaagaaacgagaaaagttaaaattgaaaattaagattgaggaattaaaagcaaaaattgaaaaactaaattaaaaaatgagttctcacactctggaataaaagtgaatcaaaagcaataaaaagcaacaccaatatttcaagtttaggacggatgtttttatccgttcttggttgaattatatataaaattaaaattgataatggttctcctcaaaaagaataacgctcccaaaacaacccaaatgatcgaggatgatataagatatagtttttccaaaataacctcccaaaacaatcctatttactccataactataaacgatacaggttgcaaaaccaccgaagagttgaggttcattttaaccaataaatttttcaatcgaattttcaaggattacaaaaactcatttgaaaaattaaattatctttttgttattgaatatccaaccaaggtttctatcgggaatcaaatccccgatagttgtgatgttcatacccatatcgttttagaaaccaccattacacctcaacatttagaatattatatccaaaccacatttagaaaacctgacattcatattgaggacatcaccaaaagaaatgataaaagcaattttgtaaattacttactcaaacaaaaggatttatttacgattgacaactataactacaaaattttagtttaacaaaaaaggagtttatcgaatgacaaactccttttaatatgtatgatacataatttattttgttaaattataaagaaaatcccaaactctttaattctaattgaatttcatcaatagatttatcagtattatcaaagataatctctaaaatttcttcgtcaaaatcataaaaatctacatacattagaaaaagatcatacaaatctttttctctagtccctggatgaatgtattttaattcttcatatctagcgactatttctttaatctcctcgatagttatattttttctcattttatattattattttttattttatgacaactttctgtcattgtttttatccggtttttataggatgaaatccccaagtttttacatatttttcagttttaagcgttaataaattaattcaattccacataatcaataattactttttcttgtggttgcaccaaaataaattcaagactatataaatcaccatcaatgcaaacatctctgtaatgacattccccttctgcaacttctttaatgtatagatcgtaatctttgaaaaaaacaatactagtttctatacaattacgatcatccttttcctcatctgtttcaattaattcaatactaccgcataaattatttatttcattaatagtttcctcatcttctaaatatcccatatcatcagcaaaatatcttaatcgaacattattctcgatcaagcaacttattatctcatttcctttttgtgttttgttgtctaaattttccatttttatctgttttatagttaatgttcttttttgtttttgaaatattatttcaatttccaagttgttccgtggttttttaatttacttacgttaaactttacttttaatcttcctttgttgattaaatcctcaacatacaccgcatcaaaaaaatcacatttgttatttcttttacttaaaccattcactactgatttaatgctccagcaatcaaacaacattgtttgtccgtctaatgttactgataaaaataccacatcatttttaaccactagttgtaaatcatatccgttatacttaacagatttgttccccgagataaaactcgttttcaaagttcttacaccaccttcaataatccccaagttgtttttaagattattgatatacccgttttttgttgttttgtccggtcccatcataaaggacttaacaacgattagactttcgtctattactctttttcgttttttcattcctcccgaaatgaaaatctttggataagtagtaaaaccgccatcgaaaattgatgctccattcattttttatagttattaaattgttattattttacattttattaaagcatagaaatccaccctcgccaaaagcaagttttttaatttttttatttgtaaaactttgaattttaacctctaacagaaattaatagaggtgtgtttctgatttcttttgcaaagatatattgcactttataataaaaaaaatcgaaaaaaatttggaaataatcaatcccagaatacatcaaacttggttgaaatgttaaagttttattaagaaaaaacaagtcccgaatgacgggacttttcagattaattttttttcagaacctcatcgattttttggttcctgacaaacgattttaatgatcggtatataacatcatattcatcaatagaaaacgttaggacaccatttaaaacatcaaaataatagacaacctcccaatcattcaccaaatcattttcgatattattattctcgaagttgattaatagtttttgagtatcacaatctgtaaagattttaaggagttgttgaggtttaattgttttacctcttttgttgattttatatttgaccctcattttgtatatataaaaaaaggttgtccaaaagacaacccaattttgcgaaacgtcaaaattaacctttcattaattattatctgaatagaaaaaatgtggaaattctttttctaaatcttttataaccttatcaaacgttgaagggtctaaatcttccaacctccagatattagcactaccaagtctgtatccaaaatcaggttcagcatcaggcatagatttcggtctggattcttcatttatattttcatcagaatattcatctaacacaactccgtctttaatatgccatgcagcactgatagattttccataaatatctgttttatatgatttgataaccttaccattttcatattcatcatatttactaatgcataagcatccaccgtaagtatttgttgaaatattaaaaccatttaattctttaccattatcataagtcatttctttagtaatatagtatttaccattaactttttgctttgtcatttcactaatcaaataaccatttttatattctcttttaagaataatagtatcattttgatctttatcagcgcaaatccctgtaaaatttttatttttcaaactacctgattcatccattaaactattgcaaggacaatctgcaacttcctctgttttagcttctgattctgattttgtttctccatttttacctccgcaggagattgtaaaaatacctagcattattaatgatgctactactaattttttcataattgtttggtttttattttattgtatgtatttatattgcgaacctttaattgctatctgaatagaaaaaatgaggaaattctttttctaaatcttttataactttattaaatgttgacttatctaaatcatccaacttccaagttttattaccatacccaaagtcaggttctgcatcaggcatagatttaggtctagattcctcatttacattttcagaatactcggctactacaactcctgctttgctgttccatacagcgtgaatgcttgtagaatctatgtatgtttcatatgaatttataatctttccatttttatattcttcataagactcaataaatgttgttataccgccattatatgatttagttttaatttcaaaaccatttaaaggtttttcattatcataagttaaatttttagttatataatactttccattaaatttttcttttttcatttcactaattaaataaccatttttatattctcttttaagaataatggtatcattttgatctttatcagcgcaagttccagtgtaatttttatcttttaaataaccagttgtatctattaaagtattacaaggacaatctgcaacttcctctttttttgtttctgattctgattttgtttctccatttttacccccgcaagagattataaaaatacctagcattactaaagatgctactaataattgttttttcataaatgtttagtttaatttttatttaggttttatttgtttaatatgtaaaaggtgtgataaactgctccgtattgaccatggaaaacattaattattttctttttgtcttttgaaatataatattgttgaaaaccaaattctccctctcgtctatcattgtcccttgtgtaaacatcataatcttttcttttttcaattattaaatcctcacactcatctttagataaaacttgttgcattttattaagttcggatacaacaattttggtgtctgtaatgttaaaagagtaaaatcggtattgacttgatttatcacaactcaaataatcattagtgtttaaaaaatcatccaaagccgaacattcgtatttggtataaagttttaggtttggattttttttaacttgagcaaaactcattgaagttaaaaggactaataaaaatgataatgttatttttttcatacagataaatttaatttttaacaaaagttctaactggtcttacatataattcccaagttttttcggtatccatagcgtttagatatagattgttgaaatatctaaaatatgctttttcatatagattatccgatgaccaatagcatttaccctcagcaaaatttccaatttttgctctattcaagtaaagaagttttaagtcattcattgtaggtaatctccaaccttttccgagattcgcacatgcggtttttgcatcttcccagtttaactttccaatatcacgtgtcattatttcgaggtgttcaacaatcacggttctacctacatcatttgacgttaatttatcaaccattggattgtgtccggtagtttcttcctctccttgaaaagctccttctttgtattcatcacttaattcagaatcgttggtttgagcaaaagtgtttaggttgaggagtaatattataatataaaaaaatgtctttttcattttattgaattttgatattctatttctaatttctgtttaaaacacaaactgcactctatataatattcataactttcttttactctattgaaaactattggtgcatccatttcacacttcataaaggataagtattcgtatagacttcttttggaaattctaatttttttggcgaattctgatggttttccggtttgttctatacaaattaaatcgtgtatccttattattacttttatattcaatcaagtaaaatttatgcaatactagtttaacacggtgcgaataccctgcactatgttaatttgcattaacaaacttaaaaaatatatcggttgcaaacaatcctttttaaacaatcccttaaaacaaacggattgaaagtaattttccgatatggaaaaaagagcaagaaaattggaggtgaatcaagaagtaatactccttggaaaaagaattgaagagttgattaaatcgaaaaaattaaaaacccgtgaagtcgctcacgatgccgatatggacgtggaaaatttaaggaagtatataaaaggtaagcaagaaatgaagatttctacaatgctaaagataacaagagctttgggggtttcggttgccgagctgtttaattttgtttaagatataaaacttgtaatctcacttattttttaaatattttgttgaggtatccattttattctgaaataagttttttaattttttgaattgttccgctacttttatcagtcagtttcatagtctttctaactgaataaccttgtttcaataatttaacaacgtccttatgttctgctaaaagagtttcggtatcttttttaaatccttcttttctgccaacttttccgccattttttctataactctcataacccgattttattctttgacggatttgagttttttccatctcactaactgaaataaggatttgtattaaaaattgagacatcgggttgatctcacatttatcattcaatgtttcgatgctataatttttgatgtaaagagaaatacaattttcatttagcaattgaattgttttaagaacctcaaaagtattccttcctaatctacttaattcccaacataggactttatcaattttattctttttgataaagtttatcatcttcattagttctggacgttcctcgttttttttaccaccggagatcttttcttcaaaaatagaaactacctcataattcatattttttgagaactctaacaattcttctgtttgtctcttgtaatcttgactatttgttgaaaccctagagtatataaccactttcatattgtatcgttttaatattttatattacaaagatacgtaaagtgtatcattaaaccataactttattgattaaaatgatacgatttttttttgatacgtttttactattactcaatactttttattcggtcaataatttaataaattgcacaaaaaaaatatgcaaacatttgaaacttatactaagaatgattttatacaagcttttaataatagcacatggtgcaattggcttggacgatacgaatttccaaacgaatttagaagaattggtcaagaaacttatgtagatgtaggtatgttggctgtttttgctataaatactatgggacttaatttaattaaaggtaataatacaattgatgcgggatatcaaagagcattttatgaattgatagatgttccaaattttgaaactaatgcggctaaactaaattcacatcaagtattaaaaatcaataaagatgatgtttatattctaaaagataatttgaatttatttcgttctgaaataggtctaaatccacttacattacatttcttaaaaaaactttcctcaataacattttttaaattagttaagaatcaaaagatgtttgaacgaattaaataattattcacttctatatttaaattacgattttttattcaatacgtctaatttgatacattctgctaacacctttatttattttgtattgtttttcctttccttgaaaatgtttattgatgtatttttccgaagttcttaactctccgtgtcccattaagtttttaatgtcccataaatctgcttttccacttttgagtaaagagttgataaaagaatgtctagcgatatggctacttaaacgaatttcaaaaccaaatacttcttttatttgagagagaaagtaattgtatcgaccttgaagatttttatatcttttgtattgaatttcggttagttctttgtttttattgtatttcttaaatattcctttttgtttatctctaataaatctctcaaaaacaaaatcattttgatctaaagttttaatttttttgtaagtgttgaaaatatactttgtttcaattttattttcaatttcaatccttaaatcaatcatttcctttattgtttctgttctctctttatcagaatgaatagggtagtagtatcctttgtaaaattctaatcgtccaatatcaccacctttaatttcgttgttgatatttgctttgcggatttttaatttttttaatagaatattgcaatccgtaatgtttattctgtcgataacttcattttcagttttaaataatactctataacaattgaaaggaatttcgagtttagttgtttttactatgtcattataaagggtttgattttctaatatttcatttattatatgacaaatgtttatattgagatacacctccatatttctgtcagttttcatcatttgataaactaatttttcaggtttgaaatcttcccagcgtataaaaaataagtccgacattctcattccgtttgcgaaaaactgaaataagaacatatttttataatacattaaattgttctgtttttttgatccattacttttgagagatattagttttaaaatatcgtcatcacttaaaggatctattggtttagttgatttttgtaattgttgatacttgctaaatggattttttttgtaaaaaacgacatcttcatttattgctgaatttaaaacttttctaaaaaccgaaatagtatcaacaatagatgtattagcaagtcctctgtttttcaaaaaaataacataataatcaatccaatcgggagtaatttcgctgaataacaaatcctcttttttgtttttttgtaaaaatcttttgattgagtttaggacatcgttatatcttgattttgttcctaataccaatattttacttgtctcttttttgaaatattcaagataagataaattgttttcttcttcaccttcattgttcgattttgaataaatagttgaggtccccaatccattaaaaatattgagttcttctgttattttgttattgattgaattataatccaattcttcattgacattaaaacgattaagttttttgataaaatacttttcaaagtgttctatttttacttgaataccgattcttttttgagtttttactttgttcttaatctcttgaattgctagtgttccaatgttttcagattttttctttgccaaaataatttttactcccattatttattttacatttgaatgtttgatgtgtgaaatgtaaatatagtaaaaaaaactatctctgtgaagtttttgtgaagttttaattcgttttggaacgtttttttaaaatttataaaatcataaaaatctaaaaatcaattaaataaataataattaaaaaaatattaaaaatgtgggaattggtaaaggaaaccgttaattacattaaaaataaaaccaattttacaccggaatatggtgtaattttaggctcaggattgggtagttttaccgatgatattgctatagaatttactatgccttacagcgaaatacctaattttccggtttccactgtagaaggtcacaaaggcgctttggtgttcggaactataggtgataagaaagtagtagccatgcaagggcgatttcactactacgaaggatattctatgcaggaagtgactttcccggttcgtgtgatgaagtatttgggcgttactaaactcgttgtttccaatgcttcaggcggcgttaatccgaattacaaagtaggttcgatagccgtaattaccgaccacattaatatgatgcctgaacatccgttgcgcggtaaaaatgatcctcgtttcggtcctcgttttgtcaacatgagtgaaccgtatagtttgaaaatgattgccaaagtaaaagacattgctcaaaaagcaagcatcgaattgttcgacggtgtttatttaggattacaaggaccaacttttgaaaccttacacgaatacaaaatggtgaaaaccattggagccgattgtgttggtatgtcaaccgttcccgaagttatagtggcgcgtcacatggaattggaaacgttcggcatctctgttatcacggatattggtagtgaagagcatttggaatccattactcacgaggaagttttaaaagccgccaatgctgcagaaccgcatgttcgacacctaattaaagagttgattttgcagtattagtattgcttagaaaggcagtaagcaatcactcggtagaaattctcaggatcaaaaggtttcgtaatcacatctgtcatcccgaaagacaatagcatttccctattttcgttcaaggagatagcggttaaggctataattggaattttgggatcgaactcacgtacattttgcgtcgcaatggtaccgttgatgcccggcagatgtacatccatcaaaaccaaatcaaatgtatgttggcttttgagcactgacacggcttcttcgccattgtcgatgattttgcaatgtattcctttgttctccaacatttttttggtaaccatttggttgattttattgtcttctaccaccaaaatgtatttgccgtctaagatttcatccgaataagtaatctcttctttgggtttgatttctttagtgctgttagataggttgagttctacttggaagactgtaccaactccgacttcactttcgagtgaaatttctccgcctaataagtcgactaatttttttacgatggttaaacccaatccggtaccaccatatttgcgatttatttcgatggaaccctgagagaaactgtcaaatatagtttcttttttctcttcgggaatgcctatacccgtatcacttacactgattttgattcgggaaaaatcggcttctttttcgattacgactgcactcactttaacttcacctttgtgggtaaatttgagagcgttgttgattaagttgattaatatttgcgagagtttagtaggatcgcctaataaggtttccggaatagtatcgtcgatttcaaggacaaagcgattttcatttttggcggcgatttcattcattgagttttgaatatcgactaacagttgcttgaagttgaagtcgatgtattcaatttcgatattagtcgattcaattcggttgatctccaatatttcattgatgaacgtcagcaaataattccccgaaaatttaagtgaattaaggtaatgcaattggttttttttcggattgccttcaattagtaaatgcgtaattccgttgatggcgtttagcggtgtacgcaattcgtgactcacagtagacaagaattcagctctcgctttagaggctttttctgctttgtctttggcgatttgcagttctttgtttttatcttggagcagttcgttagattttctgcggatgatgttgtttttgtacaaagacaaactcaatagtgagagtattgaaataagcgcgatacccaaaatactgataagtttgacaaacttgttggttttttgttggatctgactttccttagtcatttgttcaatggttttgatgcgttcactttctttgaagtccatgaagtcatcactcgataatttggcactgttgttttgcaacaaactgtcttttatttgcaaatgctctttaaggaattggtgcgctttttccgtgtctaaaagtttttcataagccttacttagttctaaaagcatggctgatttttgttctaaatcatttcctttttcgttgagttttaaggctcgattaagataattaacggctaaattattgtgattttcttcgcgttcaatcatgcccaattggtacatggcttcggctttgagtttgtaaacgtctttgttatcgggtttggcaataatttgattaaagagtttagaagctaaatcaattttaccacgttttttatataaaatggctttctgaagattcaaaggttctgttgcgtcaatttttaagagactgtaaaccgattgggatttgttaaagaagatttccgctttgttgaattcgtctaaattcatatagcacatgccaatatcgtaataacaaatggcttgttgcgtggttggcggataggcactcaggagcttgatgcacttttcaaaaacatcaatggcatcttcaaacttttttaattcgtagtaggttgtggccaatgaatattgggctaaggcttccgattttttatcccgattagctccggaaaaattaatggctttttgcgaaaaatacaaagaggatttgtagttgtcggtttttctgttgaatacagccaaatcgatgtagtatttagtgctgtcaattgtagcgacagatttcttttgtgcaaaacacatcgttggcaaccataagcatagccaataccacttcataatcggatagtttacaaatcgttagggctataaatatagagaaattatttttttagcagcctaattaggtcgattattcgtgaggaatagccaatttcgttgtcgtaccaaccaacaactttaaccattttgtcaatgacagaagtgagttgggcatcgaataggcaagagttaggattgcccaaaatatctaccgaaactattggatcttcagtgtaagctaatatgccttttaagtgggtttcagcagcttttttgaaagcagcgttgatttcttctatggtcacttctttttttacgtaacaagtgatgtccgtcagggaaccatcgggtacaggaacacgaataccgctaccgccgattttgccgtccatttcaggaaaaattttggtcagtgctttggcggctccggttgtggttggtacaatagattgactcgcaccacgagcacgtcttaaatctttgtgaggctgatcgtgtaaactttgatcggttgtataggagtgaactgtggtgatgtaagcttgttcaataccgcacaattcgttgatcactttaatcattggtgccgcattgttagtagtacaactagcattggaaacgatgacttcagaaccattcaaaatgttttcgtttacgcctaaaactaccgttttaatttcaggaacttcactgggggcggagagtattactttcttggctccggccttaagatgtttgctgatttcctcgaaagttttgaatttcccggttgattctatgacgaaatcgacattattccattgcaaattagcaatgtctttttcgttgaagaaggcgtaatgtttaccatcgactataatagagtgctcatcatgcgatacttcgcaaggcaaaaccccgtgaatgctatcgtatttaatcaaatgcgccatcgttctgttgtcggcaatatcgttaatggcaaccacttcgatagtaggatgattcaagagtaatcggaatacatttcggccgattctcccaaaaccgttgatggcgatttgtgttttttggttcaagttggagatggtttaaagttgtttaatattgttttaaatggtttaatggttaaacaataattctaaaccttttaaacccttaaccttttaaacatttttttcttttacaaaatatgtttttccgcgtggtaagaagaacgaactaaagcgccgctttctacgtgacggaagcccatagcttttccgattttttcgtatttctcgaattgttccggtgtgatgaattcttttaccggtaagtgttttttacttggttgtaaatactgacctatagttactatgtcaacgttgttatctcgcaagtcttgcatggtttgaatgacttcctcttcggtttcccctaaacctaacatgataccggatttggttcttcgtatgcctttttcttttaagtatttcaaaacggccagacttctgtcgtatttggcctggattcttacctcgcgagtcaatcttcgcacggtttccatgttatgcgatactacttccggattggcttctaaaatgcggtcgagtaggctttcgttgccttggaaatcggggataagtgtttctaaagtcgtttgcggattcatacggcgaatggcttgaaccgtttcaaaccaaatgatggaacccatatctttcaaatcgtcgcgatctacactggtaattacggcatgtttgattttcatgattttgatggaacgcgctactttttcgggttcatcccaatccacggtttccgggcgacctgtttttaccccgcagaaaccacaagagcgggtgcaaatgttccctaaaatcatgaaagtagcggtgccttctccccagcattcgcccatattcggacaactgcccgaagtacagatggtgttgagcttgtatttgtctaccaaaccacgaagctcggtgtatttttggcctataggtaatttgactttaagccattttggcttgccaatcggttggttgctttcgattactgattccatagtcgctttttttgccttgcaaagatacaaaggatgattgaagaataatggtttttaaattcagaaattgttgttaaaaagcggatttttactcaagaaagtccatgtgtttgttatgggtttcactgatggttaaaatcgcataaattcctaaaacgaaggctatcaatcctacaattgccgccgatagaataatggagttgtattgtttcagataatcatagcccaatagcataatcggaacggtaccgcgcaccatatttggtatactggtggttgctgtgcttcttaaattggtgccgaattgctctgcagctacggtaacaaacatcgcccaaaaaccacaacccaatccaatccaaccgcaatagaaataatacatattttcggttttagtaccgccgaaaagaagtaaaaacactccgattagcgtaaataacagcatgtacaaaatggttttctttctggaatgcaaagcatgagaaatgaatccgctggagaaatcgccaaccgaagtcgtaatataagcccacataatagcttttccgggatctatacttttaatgcctagctcgggtgcaaactggttggccataaagactaaaataccgatgcaataccaaatcggaacaccaataagaatgcactttaggtatttgataaatagttttttattggtaaaaaaagcgaaaaaattaccttttctaaccgtattattttcttttacagcttgatacataccgctttcagccacactaatacgaagtaccagcaacagcaaacccaaaccgccgccaatgaagtaagcggtggtccaactgccagccaattcaacggtgaattgtgccactacagcgcccaatacaccaaatccggcaataatggaagtgcctatagcacggagttctttagggagagtttcggaaactaaagtgataccggcgcctaattcgcctgcgagtcctacgccggctataaaacgcagccaagcataaatcattcctttatccgcaaaatccatttgaggtaaaaagccgcaggcaatattggccaaagaataaacaataatagacccaaagagcacggaaaggcgtccttttttatcgccaaaaacgccccaaatgataccgcctaaaactaagccgaccatttggtaatttaatatcattgtcccaacggtatcagcttctaatcccatatctttcaaactgggaatacgaacaatgccaaataataataagtcatagatatctacaaaatatcccagagaagcaataattacgggaaatcccagcaggtgtttgatttttttccgtcttgtaaaatgttgcatagtttacctatttaaaatcaaatatatactttttttggtgactgttaatttttttgtaaatcggttgttgcttggataattattatacatttgtatatacaaatattagcatgatgaatagaagtgatttcatcaaattagcaataggaggaacaacaatgatggctttaaatcctttatacaattggtctaaggacttgaaagagacggatggtaagatgcctgtattgtttataggtcatggttcgcctatgaatgggattgaagacaatctcttttcaaaaacctgggtaaaacttggtactgaaattcccaagccaaaagcggtattggtcgtttcggcgcattggttaactaacggaactcatattacagccatggaagctcctaaaaccatacacgattttggtggttttccgcaggcgcttttcgatgtacaatatccggctccgggaagtccggagttggctctggaaaccagtaaattaattacgtcgacttccgttggtttagatcacgattggggtttggatcacggtacttggacggtagtgcgacatatgtatcccaatgccgacataccggtgttacaattgagtattgattatagtaaaccaccacaataccattatgatttggctaaagaattggctgctttaagaaaaaaaggagtgttgattattggtagtggaaatatggtgcataacctgagaatggtagcttgggacaaactggatgaaccggaattcgggtatgattgggctcaggaaatcaatcaggtttttaaagaaaaaattgtagcaggtgacgtccaatcactaattcaatatgaacgactaggcagcgctgctcaattggccattccgacaccggatcattattatccgctattgtataccttgggattacaggataaaactgatgccattgatttcttcaatgataaagctgttggcggttcattgacgatgacttcggtaaaaataggataaaaaaaggaagctatcagcttccttttttttataaccctaaggcttttttagttggtgcagtcaaggcatctttatgtagtaataccgaaatggctttcaatcgcaaataggcaacgctcatgtaaataaagccgtctctaccggatgtggcaccccaagagtttttaactttataataaacattccctttttggtcttttgccttacctacaatgtgcatcaaatgatcatccatggtgttgtaattctcaaactcggcttggcggaattccggtgtgattactttttcgggtttgatttcggttaagatagccgcggcatcagccgtgttttgtgggataaccgcaacaccagaagtgcttgaaaaagtagtttcgctcacatcactgtctaaagctactgtgtatcctttatctaaagcattgtcaatattttgaacaaactcatctaaggtcagattgtaaaaataaccattagagaaattatccgggatattcaagatgaatttggtatgtacgggttggtgtgtaaacgaagtgatggtaatgtagtcgttgagattgagtttgtaattacgagctacatcttcggcggtcatgggtttgatgttttttacttctcccatgtatttgtcaagagccacagcataatcggtcttccaattagggtaggctttaggggtaagtgctactgctttttttacaatatcctctaatgctgccaccaaaccggaatgatcgtattttgcagttgggtcaatttttccggggtattccgcttgcgtagttagtccgtattttagagcgctgttcattacatcgtgattcaaaccgccttcgccaaattgtgctttcccttgacgcatgacatagttttcggctttgtcaaggtaaatgtttcttacggtgtacatctcagacagatcgaccggagtgccggttttgcgaataatttccgcttctaaaaacgaagttgaagaaaaactccaacaagttccggtattttgttgtgccgtgacgggagtacatttaatttccttaacaatttgaaattcatacttttgagaaaaagcatttaaagtcataaataatgctgaaacagctataaaagttttattcataagaatatgtttagtatagaggttaaacccgaaaaatgatttatttttacgctaaaataatggttttcctcagctaactgttatttttaacgaattatatgaaaaattaaatacagctagttttattatgagtaccatccaatggattacggccaaagaatacgaagatatcacttataaaaaatgcgatggcgtagcacgtatagccttcaatcgaccaaacgttcgcaatgcttttcgtcctaaaaccaccagcgaattatacaatgccttttacgatgctatggaagatacttccatcggagtagtattgctttcagcagaagggccgagtactaaagacggtatttggtcgttttgcagcggaggcgatcaaaaagcacgcggtcatcaaggttatgttggtgaagacggctaccatcgtttgaatattttggaagtacaacgcctgattcgctttatgcctaaagtggttattgcggtagttccgggctgggcggtaggtggtggtcacagtctgcatgtggtatgcgatttaacgctagcaagtaaagaacacgctattttcaaacaaaccgatgccgatgtgaccagttttgacggcggctacggttcggcgtatttggccaaaatggttggtcaaaagaaagcccgagaaattttctttttgggtcgaaactactcagcacaagacgcttttgagatgggaatggtgaatgctgtaattccacatgatgagttagaggctactgcttaccaatgggcgcaggaaattttagaaaaatcaccaacgtctatcaaaatgttgaaattcgccatgaatttaaccgacgatggtatggttggacaacaagtatttgccggagaagccacccgtttggcttatatgaccgacgaagccatagaaggaagaaatgcctttttggaaaaaagaaaaccgaacttcggaaagaacaaatggattccgtaaatagcgctctaaagtaaaatcgcattgacttatgacagatttcacaaacgaaaaaatcgacactacgcaattgcctaggtatgaagcggtaccattgactgctttgcatccgaattattggaaagaattgttggtagccagaggattgttggttttgggactggccattgccttagtttcggcgctgatttttatcgaagaatttatcgattaccgctggattgctgcaaccggttttatagtttttgtcgttttactgcttttgattaccaatatcacctacaagaaaaaagcctatgcttttaggactcatgatgtgatttttcgtagtggtatcattgcaaccaataccatggtgattccgtacaacagagtccagcacgtggcacttcacgaaggttggattgcgcgctttttcgggttggctaaaattgaaatctttaccgccggcggcatgtcgagcgatttggaaatcccgggaattgccaaagaagaagccgaaaatatcaaacaattgttgatgggtaaaattcaaaagcaattgtaatggaagtcaatttcaatcagccgcaacgccaatccgctatcggagttttggtgatttttctggagatgatttttgtcttggtgaagaatatttggccgattatagtgattactttattgaaagccgaagataaatcggtttggattgggcttctgattgcacttgccataatggtttattttggcgtctattcttttttaaaataccgaaactttactttttatatcgatgccgataacgatgagtttgttattaatgatggcatcatcaacaaaaccaagacggcaatccaattgcacaaaattcagcaggtgaatatcaagcagaattttatccaacgcttgattggcgtgtatgctatggatgttgatacagccggaagtgatcaaaaagaaggcaacatcaaagctatatcacataatttggcattggccttaaaatcgaagttgttggaaaacgaaggcaaagcggtaatcgatcaagtcgaggctgaagttgctcaagcagttcaaacaaccgctccgttcttaaaaatcaatttggtgagtttgctcaaaatcggatttacttcgaattatgtgaaaagcatcggtttgatcttgacctttttctttaccatatacgaaaatctccaccaagccggtgctgaagatttggttgatacggatcgcatcaaaggtttggttgatggctattcgttgttgtacacgatgttggtttttgtgctaatgatgtttacggtcatttttgttatcaatattgttcgaacattaatcaagtttttcgactatacggtaaccaaacaaaaaggttctttaatgttgacttacggtttaatttctactcaaagcactatattgaaacctgaaaaggttcaaatagttaaggtttcggaaaactattttcaacgaaagctgaatgtactcgaaatcaaaatccgtcaagccatcagcgatgagaaaaaagacagcaaatctcttatagaaattccgggttgtaatactgctgaacgcgatgaaattttaaagttgttgtttcacgaattgcctcaaaaaggtgttatgatgttgcctaattttcgccgactcattttttcggtattcctgataataatcctacctttaaccgcttattttacgctgggtaaatttgtttcttcggaggttttggaataccaaaccggcgcatggatttatgctttgttgatggcaacgctcttgtttttcgggtatagaaattacagacttttcgtagcagacaagcacatcatcaaacaaagtggcgcttgggatatagaccaagaaataatacaaatcgataaaatacaagccattacaacctcacaattgttttggcataaaagtttaaatataggttcgttaaccatgcacacggccggtggaaacattaagtttcatttggggcaattcgacaaaataaacgaatatgtcaaccgttggttgtatgaaatagaaacctcaaacagtaattggatgtagccgtaatattagatgtcagatttaaaatatcaaatatcaagattaatagcaaatcatatctaatatctaaaatttaatatttaaaattattatgaaacattgggttgaagccgccagagtcagaacgttaccgctatcagtgtccggtataatcgttgggagtttttatgccatgtcgcaaggcatgttcaattggaatattgtcgtttttgctttgctgactactttaggcttgcaaatattgtccaattttgccaacgattacggcgatggagtaaaaggtactgataatcaggatcgcgttggaccgatgcgcgccattcaaagcggtgttatatcgccaacagcgatgaagaaagccatggtgctgacttcagcaattaccttgttgtttgccgtattgttgatttacttcgcgtttaaagaccattatttgttgtattcgtttattttctttgttttgggaatattagctatcgcttcggctattcgctacacggttggtaaaggcgcttacggctatcgaggtttcggcgatttgtttgtgtttgtcttctttggtttggtgagtacttttggcgtgtattttatgtttcccaagagcattgattggttgttgttattgcctgctattgcgattggattcttaagtgttggtgttttaaacttaaacaatatgcgcgacgaagccagtgacagaaaatcaggcaagaatactttagtggtaaaaatgggcggtgctgcagccaagaaataccattattttttggtgatttcagctatgattttggtgttggtttttgcctttttaaacgaattccattttgaccaatacatctttatcgtggcttattttcctatgattagccatttgataaccgtttaccgaaaccaaaatccgaaattcttagatcctgaattgaaaaaattagctatcagtacttttttactggcggtattgttggctttgtgtttgattttcttcatttcagatgtagtagtgaattacgtttaatcaaaatattatagtgctatgaaaattaccttttatggtcacgcgaccatcgggatagaaatcgcaggcaaacatcttattgtagatccgttcatctccggaaatcctaatgccgctcatattgatgtgaatgctttaaaagcggattacatcttattaacacacgcacaccaagaccatattttagatgtcgaaaccatcgcaaaaaacaataattcaatcatcgtttctaattgggaaattgcttcttattacggcaataaagggtttcaaaaccatccaatgaatcatggcggtagttgggtgtttgattttggcaaagtgaagtacgtttcggctattcattccagttcatttcccgatggtacttatggtggaaatccgggtggctttgtcatcgaaggagaacacaaaaacatctacatctcgggcgatacagccttgactatggatatgaaattgattccgatgcgcactaaattagatttggccattttacctatcggaagtaattttacgatggatgtggaagacgctatcttagccgctgattttgtagattgtgataaagtcttgggttgtcattacgatacttttggttacatcgtcatcaatcatgaggaagccaaaaaacaattcttcgatgccggaaaagatttgatgttgttggccataggcgaaagaattcaactataattcaaagtaatcttctaaaacgagagtgtcatttttggcactcttcttgttttctaaacgaaaaaaaataccatgagattctccattactgcgctctgtttgttctttaccgctgttttatttgctcaaagcaatgatggttattgggacaacgttcgcgccaccaacgaaactattattttagaggccggaaagcgcaaagctgtccaatctgccgttttccccgcaggtacgacagaagctgtttttcgcatttcactactggacgacaatcaaaaaatcagttcgagtttggtttcactcttaaaagcaattccggatccgagtggcatcagtcaaggtacagccggagcggtttttttgctttccaccattaccggtgaagacaagtgtaagttttatgtttttaccaacgaaaccgatgctttgcaatttgaaaaatcgggaacgattaaaaatgcttgttttgctcaagaaacaccggtaaacaaagcggctaaactcttgtctgaagattccaaatgtttgtcggccaacccgaaaaaactttggtttgcctttgaaagtgacaattgggtaatgaagcaaaagattgtcttagaagtagtgccttgggtggataatactttaaaaagtggctggtcgactcaagccaagaaggaacttttaaaaaccattcaacagtcggatatcgctataaaagtggcgaataaagacttgtggttcgggacatttttggagttgtttactaagaaatacacttatgccgagtaccaaaaactattgactgcagagaaggccaaagccatggaaacaacttcggaagagagtttggtcaaatcagggcaactcaatagttatttggaaagtctacgtaaagaagcacaacaacttcgtttcagcaccaaaacgcctgaagcaattctaatcattcaaaaagaaattatcgagaaaaaaagagccacggccgctgattacgacttgttaggtagtttgtatttgtcgtctaagcaatttgttaaggcggaagaagcttatttgaaagcggttagtttggataaaacagcgttgaattaccaattgcaattggcccatgtttatttgtttaccgatcaattgagtaaggcgaaagaccttcataaaaaataccaaaacaatcatttatctgatgggaaaagctgggctgaacaaactaaatccgatttccaacaattcgaaaagaacggatttgatacttccgattttaaaaagattttacgccttttagactaaagatgaaagcaacctatcataaatacatactgcattttaaacaaccatcaggaacttcacgcggtgttttaaccgataaagaaacctggtttttggtcttggaagaaaacgggaaaaagggcataggcgagtgcggaattttacgcggactttcggcagatgaccgaccggattatgaagaaaaactacaatgggtttgcgacaatattcatctcggtgctgaaaaattatgggaagaattaatggaattcccttcaattcagtttggcgtagaaatggcttttttgtcgttgcaaagtgaaaatccattcgttttgttgccttcaaaatttacttcgggagccgcttctatagcgataaacggattggtttggatgggcgatgaagcgtttatgaaacgtcaaattgaagagaaaatcgagcaaggttttcgctgtatcaaattgaaaatcggagctatagattttgaaaaagagaaggcgttattgcgctttattcgtcaaaatttcgatgcggaaactatggagattcgggttgatgctaacggtgctttttatgaaaatgaagctttagataaaattaatcaaataactggttttcaaattcatagtatagagcaaccaatacaaaaaaacaagactgacacgatgtcagttctctgtaaaaacacccaattgcccattgctttagacgaagaactcataggcattttttctttggctgataaagaagcgttactgcaaaaagttcgaccgcaatacatcattttgaagccgagttttataggtggatttagaggtacttccgaatggattgccttggccgaaaaataccaaatcggttggtggattacttcggctttggaaagcaatatcggtttgaatgcgattgcccaatttacatttttacaaaacaatccgatgccgcaaggtttaggaacgggtgctttgtatactaacaattttgaaagtccgcttcaagttgcacaaggccaactttggtatcgaaatgaactcgagtggtcatttgatttggaccaactttaatcgcttcgaatcaaaaaaaaatactccgtgaatctttgtgttttttttgcacgtagattcacagagtaaaaaatgagattcaaagagtttaatgcattattttccccaatcaatttttcgggagaaatacatcacagctccgaggattaaaaataagcctatacttcctaccaacagcgcataatcttccatttggataatcacataaatgaagctgtacaaaaccgtcagtgcggccgcaataaacagcgcgaattttcggttctttaaaatagatatcgagtagagcgtaatcattgtaataactgccgttccggctatcgcgtaagccaaactaaagctactgtgttccgtaatcgaaatgagcaaagtgtaaaacatgatgagtgcgattccaatcatagaatattggaaaatgtgaatgtttattttgctcaccgattggatcaaaaagaaaatcagaaaggtcaagccaatgaccaaaaagccgtatttggacacgcgttcgttttgttggtattcgtctactgtatcaattaatttgacgccgaatttataatcgtctaaattgggtagagaagccgcgtattgttggctaaaagttcggttgatgtcgagtattttccagtcggcgtgaaatccatctttactaacaaccttagtcgcatcattagcagcgaacgaaccttctaagctaggcgattcccaatcggagtccatagaaacctttgtgatttttccaatcggaataaagctgatgctgttgctgccgttgtactgaatatcgaagtgaaactgtatcggttttcccgcggccaaattggtataattaaataaggtcgtggctaaaatactgtagtcgcttttgtcttccggctgtggttcaaatagcagtttttcgttgttgagcttgatagacaattcacttttaatgctttttaagttagtagtttttaccaaaacagccgctttgtcccattgcacattttctgccggtatgttgagtttggcaaaattaggcgcagtaaaattaccgttgaacttcatattggccgtaaacactatcggattaaagatgccgcgtttcagggattcgtttttctttacctcggaaatgttgttcagttcattcggaaagaagtaagcatattgtgtgaaagcccgtttctgaattgtagtcgcgccggttttggtatcggtgacgttatagttttcatacgtttgatacggaattcggagtataggtccgtagaacgtgacgtcgcttccccaaagggtagcaatttcttggtctacttcgttttttcgttctgagcgttccaaaattaaatcttgtacaaacagtagcggaatgagtaaaaagagtgttaagaatcccaccatgatcattttggcggtattggattgtaaaaatgatttcggcccgttgccttgattttcttgattttcttgattttccatgaggtagatttttaaaagtgactgtaattaaatataatgttgaggtataaaaaggcgattggaagattggctaacatgataagcattttgatggcaatttgttctcggttgtcccaatgaagcagtagctcaattatcagactgataaaagcaacggtgttgaccaataacgcgcatatcacatagcaaattccgatgtagattagagttggattaggatgaaacataaaggcgaagaacagcaaagagcctacgccaaaggagcctaaagccaagtacgtggtgaacttgctgtcgttttcagcattgttttctaaggtagtttccataattatttgatattaaaagtgttttgaatgtttttgattggcagtaacagcattttctcaaagggtaaatcgtaaaactgatgtgccgattttccgcgtcggtaaaaggtgttgaagcgtttccattgcatagggtagaagagtgttccgataacaatcacagcaaactgataagcgcttctcttgccgttacccaataaaaaatattgcattccgatttcttccgttaccgaaacaccggtattggttaggacatgaaatacatcgtgatcttccaatttgggttggatttcaaaattgtatttcaataaaaaacagcccatgtgaaagcctaaactctccggcggataacgaattaactctttagaagttatgggccagggttcgttctttttaaaaaacttttgataaggctttttgctccattcgtacattttttcgatgattaaatctctcataatttttaattaaaagtactttgaaatacaaagtaagtagataaaaaaatagggttaacttttctgtattaatttttcaagcgcttcaatgtgttcttgaaaggctttttttccggcgactgtggcgatgtagcgtgtattcggttttttaccaatgaattgtttttcaatcataatgtagttttcattttccaaggctttagtatgactggccaaattgccatcggttacgcccaataattctttgagcatgttaaaatcggcactctcattcaccattaataccgacatgatccccaaacgtattcggtgatcaaaagctttattgatattttgaatgaggtttttcaatttaataagtgtcgattatcgtgattaatagatctgaatttaccaattgtgaaggcgctactacttcttcttttaatggaatattatttccgtatcgctcctgtaaaatggcttttactttgtcgttttctaaattaaagctttctaacttttctaaattacaaagggttatacctgctgcatttttatagattttccataccagttctgaacaataaattttatcatctgaccattcaaagtaaagatcataatctttgtttttgaattggtatccgtaggatttcattttttcaatcgtattcgaatctaaaatttccgaagcgtttttcagtcgtttaacaagatagtcgttatttgctccgtgcgtaatccattccttgaaaggcgtcagttttaccggttgaacagcttcataaacgtaaggttcgccatcaattttaaaaataatgccgcaatgagaaaactttgaattggtggcaattcttactgcttcgcattgtgctgattgtgaggtttggaagatgatgtcaccgtcacgtaatgattccgcctcttttttgtctgattgggcaaaagcattttcaatcggcattgaattaaacttcaccaatgcaaaaaagacaaccagtaaacccgctatgacgacaattgcttttttcatcgcttactttctatcgtatttaaaatacataatgctaccgtataaaatattgcaaaccccaaatcctaatgcccaaaacagcaaaccatagcttaaaaaccaggttgaaagtaatccaagtaatatttgtgtaattcccagatatcgtacgtctcctagtgtatatttgctggcattcacgcaggctaatccgtaaaaaatcagtgttagcggtgcaaccaattccaatatgtttttttctatcaagaaaactataaaaaatccaccggttagcaaaggaattaaaaaattaatcaataatcgtcttgaagttggattccaaaatacttcttttccttttgacgcttttctcaaactcaaaaacagaccggttgcaatagacaaaatcataaccgaagaaccaatgatcaataatcggtaaaccgcttcaaacgaaattactaaatctttataggaaccgctagtagaagtatcaaagtagatggttttgtaggctaaccatgcgccaatcaatgaatatactcctgcgagtacacccgataaaccactcaatgacataaatcttgatgattgtgacatcatttgtttgatgtcttgtatgtcttttaaataatctttcgcttccattttaaagtactttgaaaaacaaagtaaatgaaatatttttccgtgaccaaatgttttttcaattatttttgagaaaaattagtctcatgaaaaaagtgatcttcggtggcttgttattattgacatcttttggtttttcgcaatctaatgacgaacaaatgttgcaatcgatttacaaaaccgctctaacgaattcccaatgttattcgtggttagacgatttatccaataaagtaggccaacgtttatcaggttccgaaggtgctcaaaaaggcgtactttataccagacaacaactggaagctttagggttggaccgcgtatttctacaagaggtaatggtgcctaaatgggtgagaggcgacaaggaaaccgcctatatcatcgatgctaaaactaagattaaggtaccgatttgcgctttaggcggatcgatagctacgccaaaatcaggaattacagcagaggtgattgaagtccacagcttaaaagaattagagactttaggcgaagccaatattaaaggtaagattgtttttttcaaccgtccgatggaacccgataatattgatacctttttgtcctatagtcgttgcggcgatcaaaggtatgccggtgctgccgaagcggccaaatttggtgctgttggaaccatagtacgttccctgaatttaagattagacgattttccacataccggagccaccagttatggcagtttaccaaaatcacaatatattcctgctgccgctatcagtaccaatggcgcggaattgttgagtaaaaagttgaaagaaaatccgaagttgactttcttcttcaaacaatcgtgtcaacagtttgacgatgtgctgtcgtacaatgttataggcgaaattaaaggttcagtacatccggagaaaattatggttgtcagcggtcatttggattcttgggatttagccgatggttcacacgacgatggcgccggttgtgtgcaaagtatggcggttttggaactctttaaaaaactcaattaccaacctaaaaacactatcagagtagttttgtatatgaatgaagagaatggcggtagaggtggaaaacaatatgaagcggagtccaaatgcaataatgagaaccatatttttgccgttgaaagtgatgcgggcggatttactccgagaggtttttctttagagtgtgatgatgcaaattttgctaaagtcaaaagctgggtaccgctatttgaaccttatttgattcatctttttgtaaaaggttatacgggtgccgacattcatccgttaacttcagaaaaaattgtaaaagccggtttgcgtcccgactcgcaacgttattttgaccaccatcatgcggctaacgatacttttgacgcgatcaataaacgagaattagaactgggtgccgccactatggcttccttggtgtatttgtttgaccaatacggtattgattaattgaaacctgctgaaaattacattataaatcaaccatctcttcacagagacattcttcttagtatagttgatgtgatgaaacaaactttgcccgaagctactttagagtacaaatggggtattccttatttttattacaagagaaaacctttttgttatttgaatgcgagtcacaaaaagcaatatgtagatgtaggctttgctaaaggattccaattacaaaatcacttggatcatttaatagcggataaccgcagaaatacgataaaatcgttgcgatattattctttagaatcgatagacatcaacgtgttgacacaagtaattttggaagccgaaaaattatattaaacaaaaagtcccgaatcaaattcgggactttttttatttttaattctcttttgctttgtaaatccaaccggttttggcttcgctgccgttgttgaattcgatgacataataatacgttccgtccggaaggtcatcgccattgtctgattggcctttccattcgtctttgtattggtttttgctgtaaactttcataccgtaacggttgaataaagttaagtttttcacatccaacaaacgcaaatcgaagaattcgtttttaccgtcattattaactgaaatacctttttggataccacagaaaattctatctaatgtaatcggctcgtttttccaacaaccatccggagtagttacggttaatgagaacgtaataggtaaagttggtacagatgacaaactaaataagtattctgttacattgaacgtagtagcatttgatcctaccaattgcaggttactgttgtaccaagcgtagctggcattatcagtattaaaggtgtcgttaacggctgttacttccaatgtgaaattattaccgatgcaactgccactgatttcaaaatcgaaaccactttgaacggttacggctaatgaaccgttggtggcacattggccggcattcggagcaaaattgtaagtacccgaaaccgtattatcaattacagccggagtccaagttcctgagataccttctaatgaagaagttggtaacgatggtgcactttcgcctatgcacaattgaccaataggggtgaaagtaggtgttatattaggattaaccactatagtcatagtagttgtgctggcacattgtccgccggtaggagtgaacgtataagttgtagttgccgtattgtttaaagcaggtgtccaagttccgctaatggtattgttggaagtggttggcaaagcatttaaagtaccgccgctacagataggtgaaacagctgtaaatgttggtaaagtaggaatatttacggttaccgttaaactaccgcctgtggcacattgaccggcattcggggtaaagttatacgttccgttttgtgtattgtttacagtcgatggtgcccaaacaccactaaatccttctaaagatgtagttggtaaagttactgcatcagcttgacaaataacgatattgttgaaggtggctgctacagttgcatctactacgattgtaccattggctacaacaacattacagccaccacttgtggttactgtatagttgaaagtccctgatgccgtgggtgttccactaatagtaaacactccggtagtattgtcgtatgaaccgttaattcctgcaggtaatccgcttgctgttacataggttgcattggctgccgtgtacactatattttgaatagcagtgttgatacaaacgttttgtgtattgttggccgaatctaaagtcaacgttaccgccggagttaaggttaaagttcctgaagccggagtagaagaacattctgtagaagttacactaactgcatctaaaagattccctactgatggatcaccacctgagcttgataccgatacaaatcgtaaggaatagttactgcctcctgatgttggaacagtataagttaaagtatgaaatacccaagcagcgttaccatcgttaaactgacctaaagaattgtaaggtccgccaacagggcctatttctacgcgaaccacatcattaccccagcggcctttatgtgcgaatgaaatttgcaattcggcacccgggtaagtagtgaagtcttggaaaacggtggctgttgaattcccgttgatttcaattaattgtgtgccttggtaagctactgaactttcaaatccttgaggccatacttctaaaatgccgtcagatgcattggtttcccaacatggaacatcactttcatttaacatgttagggaaggcacctgaagtagccggattttcaaaacttccgttacagaaattggtaccaataggtgttaccgttacggtataggtaccggccacgttggtagtaaaactcgccacgttaccgggatttgcaaatccggaaggtacagtccatgaatagatgtaattgcccggagtttgtggagtagcggttatggtagttgattggttgaaacagattgtttcgctgttaacagtcaccaccggtacattcggattcgttagagtaatgacttgatttgaaacaaaagtacagtaagtcgttgctaaattgaagtcagcataacttcccgcatttaaaccggttatgatgatttggccgttgttatcagaagtcaaattcaacggaccaaccggaacagtatcatcagtgtaagttagtgcataagattgattcggattaagaccgttaataacaatagttccgctgttaccgttacaagttagaggattagtgcccgaaactaatacgttggattgtgcgtttaaagtaatagtatttgcagagttgatgctgcaaccattcgccacaaacgaaaatccgttataactaccgatggtcaaacctgaaatcgtataatttcctgaagcatctgtagtgatagtgtttggtcctacggctactgtattataaaaataagtgaaattaaaagtagtattaggagctaaagcactaatggtgatactgccatctatagcactacaattggttggatttacagccgcataagttggattagcctgaagtgtgtaggttgctatgtagttagctccgttattattgattacaacagtatcatcacattgggttgtagaattgatgtctccggttacatcgtaataaacttcgattacataatttcccggagggaaagcggtcaaatcaattggcgattggctgtcatttaaaaccatttgccatttctgatcacccggactacatggaccaccgctagggaatgaaccggaaatacaatcgttgaagaaaggtaaattcaaaacggtaaaagcaccaggtgttcctgaggcaggataaatgcggtaattcattcgggcactacaaacattagccgtagcaattttgaaagtttttacttcgccacctctcaatttaaaggttcctgaattggttaaataggttccgaagtcggtgttagggaaaatattttgagctggtccgatgatagaggtccctgaaccaacagtattaaagaagttgttatcttcacaattggtcaaccaaacagcgctggcaaaacttccgaaggaacaattttgataaaccgtgattactaaagtgactggattagcacattgaccggcatccggtgtgaaagtatacgttgctgtttgtgtattatctaccaaagcaggagaccaagtaccggtaataccattcaatgatgttgttggtaacgttggtgctgaatcaccactacaaattggtgcaggtgacaagaatgtaggggtaataatcggattgaccactatattttgggtcacgctcaaagcacattggtttgcatccggtgtgaaagtgtaattggccgattgtgtgttgctgactgttgaaggcgtccaagttccgttgatgttattgttagaaaccaatggtaaaaccggagctgtatctccattacaaaaaggagcaatagcagcaaaggttggtgtaacattggtgtttatggcaacattgatggtcaaaggcgaagaacatgacgtagcctcaggggtgaaggtgcaagaacctgtttggttattattgatggttgatggcgtccaagtcccattgatgccattattcgaggttgtgggtagtattgctaccgtagctccttcacagtaaggaccaaaagtgtcaaatgtaggcggtatattatcattaaccactatagttacgctatctgttacgtcttgcggacacacggtattaccgtcagttgaagtcgctgtgatggtataagtgcctgctgctgtcggtgtaaaggtcaccgtagcacctgaagtagcactcaagcctgtggttgcaggtgtaaccacccaattgtaatttccgtttccgcccgttgaatttaatgtcaccgtttctcctaaacaaatttcactatcagaggctgtggtggttacttgtgtttgaataccggtattggcagcaatcacataatcacaaacatctcctccataaccatctatcataatgtaataagtgtttccgattactaaaccgttggcagagatattagtagaaccatttggtactatccccggactccagcatgttaaattgttgacagcaccggagcagttggtagcgctgaaaatcatgatttgaattccgctgttatcttgagaacttgttacccaaacgtcaaatgaaatggtagttgatgtagctacaaaggtcaaaaacgagttattttcaatcgaaccacaaaaagtactgttcaattgtgaccaataatcggcggtataagtagatgaagtactaccacaatatccgttaaggttacaaattggagtggcagtttgacaagtgtttccagccggttggttgttgatacagttaggaggcggaacaggagtaccaacacaaacattaaaggttgatgtttgattggtcgtagaagtataagtgtaaactctgatgtagtaaacctgtccaatggttaaattacttgcagtactggactccggatcactacaatacaattgtgttaaggcaccgcaacttccggtatataacacatgaaacaaatcagatgtactgccggtgatgtttaacaatgagataatgtgttgagtactagtagcagtaaatttaaaccacacatcatcgtcgtctgttccgccacaagtattggcttgagcagaagccgttgcccctaaaacacttcccggtgtaactaatgagcaggttgtcgttgtatttactggtacattaacagcattgatacattcatcgttagctattaaagttgtgaaagtaatcttattagaccaaaagcttatgtcagatgcactacaaatggctcttacataaacatcataagaagttgcagaattcagacctgcagcaatgtagggatttgaagtagttattattcctgttgcagaaggtagtggtgctgttgaaccggcaggtaatataagaacttcccatgaggttgctgttcctacttcagtccaatttactgtagctccattttgtccgatattggttatattcactgcagtcggtttaggacatgttggtggcggaccacaaataatattagcgtcccagccggttgaagtaatacttgtatcagaagtaaatacaaaagttaaacagccattaaccgcactggacgtaaatgatggcggaatagttgttccggtaaagtttcctaataatgttcccgttgcactgtttccatcatatattttcaggaaatcatagttgttttccaagttaaaagtgttgaagattacggtgacttgatctccgggtgtgttggggcaaattacagtagtaacattggcactgttattataagcgccggtggcaccaccggtatcataaaaatggttcccgccacaataattcgctgctgtggaaaataagaaaggtcctgcccaagcactgaaggttccgttaccacagttggctctaacatagaattggtaattagtacccgaagttagacccgttgctggataattagtattcacattggtttgtactcctgatcctgtcggtatagccgaaccggctgtttgaacagcaatttcccaagaggtagcaccgccgggattagcccagcttaaattggctgaagtttgactgatacctgaagcacttaatgtggttggtggtggacagttaacggcttgtaaggttaaggtgtaccctgtggtttgaggagtcgcccaagttgaaattacaatgtaataggttgttcctgccgtcacggttaaatcgaatgttcttacacctgttccggaattgccgacaccggctacacaattaacaccaatattggcacaactgttatacacaaatattcccgaaaaagtagccgttggtgtcatactaacatttactacaccattggcgacagctgtataggaatatactacgtcattaccattcaagtaactattggtggcaccgcaagatgtgccgggcactccttcaatggctgtattgtcactgtagtttgaagtgttatctgttgtagtgtacggtaatgtcgtgataactataggcgcactacaactcaaccccggtgaagaagtagaaaatgcaaatgggcctacccattgactactggctccgttagcacacaaagcacgaacataatatttgtaattggtagttggcgtaaaggctacacctgttgcggttgcagtcgcagtatacggaggaagtccgttgtacactactccggttccggttggggtattggcaaaaggcaatacttcaatctcccaagagttagcaccactggtattggtccaagttaagttagctgaggtttgcgtaatggcattagcacccaaattcgttggatctaaacattgttctactatacaaacattgtcaaccaaccaacggtcaccgtctaaaacacctagtggttgtgtataaacttttacaaacgacacatacacttgttgtccggcataagcagcaagactcactactttttcttcgtaaatattataggtagccgttaaagttgtttcatcccattgctgtactaaagtatacgctgcaggattggtttgtgaagcagtagcgggagcgaccttaatttgataaagtgttccttgatttccggtggtaaaacttcgggtgtaaaaacgaagttgaccattcgtaggaatggtcaccaatggggttgccaagtaatcctcggaagtattgttctgtccgatgttttcacgatttacataggccgcgttagtgccttgataaacaatcggaggtgttggaggcgtaactgtggtagagttgattccccatcgttgaacggttcctacaccgttatcaaaaacggcccagtttcccgttcctaaagtccaggttgtagaaggaagtgcagtcggaccggttgttgattcgaatccttccagagccatttgtgagtagccacaaattgacattaaagaagtcaatactaaaattgtaatttttttcataatgtgtggtatttggtcggtggtaatagagggtaggggaatcagactttaaaaatgccccctatggtaacaattctttgtaaaaagaagaaatgttgggaagcccggtctgcactactgtgtgtggttctgatgtcattcatgtcgatgtaaccacctttaaattcagtctgcaaaaagaagtgtttgaagaaagtaaaattcaatcctactttggcagaaacaccatacccggcaatgtgaaaatcgtcatgacgttcttttcccatcagcatagcatttgttttcgggtataagattccggcgccaacaccttctgtgacattgatttggaatatatctgtattgtttattttaaataatttagaaatatcgtcaacacgactgaattcagtattgatgtaatttaacccatcggtgtgttcgaaagtcaagaaattttcggtaaggactattggatcattgttgtaagtaccgtcaaaagggccgccctcattgatggttccgttgatggtaacggtttgattttggttcatcacatatttcatgtggtcaacaccgatagaaatgttgtagtgatcggaaataaaatagccaattcgcaaattcgtttgaggaatggtcattcttgccggattaaagtaatctatgtgccaccctttaggcttatcattggctgaaacatcgtttagggtaaaattgtaattttctcctttaaaatgtatatcggatttggagaagctttcacgttttccaccccagaaaatgtacatttttcctttgttgtgagcggtatatttacttgggttgacttgttggtcttgggctgatacaggttgcgataaggcacagaaagtcagtaatgaaattaaaaataaatttttcaaggctttgggtaattaaattagaaagcgttaatggtttttcggatagccaccaaacgcgtcatcaagttttcaaaataatctaaatgtaacatgttggcaccatcgcttttagcattggcaggatcgaaatgggtttcgataaaaatcccgtcaactcctacagcaattccggctttggcgatagtttctatcatatccggtcttcctcccgttactcctgcggtttgattaggttgttgaagcgaatgcgtaacatctaaaactgtagtggcatattgttgcatagttggaatacctctgaaatccactatcatatcttggtagccaaacatggtccctctatcggttaccattacgttttcgttatggcaatctaagactttttgtaccgcgtgtttcatgctttccggactcatgaactgtccttttttcaagttaactgtttttccggttttggcggcagctacaaccaaatcggtttgtctgaccaaaaaggcaggaatttgtaatacatctacatattgagcggctctgtcggcatcttcattggtgtggatgtcggttaccgttggaatgtgaaatgtttcagaaacttttcgaagtatttttaaagctttttcatctcctataccggagaaactgtcaattcgggagcgattggcttttttaaacgagcctttaaaaacataagggatggctaacttatcggtgattgcaactaatttttcggcaattcgtaatgccatttcttcgccttcaatggcacatggaccggctagcacaaagaaatttccactatcagtatttttgatttgtggaagggtattaatattcataaaatatgggtttttaaaaaccgctaagttatgaataatttacttactttgagcagataattttaggacttattttttgatactcaggcctacaggaactaataaatagcctcgttcgtaaatgtttaaatacaattttacgggacttgtttggccttcccaatgcaattcgtacacgtctaaaaatcctgcccccatttcacttcttttagagggaaaaggacaacaactttcaattttagtaaatgtgattttttcaccgttcggaccggccaaagcatttaagaatcgctcggcattgagattttcatctttggcatttttgaaaaaaacattgattggataatccgggtcgtaaccgtattttttatctttactgtattccgtcagcacaaacgtattgtttttggtcagcaccggtataggagcgttatcgtctacattttttaaagtggatttggtactgatgcaagaagcaaacaaaaccaaaacggccatcagcgatgaaattttatagaatcttttcataataaaaatgtttttaaaaccgtttgcaagaaccgtgcaattattttttggttcgcaaaaagaatgcggcaatggcacctgaaatggttcccatagacaaggcactaaacacactctgaatcataaaactattcaaattgaagtaggctagggcatctttcacggtgatgtgatgggttagtaacggacttttagttttgtattcgataatcgtttcaaaaaaatgcggtgtgatgcttttgtaaatcaccaattgtgctatcggcattagtatcgctacaaaaaaagataaaacaacgccacttataaagccttgtgaccaggtcatttgatggttaaagaagtatttcttcttttccgccaaagccaagaaataaaataacaaagccggaattccgaagagattagtgtaaacagcgtattgattgatgtgttggtcatgcagtcccataaatttttcaacaatagcccaagccaaaaccaacaatataaagcgcaaggtccactttatttcaatgctgaaatttttcatatcaaagtcgaatttgatttcaaaagtacttcatttcgataaaatttcatctttccgacatttatatttctatttttgcgtaaaaatgagcaaatatggaatttatcagtcaaacttggcattgggccatttccggttttttgattggaatggtgatgctgacactcaattattttggtaaagttttcggaatgtcctccaatttaaggtcgctttgtgccatgaccggcataggtaaaaaagtcccttttttcgattgggattggaagtcacaacgttggaatttagctgtagtagccggcgctatgataggtggttttgtagctgtacattttatgagtgacacttcgaatgttactttgaatccgaaaacggttgagcaattagccactttaaatattgaagcaccaaacggaaatttactgcctgaatctgtttttggtacagcagctttacaatcgcctaaaatgatttttatattactgctgggtggcgttctgattggtttcggatctcgctatgctggtggctgtacttccggtcatgccatatccggtttgagcaatttgcagttaccttctctaaaagcggttattggtttctttatcggcggattgttgatggctcattatattttacccttaattttctaagctatgaatttattgagatatataatagttggttttattttcggaatagtgttaacaaaggccgaagccgtttcttggtaccgaatttatgaaatgttccaatttcaatcgtttcatatgtatggcattattactgtggcaattctcacaggattggtgggcattcaaattattaaaagaaaacaattgaaagacattgatggtaatcctattgttatccaagacaaagaaaaaggaagcatgcgttattggataggcggcatccttttcggattgggctgggctatggttggtgcttgtccggggccgatttttatccttttgggttctggatttatgagtgtcggattgatattattcggagcagttttcggtacttttttgtacggtttagtcaaagacaaattaccgcactaatcggattcacatccataaagcaaaagacaagattgggtttaaacagattttttggtcacacatcgacaatttgaccattggcatacaagttattattacatttaaaataacaaacaactcaaaaaacaatcttgttgataccataactaaccctgttatcttatcaactttgccacctctttcttcggaatcaggtggtttttttaatcggccaagcggcgtagtttgtttctgtctgttattttgatgcgtttgccgtcgagttctatcagtccggctttgttgagttcagatagtaatcttatacaactttccgtcgctgttccaatcattccggccaattcttcacgagagagttgtaatttcaagcaaccatcttctgtttttccgaagttttcttccaagtatattaaggtttccgctaaccgctctttaacgcttttttgtgccatagaaaccatgtgatcgtctgcttctttcaaatctccgcaaatggttttcatcacattcatggagaagttattgttttgattgaagaactgcatgatttctgttttcggaataaagcacacttccatatcttctaaagcaacagcacttaagttggtcggttcttcgctaatcatggaacgctgtcctaataattcgcccggtttgaccaatttgacaatttggtctttaccgttggcgctaagtttggtcattttgcaaacgccgtctttaacacaataaataccgtgagttgtttcgccttcttcaaatataacttctccctttttaatggtataagaggttttgcaatcggccattcgtagcaactcatccttgcttaaggcttttagcgaactgaattgtctaacgatacattgttcacatttactcatggtactctttattggttactacaaatatatttaaagtatgacaaatatcatattttaattttcatacttaagtgacctttgttacaggtaaaatgagcaaattaaaaagtatgaatccatcacagtgtttccattgtggtaatgagattgtaaaaaaagacgaaatcttatttgacgacaaacatttttgttgtaacggttgtaaaacggtttatgaaatattcagtcagaatgatttgtcttgttattacgattttcaggcagcgccgggcgctacaccaccagatattaagggcaaatatgattttttagccaatgaagaaattgttactaaactcctcgatttccaagaaagtacaacagccattgtttcattgtacattcctcatatacactgtagctcgtgtatttggattttggagaatttacaaaggcttcagccgggaataatagcctctcaagttaatttccccaataagaaagtccgcattacctatcatcctgaaagaaccaacctcaaagagattgttgaattgctttgtgccattggttacgaaccctatatcagtttagaaaattataccgaaggcaaaaagaaagtcgatcgcaccttaatttataaattaggagtagcgtttttctgtttcggcaatatcatgttgttgtcgtttccggagtattttgaggtcggcgaattttggattgaacaatacaaaggctttttccgatggttgatttttgctttgtctttaccggcttttgtttattcggcctcgggatattatgtagcagcttggaaaagcatgaaacaaggcttactcaatattgagattccgattgctttaggtatagtggtgatgtttatccgcagcacggttgatatcgctttcgattacggtcagggttttttcgacagtatgtgcggcttgattttctttatgttattggggaaattattccagcaaaaaacctacgatttcttatcatttgaacgcgattataagtcttattttcctattgctatcaccaaagtattgcccgatggttgcgaagaagccgtgcaggtttacgatattaaaaaaggagaccgattgctcatcagaaaccaagagttgatcccggttgacgggattttgatatccgaaaaagcgtctgtagactatagttttgtcaccggtgaagcggtaccggttgagaaaaaatcgggcgataaaatttttgccggtggaaagcaattggggaaagtcatcgaaatggaagtcttgttctccgtttctcaaagttatctaacccaattatggagcaatgatgttttccaaaaacgcgtggctcaaaagcacaaatccattaccgataccatcagtcattattttactccggctttgttattactgtctgttgtatcttttgtgtattggatttttattgatgtttccaccgcttttaatgtatttaccgctattttaattgtggcttgtccttgtgcgttggctttaacggcaccttttactttaggtaacgtattgcgcattatggggaaccgaaaattatacctcaaaaatgccatcgttattgaacaattggccaaagtagacaccatcgtttttgataaaaccggaaccattaccaccaataaaaaaacagccatcacttacgaaggagaagcgttaaatgagttcgaattgcgactcctgaaaaatgccctcagaggttcgaatcacccgttgagtcgccgattgtacgattttattccgccacaggaaaagttggaagtgaaacattttgaagaagttatcggaaaaggtgtttttgccgaattggaggccggaaccgtaaaattagggtcttcccaattcttgcaacacatgagcgagaatacccataaaaagaccaaagtacacgttgaaattaatggcgtttataaaggcagatatgtctttaataaccaaaaccgacaaggcttggagcaattgtttgaagcattggcaaaaaagtaccaattggtagtattgtcgggtgataacgacggagagcgttggattttagaaaagatgttgccgtccggaacacagttggtcttcaatcaaaaaccggaacaaaagttggcttatatcgatgctttacaacaacaaggtaaaaacgtaatgatgataggcgatgggttaaacgatgccggtgctttggcgcaaagtaatgttggtatttccatttcagaaaatgtcaacgtattctctccggcttgtgacggtattttagacgcgagtcagtttcacaagattgctttcttcttaatgtattctaaaaacgcaatgctgacgatttatatgagtttcggcttgtcattactctataatgtagtcggtttgagttatgccgtaaccggaaatttattgcctatagtagcggctatcatcatgccgttgagcactataactattgtgagttttgtaacggtaatgagcaatctttttgctactaagaaataataactgaagtatgacaaatgtcatattttaacccataggctaaaagtaactttgtctaacacaaattagaggtatgagtgtcatttatatgttaatctcgataagtattgttgttgctgtattctttctctacgcttttattaaagcggtaagaggcggacaatatgacgacgattatacgccatccgtcagaatgctatttgacgacgagctagtaaaggaaactaacaaaaatcaaattaatataaccgaagaaaaacaattataattatggaaatgcaacaatttcagtatgacaacaaaattgtaaggaacttcatttacgccagtatcgtttttggtgtagtaggtatgttagttgggttaatattagcatttatgtttttatttcccaatgtaaccagtggaatttccttcttaagttttggacgcctcagaccgctacacaccaatgcggtaattttcgcttttgtgggtaatgccatgtttgccggagtgtattattctatgcaacgcttgctcaaagccagaatgttcagtgattttttaagcaaactgcacttttggggatggcaattgattattgtagccgctgcagtaaccctgccgttaggatacactacttctaaagaatatgccgagttagaatggccaattgatattgctattgctttaatttgggtagtgtttgggatcaacatgatcggaaccatcatcaaaagaagagagcgtcatatttatgtggccatttggttctatattgctactttcgttacggtagccgtacttcatattttcaatagtttagaattgccggtttctttttccggtatgaaatcatattccgtttacgccggtgtgcaagatgctttagtacaatggtggtacggtcacaatgcggtggcattcttcttgactacaccgtttttaggaatgatgtactactttgtgccgaaagccgctaaccgtccggtatattcttatcgcttatctatcattcacttttggtcattaatctttatttatatctgggcaggaccacaccacttgttgtattctgctttaccggattgggcgcaaaatttaggcgttgttttctctgtaatgttgattgcaccgtcttggggtggtatgattaatggtttgttaaccctacgcggggtttgggataaagtacgtaccgatgctgtattgaaattctacgtagtagcgattaccggttatggtatggcgacttttgaaggaccaatgttgtctttgaaaaacgtaaacgctattgcgcattttaccgactggattattgctcacgtacacgttggtgctttggcttggaacggattcttgtctttcggtatgatttactggttgatcccaagaatgactaaatctaagctatattctgaaaaattagccaacttccacttctggattggtacattagggattatcttatatgcacttcctatgtatgtggccggatttactcaggcttctatgtggaaacaattcaaaccggatggtactttacaatatggtaacttcttagaaacggtaactcaaatcatcccgatgtattggatgcgtgccataggtggtactttatatttggttggggttttggtattggtttacaacattgttaaaaccatcaaacaaggtgccgcaattgaagatgacgcagcggaagctccggctttagcagtgatcagtccgaatcgtttgaaaggtgaaaaatggcactcttggttagaaagaaaaccggtgcagttcatgttgtacactacagtagccattttaattggtggtgctgttcaaattttaccaactattttggtgaaatctaatattccaaccataactgctgttaaaccttatacaccgttggaattacaaggtagagatttatacatccgtgaaggttgtgtgagttgccactctcagttaatcagacctttccgttcagaagttgaacgttacggcgactattctaaatcaggtgaatatgtatacgatcatccattcctttggggttctaaacgtaccggtccggatttagcacgcgaaggtgttccgggaagaccgttcaacggaggtagagatgacatttggcactttaaccacatgtacgatccgcaaagtatttctccgggatctgtaatgccgagataccaatggttgattaaaaatactattgataactctactatacaagataagatgagaacaatggtaactttaggtgtaccatataccgatcaggaaattgccgatgctatgcaatcaatcgatgcgcagtcttctaaaattgaagccaaattgttaacaaatcctgacatcaaaaaagctttcggaagcgatacagcagctccgttaaaagacagagaaattgtagccttgattgcttatttgcaaagattaggaaccgatacccaagttaaatctaaacaataacagtcatgttaaagtttgtcaaacacaatttggaaacgattaccggcgtagaaatctacccgataatctcactgactattttctttactgcttttgtcttgttcaccgtttgggcgatgacctatagtaaagaaaccatcaaaaaagtgagtgatcttcctttagaagactaaataatgacctttaaatagtaaaaaaatgaaaaaattatttccatcatacgtaagagttccactgatttttgccatcgttatggcagctttggaatattttattgactcaggtgatcgtccggcttttgttaagcatcctatggttgccttattcttagtggttttcctctttttgttggtagccattgaagttgtaattagcgcagtggatagggtaacttaccacatgttgactgatgagcaaagaaaacaattggaagaagcgcagtcagtttctttcaccgaaagcaaatgggtgcaaaacataatgaaatctatgacgcgctctaaatcaatcgaacaagaagctgatgtgatgttagatcacgattacgacggtatcaaagagttggacaacgttttaccgccttggtgggtgaatttgttttatgcaacgattattttcggggtaatttatttggtacgattccacatagtaggtgattacaaccaagaccaggaatttgatcaggaagtagctgcagctcagttggaaattgaaaaaaacaaagccaattctcctaaagaagaaattaccttcgataaagttactttgttaaccgatgccgaaagtttggccaaagggaaagaaattttcaccaatgcttgtgctgcttgtcacaaagcagacggcggtggcgtagtggggcctaacttaaccgatgaatattggattaatggcggcggtattaaaaatgtattcaagttgatagccgaaggaagtaaaaacaatccaaccatggtaggttgggcaaaaacactcggaactaccgaagtacaaaaagtagccagttatgtgttgagcttacaaggcactaaaccggcaggaggaaaagcacctgaaggagaaaaatgggttgaagaagctgcaccggcagaaagcgcacctgctgcaactgatactaccgcagtagcggcaaaataataatcaaaggaaaggttttgggtgatgactcaaaacctttctaaatctttagaattagcaatttaattcaattcacaatggcaacaaatcttcctgatgatagttttagagatagtatttccactatcgacgaaaagggaaaaagagtgtttattcactccaaaaaaccttcagggcctttttatgataagcgaaaaatattgagttattttttattggcttttttattttctgcgcctttcataaaaatcaacggcaaccaatttttaatgtttaatgtcttagaaaggcgttttaatattttcagttttccgttttggccacaagatttccacttgtttgtaatctcaatgattattggtgttgtaggtttggcattgtttaccgtggctttcgggcgtattttttgtggttggttttgtccgcaaaccatttttatggaaatggtgtttcgccgaattgaattctggattgacggcgacagagcccaacaaattcgtttgagcaatcaggcttgggatggtgaaaaaattagaaaaagagtcaccaaatggattgtgttttttattatctcttttattattgcgaacgtctttttggcttatttaattggaagtgatgagttgatccgatttatagaagaagggccggctaaaaataccagtacattaattgcattgttaatttttacaggcgttttctacttcatctacgcttggtttagagagcaagtttgtattatagcttgtccttacggcagaatgcaaggtgttttgttagacaacaaaaccatcaatgtggcttatgatcacgttcgtggagaaggggaaagcggtagagccaaattcaacaaaaacgaagaccgaaaagccctaggaaaaggcgattgtattgattgtaaagtttgtgtacacgtttgtcctaccggaattgacattcgaaacggaacccaattggaatgcattaactgtacggcttgtatagacgaatgcgactccatcatggaaaaggtaggtttgcctaaaggtttgattcgctatgccagtgaagacgagattgtgaaaaaagaacctttcaaattaaccaccagaatgaaaggttacatagcggttttatctattttgattggcgtgtttatcggaatgttgttcttaagaaatgatgtagaagctaccatattgcacatgccgggacaattgtttcagcgtgaaggcaataatgtaatcagtaacatttacaattacgatatcattaataaaacggagcgtgaatttgaaaatgtgacgtttaaattagttgaaccaaaaggcgaaattaaattggttggtagtccatttgccaaagtaccgaaacaaggcgcaaccaaaggaactttctttgtgaaaatcaaggagagcgatttgaaagaagaaaaagtagtcttaaaaattgaagtttataataacggtaaagtcattgaaaccgctacgaccaacttcttaggaccacgaaattttaactaaaacgaatgattatgaaaatcaattggggaaaaggaattgttatagcttttgtgttgttcatgagctttatactgtattttgtaatcaaagtacaatccgatgacaagtacgacaacgaattggtcactcaagaatattataaaaaagagaaactggttcaaggcaatattgaaagtattcaaaacaccaatagcttagaaggcaaagttaccattgccaaatcagcagaaggtttagtggtaagctttccgagtaccttggatccgaaattaataaaaggaaaagtatccctatacagaccgtccaaccaaaaactggattttgagactctcatctcattgtccggttccgatttgctcatacctaaaaacaatctggttggcggtctatggggtattactgtttcctgggaatacaaaggtaaaacgtatttgaacaaagaagaaatttatttctaatatctaatatctaatatctaatatctaatatcaatatgttatacacagccatcatattcggtttaatctccagtttgcactgtataggtatgtgcggaccgattgctatgatgttgccggtagatcataaaaacccgtctaaaaaagcccttcaagtgctgatttatcacatggggagattaacttcttatggtattttaggattggctttcggcttgttgggtagaggattttatatggccggtattcaacaacaattatctattgcggttggcgttgggatgatagttcttgcagtagtaccggaaaaaatattggctaattataacttttccaaacccgtttaccgtttgattaccaaaattaaaagcagtttaggcgcacagttcaagcgtaaaacaccggatgcgtttttcacgatcggtctttttaacggcttactgccttgcggattggtttacgcggccttattcggtgccatcgctatgcaaaatgtaacattgggcattgcttatatgattttatacggattaggtactattccgatgatgagcgccgtagtttacgtgagttcattattatctatgccgttcagaagccaactgcaaagagcggtcccgattgttaccgttgtgataggcgtgttgtttgtattgcgcgggatgggattggatattgcttacatttctcccagcaatttgaatctgtttgtgcaagccaacgctaattgtcattaaattaaataacccttttcataacaattataaactaaacacatggaaaaacacgatttattacacgagtttcctcaataccaggaaaaaatacacgaactgaaagtgtcagatgctcatttcagaaagttgtttgatgagtatcacgaaactgagcatcagattcacagaattaatatgggttctgaagtagccaatgataattttttacacgaattgaaaaccaaattattgtcccttaaagacgaattatacgcccttttgaataaatagtaattgagttaattgatgtaaaaaccacgccgccaagcgtggtttttttatagtatcagttagttagccgtcacgattttaaaatagggagtgggacaaaaaaagaaaccgcctttaaaaggcggttttctaccaaaaaacatgaacactatcttccattgcccaatattggaaaatagtataaggtatatattgttatgctacttcttgtataagtttactattgatatattctatcatatctgttttgtttagttcaaagttaatgttgtaaatatcttttagattcatctcataaacatttgctgctattttgttttgtgtaactcccaaaaataatcgtattcctttgtatgacgagtgtatttttgaaaacaactttaattctgtatgtcttcaaactaaagtggacttttcctaagagagtatttagttaataattcaaagataaatgtttgttttgatttgttgttaattttattttttggtactcatttctgcggttaataattgc

SEQ ID NO: 7 - DNA, 105631 bp, Sphaerospermopsis sp. LEGE 00249
  LEGE00249_16
ggggactggggactggggaaaaatatttcccttctgccttctgactcctgactcctaatctaaaatctaaaatctaaaatctaaaatctaaaatctaaaatcaaactatgtgggttattttgagtggaattgaaggtaatttagcagcttatgaagctgtgatggctgatattaagcgtcaacgttatgtagatgctttatatattttgggtgatttagttggaccaactaaagaatctgaacaactggtagaaagggtaaaatctccccgtcgtggtgagttagaaccaatgatttgtaaaggttggtgggaagaacaatgtttaaatttacatggtttaggaccctctggggatagtcctgagttattagcaaaatatgggggtgatgcagtcaagatgttatgggactgtgtttctcgttcaactgtacaatggttgagaagtttggattttggtttttttgaattagattgtttattaattcatggttcatctcttggtgtgagtgatgaactgactccagaaactgccccggttcaaatgttagatagactctcaagaatgcaagcaaataatttgttttgtggtcgttctggtttaacttttcaatatcagttacaagggggttctgttatgagtgaaattaccactcttgacagtaaaatttctccgcaaacggtaacagtttcaccccgtcaagtgattggtgtgggaaatgtgggacgtattcctggtcaagcaacttatactctttataatcctaacaataatcaagtggaatttaaaactgtttattatgggaataaaaaaggatttcaaggggatgagagcaaataatttcaaaaagaatttcaaaaataatttaaatctggtgtttaattcccaaattttatatcgctctagtaggttgggttgatgcaacgaagataaattttaagctatactgaaaacattccatagtttttacaaaaccatgatccaagaactcgaaggcatatttgatggtacagccctgcaactagaagcacctttaaatctagcagtaggtacgagggtgcggattattgttgaaactattttacccaacgaacaaaaacaacctaaaacctttcttcaaactgctcaatctttgcagttgcaaggtgaaccagattggtcagaaaaaattgaccagtatttgtatgaagaaacggtttctgttcatgattgaggtttttttagatacttcttttgctattgctttatcttctcttacagatcaaaatcatctcatggctgtgcaaattgccaatcagcttgaggctaacaaaactcgtttagtaaccactcaaccaatattactagaaattggtaatgcactttctaaacaaaaatacagaatagcggccattcaacttttggaatctctcgaagctgatcctaatattgaagtagtgttattaacgaaggagttatatacagcggcatttaatttgttcaaacaacgagaagataaagaatggggtttggttgattgcatatcgttcattgtgatgcagaatcgaggaattactgatgcactaactgctgatatccattttcatcaggcagggtttcgagcattattaagaaactaacaatttacaatacctttacatccatcagcctaacaaatcaattgaaaaatttgatctgcacagaaaacctaaatgttcacttaaatcaacatccctgcaataccagcagtaataaaacctgaaagtaatcccccaatcatagatttaacacccatccgcgctaaatcatgttgacgcttaggagccataccagtcatactaccaatagtaatcccaattgtgccaatattagcaaaattacataaagcataagtagcaataattatagaacgttgggaaatttgctcttgcttaatcagttcacttaaatctaaatatgccaaaaattcatttaaaatcgtctttttccccaataaagccccgattttaccacaatcagcccaaggtatacccatcaaccaagcaacgggaaacataataaaagataacatccattctaaggataattgcggtaaacctacaagcgttcccaaccatcctaacaaggcatttacagcagccagtaaacccaaaaaggcaataatcattacacccacattcaccgctaacttaacaccatcaagcgccccagtggttgctgcgtcaatgacattgacagaattactctttgtttccacattgactttaccagcagtttccgatacttctgtttctggatagattaactttgatactatcaaagaagtaggagcagtcataaaaaaagcagctactaaatgttctgcgggaataccgaaagaaaggtaagcacccagtacaccaccggcgatagtcgcaaaaccaccagtcatcaccgcaaatagttctgattgagtcatgtttgctacataaggcttaaccattaacgccgcttctgtcggacctaaaaagatattaccagcgcaggataaagattcagaacccgatgttttcatggttttcatcattacccaggccaaggtactgactaccctctgtaaaataccatagtgatataaaacaccaatgaatgaagagaaaaagatgatcgttggtaaaacttgaaaagcaaaaaaatgatctttgaaattttcaccaaagacaaatttagcaccgacatcagaaaaagctaagaaattaccgataatatcccccaaagatttaaagacttttaaaccccaagaagttttaagaattaccaatgctaaaataaattctaaacccaaaccccaagcaattgttcgccaacgcacagcatgacggttaacagaaattgcataggatataccaataaatactaaaataccaagtgccgaaataaccctttccatgttgattcctaaataacattcataaaaatagtaatctttttaacgctttaaaactcaatataagaaaatcttgtgttatgagactatttgcgctatcatgagaatgattcttattgctgctaggctgtaaaaataaatcacaagtaaattattagacattacaaaaaatagtacaaatataaccaagtattaattatgtccttaaaaacaaagatacagggtgagtttgagcagatttgggaggggatgttgtcagattatgtaacagcgatcgcctggtcatcccaaggtaaaattctggcagcgagttcagcagcaggagaagtagttttataccgtagtccagaacagcaattagttaaatatttagttaaatatttagtcaaatatttacaaacctctgacggagaatctataaatagcctggttttttccaaagatggacaatttttagccgcaggtggacaaaatggccaagtaaaaatttggcgtttacagtcagaggaagcagaactaatcacagttctagaaaataaccgtacctgggtagaccgcatggactggagtcccaccaaaaatcaactagcttttagctgtggtcgctatgtccaggtatggaacgcagacacaggtaacatagaaaccaccctgaattttgatacctcctctgtccaacatattacttggcatcccaatggtgaaagtttagccattgcgggttatcagagtgtgaaattttggatgtccgcaaattgggatgatgacccttctgttataccagtagattcaaccagtttggtgatactgtggtcaacagatggtaaatatattgcttctgggaatatggatcgctcgatcacggttttggagtggaatgacccaaatccttgggtaatgcgtggttttcctggtaaagttcgcaatttagcatggtcagatacatcgacaaaatcaggcgcacctttattagctgcttccagtgtagaagggatagtaatctgggaaaaaaatgctgataactgggatagtagagtattacccagacatgaaggtaatatcctatcaattcaatttcaacccaatacccatttattagcttctgcttctgaagatggtagcgtttgtttatggaatcaaagtaaacgattgctacaagttctttatggtgctaacaacggattttcctgcctttcttggcatcctcatgaatctaaattagcagctggaggtaagaacggtgaattaattatttggtcaccaggcagcaggggtcaaggtttcggtaggcgataatcagggacattgacaatcccctgcctaaaggcctacggtgtacacacaagtggtatctgcaagggtttcaggcgttatagacccctgaaattgtcattacgagcgcaagtaatcacataatcctgtggtttttgcgatcgcttcgttattcctcctctgtgggatactcaaataaatctcaaattacgcttcaactcttgtcatcaatttattcaattttgaaaaatattaatgcggatggcgagactcgaactcgcaaggcaaagccacacgcacctcaagcgtgcgcgtataccaattccgccacatccgcacggttgcctagaaaactactatagcataaaaaatcaataatgaaagatattttccaaaattttttccaaatgttttaatcagggaatgggtaattggtaatgggtaattagcccggatttctcagcaaaatcctcaaacccttataaaatatggattctgggtttttacactgcgtcaaaaatcaacccggtgaaaaataccagaaaccgttttcctataaggattatatagattgtgatcgcattgtttgtgagaaatgcgggattaggtgattcatattcccagtcaccaatcaccaatcaccaatcacctatcaccagtcaccaatcaccagtcacctgataaatttatgagaatttacagtaatgcgacagctttatttgaatgagatgggagaaaatgtcaatctactggtactaatatcacagctagaaaatgaagtttgacaaaattttaattgctaatcggggagaaatagctcttcgcattctccgcgcttgtgaagaaatgggaatttctacagttgctattcactctactgttgaccgaaatgctttgcacgtacaactagctgatgaagcggtttgtattggcgaaccagcaagcggtaaaagttatctgaatattcccaatattattgcggctgcgttaacacgcggtgctactgcgattcatcctggttatgggtttttggcggaaaatgccagatttgcggaaatttgtgcagatcatcaaattgcctttattggacccactcccgaagcaattcgcttaatgggggataagtctactgctaaagaaaccatgcaaaaagccggagttcccacagtacccggaagtgatgggttagtagagacagaagccgaaggattagcgatcgccaaagaaatcggctaccctgtcatgattaaagccaccgctggcggtggaggtcggggaatgcggcttgtccgttcccaagatgaatttgtcaaacttttccatgcagcccaaggagaagcaggagcagcttttggtaatgctggcgtttatatagaaaaatttatcgagcgtccgcgccatatagaatttcaaatattagcggataactacggtaatgtaattcatttaggtgaaagagactgttccattcaacgccgtaaccaaaagttgttagaagaagctcccagtcccgcccttgaccaagaactgcgagaaaaaatgggacaagcagccgtcagagccgcccagtttatcaactacactggtgcaggaactatagaatttctcctcgataaatctggtcatttctacttcatggaaatgaacacccgtatccaagttgagcatccagtcacagaaatggtaacgggtgtagacctgctagtagaacaaattcgcattgcccaaggtgaaagactcaaattaacccaagaccaggtaattttaaggggtcatgccatagaatgccgtatcaacgccgaagatccagatcatgattttcgtccagcacccggtaaaattagcggttatctcccaccaggaggcccaggagtaagaattgattcccatgtatacacagattaccaaattcccccttattacgactctctcatcggtaagttaatagtttggggacccgaccgcgccacagctattaaccgaatgaaacgggcattaagagagtgtgcaatcactggactacctacaactatcccctttcatcaaaaaatcatggaaaacccgcaatttttacaaggtcaagtttataccagctttatccaggatatgaaattacagtgattagggaacagggaacagggaacagggaacagggaatagggaatagggaatagggaatagggaatagggaataggaaaatgcaaaagttacaattttcatttctcctgcctcctgcctcctgcctcctaactaacacgcgccatcatggttagtaatccttgctgacccaataaaatttccctaactaagctgaaaatacccacccaaataatcggagtgatatcaaccccaccaataggaggtactacctttcttaacagcattaaaaatggttcagttggccaagaaatgagattaaaaggtaaacggttaagatttgcttgaggataccaagtgagaataatgcggaaaataaacaaaaaaatcatcacacccaacaagggtccaagaatccaagtagttaagttaacacctgtcatagctttaagttaccgtctttccaaaaatcaacaagtggtagtgtaatctagaaaattttaagctttgtaaagccttctcactcccatcttaactaaatgccggcattttctggcctcagaaaataatagctgaaaagttttcttggcttctcaaggaactgatacaccattaaaattaaaatgaattatgtaaaaaaaaaggttgagaactatgacaccctctttagcaaattttctttggagtctcctttggggtactgctattgtggtcatccccgctactgttggtttaattttcatcagccagaaagataaaatccaacgcaattaagcaattggggactggggaatggggaatggtgactggagactggggactggggactgggtaatcaatttgatatttcccaatcaactatcaactatcaactatcaactatcaactatcaccttttgcccaatcaccttttccccaatcaccagtcacctatcaccaaaaattgtaaacagcttcagagcttatttgctagatgctttgaagcttaaatatattgtcaatagttaaaatagtaattttaattgttagcaataattgatgctacaagtccccggattagtccgtgtggtaaatccaaaatccaaaatctaaaatgcaaaattagatgactcgctaacatagatgtgatattgggaaaagagcaatgataaattttgggctgaactcagccagtgttttggctcaggtaaattttggggctaactcagccagtgttctaggaattttcctggctgtggctggggcagcactatattttcttcgcaccgtgcgcccggaactgtcacgagatcaagatatcttttttgcggcggttggcttactgtgtggttttattctgatcttccaaggatggcgacttgacccgattttgcagtttggtcagttgctgttagttggttctactgtattttttgctgttgaaagtattcgtctgcgaagtattgctactcaacaagcgaaacgcaatactcccattgtggatgatgagcgagaagtcagcagaaaatattcttactctgatcgccgtaattatcaagcggaaatggatgccgatttagaaccgctaccttattacgaagaggaagaagaagaacgtcccccacgtcccaggattcgtggtagccgagatgatcgttccagccgtgataattattatgaggaacaacccccacgacgaacagaacgccgcagtagcagggaaaaaccagaaacagccgaaaggaaacgtcgtccgagttctggacgttccgtaagtctcaagagtgatagttttgaacaagaaaattggggttctgtttctaaggaagttgatgactgggaaagtccccaagaggaagtaagaaaaccgtcacgtcgcagtaataacagacctcaacgcccagaaagccgtgaggatgatgttacacctagacctagaaaacgtcgtccatctgctgattcaccttctcgcagagaaaggaatgaagatgaggctatacctactgattatgtaccatataaacctctggaaactcccaatgaggattcaggtaataccaatgactttgatgatgtttaaaacatttagctgatggtaatttcaagggcgacggaaagcggttgatgtgaaaaaatttacatctgtattgtggctccaaaagcgtattcgttggagcctaatttttagcctgagtgggttgcttgtgtcttgtggtgctggtgagattccggttggggtttattctctaaacagtcgttatactgaggaacaaccggctttgagtggcaacggacgctttttggcctttgtctctaatcgtaatggtaatcagcaattgttgatgtacgacttggaaacccaaagttttattcccactcccagtttaaaccgacgagaaactgttgctgaaagtcccagtctcagctacacaggtcgttatatttgttacctcacgagtgaccaaggtagaccagtgatagcactttatgatcgcgctatgaaacaatcacaaatcattactcctacctatcgcggctggatcagaaatcctcatatcagtcctgatggacgttatatagtgtttgaatctgccagtcgtggacaatgggatattgaagttttagaccgaggacccactgtagaattagatattcctaatggtgcaacggtgactggtgataggtgactggtgactggtgactggtgactggtgactgggaaaaataactaataactaataactaataactaatgactaataactaatgactaatgacaaattacttttatttttattattaagttcaactttgttaactgggtgttttggttatccgcgtatattaagttatccctttgatcccggtggtcgcggtttaaacagttcagcttcggagttaaatccgcaaatttcgggcagatatattgtttttactactaatcgtcgcggtagccaggatatttatatgtttgatactgttacacaaaatctagtagatttactaggtttaaattcttttgatactattgctgatcatccttctgtgactcaagatggtcgttttgtggtttttgctgggagtcgtcaggggcgctcctttatttttctttatgatcgagaaactcgacaatccagaaatttaactgctaatctgcaagcagaagtccgcaatcctacaattagtgctgatggtagtagaattgcgtttgagtatagcaataatgggcaatgggatattttactgtatgacaggtttggacaaaaattgaatatcccccaagacccaaggtaattgataattgataattgataattcataattataaattactacccaatcaccaatcaccaatcaccaatcaccaatcaccagatttaactgattcaatgagcgatcgcacttgttgagtaccttctgagggttcaaaggagaggggaaatttacccctgactaacatccgtaaacccagaggtgcaagactaagtaatccttttaaatcacggaaataattaccaactacttggataccaaattgacgttcatcaatccaaccacctgctttaactagctcaaccaatactttgcggtgacgaatggaacggctatcactggcttttttgcggtcaagaatttcttgtttaattttggtaatttgttctaatggtgcaacttccattggacaaacagagtcgcaataaaaacaacgagtacaaccccaaacacctttagttccttcgttgtaattttccaagcgattttcttggttactatcgcgggaatctgccaccatgcggtacgctttggcgagagcgtggggacctacaaaatcggaattaacttcacgggcgttgcattctgaataacaagcaccacacataatacaattacctgtttgatcgagaagcgatcgctcttgtggtgtttgcaaaaattctttttctggtacttgtcgcgctgctgtactgacataaggtgcaaccgcttctaaattatcccaaaaactactcatatctacgaccaaatccttaatcacgggcatatttcccaaaggagcgatcgtgatttcattaatggtatgattatggtttgtcgataatgaagatgatgaaattttttgcaatctagctagttcgctgccaacattttctttacaggctaaagctgaacgtccattaattcgcatagcacagctaccacaaatagtattgcggcaatttttgcgaaatgctaaagttccatcttgttcccatttgatccgatttaggcaatcaagtattgtattacctggttctacctgtaaaggataagtttggacaacagggtgagagttttgctgctggcgaataatcttaaaaacaacttccatatattaccaaccaaattctaaaaattgccttacctgctgccaaaataatgagtacaagcaggttgttgtcaaaaattagcccgttatttaacttcagtggctaataagctgatgctgaaggcgcttatgattccagttcaaggataaccattaaaattttagttgtagaagtgcagtcagtgaaatttatcgaaacaatcgagtctcaaaacggacttcattcaaagttgtgggaggcgtgataaatccccgtgacaaaaactgcttccagcaaagcgacctcctgcttttgtgaactgagcagtattagcaggtgtttaacatagcgatgtgtttacctgagcaaatgcagcttaggcatggaagttcaatttgtcaaatatttttttgcttttctctgacaagaggtgagggatgtacccttcactggtttatcctctacacttgagacttctttagtttagtcctgtttgtaaaaagtcttccagtaatagcgaaataaaaattttttaaatatatagaagtgttaaagcggcggacaattatttggttatggctatcaagcaagggatagatgtggtaaattgattcttcccctagacagacgtggagaataatcggcgatattttccctgctcctaataaacagggtgaaaaataccagaggctttttgtctgatctccatcaagaaaacctagatttaagtcactcactcaaaacgtctcgcctaattatataaacttttataaaagtcttgactccatactcatgagaccatcagtccagagtaaaatccttactcctttttctgtccccaactccagtgatttgaaaaaaaaataatttgcaaattgttttttaaattcaacaaatattttgctattattggttcatgatagtatttaatatgaaattacgaagtcacaaaaccagtaccaaagtccgtacaagtccggctgctactgctttgttgattcgtaatgtagagacaagaaaatttgtgtctctatcggctggacacaagggtgtatgtctctaagaccatcagcaaatactatgctgtcctaagctggaaatgacgagtgggtacaaacctacaactcaagagcaagaaaggcaagcactgaaagtgaaaaacctgcaatttattgtatctacaactttttaggagtagaactaacctgatttgtaaaggtggcttaaaattacaccactacactagcgccaaaagattaaaatatttttctttctcatggcgaatgatggttaaaaatgccgtacaatcaacggaataaaattctgtgacaaccatgatctctaattgaatatggaaaaccatatatagagatacttgggctgatcatatcagcaggaattcacacttcaccctcaagtcttcagtagctctggacattggctaaaaagccaaatgtaaaaatcaggctacattgatgaactgtttcaagagattaaggaaattttgaacataatgacagaaactgcaaccgccccattaacaggaaaagcactgctggctaaagtaaaagagctttctaatttaccacgtcgagaaagagcgaagcagtgcggctattacactgttaccaagaataatcaggtgcgtgtaaatctcaccgatttttatgatgctttgttgtcagctagaggtattcctctgagtccagaatctcctaaagatggacgtggtcgcgaaccgacataccgggttagtgttcatcaaaatcgtcaaatcgtgattggtgctacctataccaaagcaatgggtttaaaacctggtgatgagtttgaaattcggttaggttacaagcatattcatttgattcaacttggtgaaagtgataaaaaattgacatcatccgatgtggaagctgatgaagctgatttagaaaatgaagaggaggaataaatttctctgagagtaggggtaagttgtaaataaatctttgctttcttatccctacacttccctacacctacaaataaatagtatttgtagtttaaaggtttgttcatacaacaaaataagatttgacattttgtatgcgtcacgaattctagtagagttttgaaggataagcaagaactctctgggagctagaaatctatcgtgattttttcgtctgttttcttttcactaatagagccatcagtcaataatacattactggcgttgctaaaaaatgcgccagtagtattttttgtcatggctttttttatggtttgggtagtatgttggttgccattagcagcgatatccgccttcatacttaatttgcagcttaataaacctttacagccagagcaaaaaattcctttattggtatctctctatctattagtacctttaattctctggggaattaattggttaggactggggtcttttgctaattatggcttggtggggaatatttctattttgcgttctttgtggctgggtttgggtttaggtgtgttgggactggtgatagtgtttacctgtcaattttggctaggttggtgctatttagaaaaatcaaatattaaattaattccgggaattttgctaccaatttctttggtggctttgtttgtaggtgggatagaagagttattatttcggggttttttattgacaaccctggagaaagactacccgatctggttagcagcgattatttctagtttgatttttgccttgctgcatttggtttgggaacaaaaagaaacgataccgcaactacctggtttatggctgatgggaatggtgttggtagtggccaggttagctgatggtggtagtttggggatagcttggggacttcatgcgggttgggtatgggcgatcgctaccatagatacagcaggattaataacttatacagggaaagtctcagaatgggttacaggtaaaaacaaaaaacccctagccggattagctggggttctgtgtgttctggtaacaggaataattctttggtggtttgttgagatttaggcattgggtaggaaaaaactaatcaccaatcaccaattaccaattacctaacccccaaaaccaggaattaaacgttttagagcgcgaccagctacatcaccatatcgcaattcaccacaaaggattttacccatagtttgagcgccagagggacgtttaacaccgactttgtagccaataccagggaagcgataaaatgcgccggctaatttttgcgcccaagccatttctgaaccccattgttcatgaatagcctcagtgtagttttccaaggcgttgatatcaccactaagcgcctcattaatgaattgtgcggctaggacaccgctaaaaattgaggggcgaataccttctgcggtaaaggggtcaacaacacaagcagcttcaccggctaaaacagcattttgggtatgcagtttttgattaccatcccataaggatatgggataaccatattgtttgctggttttaatatctacattaaaatatttggcatactcatccaaaatttttttaaagtcctggggttcgccaccaataaacgttccgactccgagagagtaaccgtcagctttgggaaaattccagatataaccgtttttgactaaaccaaactcaaagtgaattgtggatttattctctacatttgccggaatttctgcttctaatgctcctgctaaacgacgtttccggtctttgaaacctagccatttgggcattgaacctttaacaccatccgcagcaattaagtagtgacctgtgacttgtccgttagccgtattaacttgccaataatcacttttaaactcaatacctgtaacttctgtattgtctcgtagttctgccccttgtttttgagcttgttgaacgagaaaatggtcgaatacatctcgccgcaccatccagactggttctttggtggcaatttttgcttctacagaatcgtctaatttccaggtgaaacgtatagaatcagctttgacggaaattgcagggctaaagtcaaaatcaaaccattgagcgatcgctggtgacacaccaccaccacaaggtttatatctgggcagagatgctttttctaaaactaatactgagcgtccctgtttggctaaatgataagctgctgatccacccgccggaccagcaccaacaatgatacattcgtacataaataagggaatagggaataggtaggaggcagggagcagggagcagggagcaggggaggttaataaccccatcaccagtccccagcgatgcactgagcttgtcgaagtgtccccagtccccagtccccaatttagacggttgtaatgtctttttccttctctgccagcaagtcgtcgattttcgctgtatatttgttggttagtttttgtagtttatcttgctgatctcgtgattcgtcttcggaaatttccgcagctttttcttgtttacgaattgagtcaagagcatcacgacggatattgcgaataccaactcgaccttcttcggcatacttagcagcgagtttagcaaattctctacgacggtcagatgtcaaaggtgggatgttcaaacgaattacagaaccatcattgctgggggttaaaccgacatctgacaaggagattgccttttccaccatattcagactcttcttgtcataaggctgaatgagaatggttgaggcatctggtgtggaaatgttggccagagattttagaggtgttggtgaaccgtagtagtccacctgtactttatcgagtaggctcgcattggcgcggccagtgcgaatggtgttaaaagctcgttgagtagcctcaacggttttttgcatcgtactttcagcttcagctaatttcacaagaacctcccacaagagtgccaatagattctcccattactgcacggtgaatatttcctcgcgttgttaggtcaaataccagaatgggaatattattttctttacataaggcaattgcggtactatccatgactcgcaaatcttcagccaaaacgtgggcgtaagtgagggttgtgtaacgtttggcttcaggataaatagtggggtcagcatcgtagattccgtctactttggtggctttaaaaatcacttctgcttctatttctgctgctcttaatgccgcagtggtatctgtggtaaagaagggatttcctgaaccagcaccaaaaattaccacccgtcctttttctaaatgacggatggcacgacgacgaatatacggttctgctaattcttgcatagcgatcgctgtttgtacccgcgtctgtattcctatcctttctagcgagtcttgtagcgtcatggcattcattaccgtggcaatcattcctatgtagtcagcggttgctctgtccattcccgctgatgctgccttaacgcctctgaaaatgttgccaccgccaactacgatagcgacttgaacgccagtggctaccacctctgccaactcttcggctattcccttgactacttctggatcaatgccatagcccatgttgcccatcaaggcttcaccgctcagtttaagtaaaacccgtcggtaattcgttcccatgaagttacgttttattttatcaaataagttgcaattgcctccaatttaagatagcagtacagtggcaatctgtgtctagttctgcgttattttcgccatactaatggcgttcccagttgtggggtttgtgctggctggatttcttgaccttcaaataaagaggcgatcgcatttcttaaaaaatcttccccagtcgctgatggatcttgagggtgttcgtcaatttgtcctttatagcgcacaatcccttcattatcaattaaaaaagccgttggtgtgctaacagcaccaaagctacgagttacatcttgtgttgtgtcccataggtaggggaaatttaattcatggcgctgggcaaaaactttcatatcttcaaagtttgagccagggtttatatcttccccaggattcacatcattaccatttagtccaatgagtgtaaagctgctaggtgaaaattctgtttgaatttttttcagcctgtctatatacttttttacataaggacagtggttagacatagaaattacacatactgagcgtaaattatctagataacggctgagatggtgtacactgccatcaattcctggcaactcaaaatctggtgcgtagcttccgataggagtatcaattgtttctagtatattcattgttttttgccagaaggaactaggaacaaaaacttatgcaaattcagcgttagttttttagatgctaaactaagccttagtatttgttttctatccaaattcattttatatactaattgagttagcgtaaattgtaaaacctcctgaatttgggatttatgctattttgaacatccacaatgttgttttttgggtaaattttctgtaataaccctgtaaagtatcatatatttctctaattctcatgtagtatgccaagctcaaaattccaggtttgtcctatgctagatatctaaaatatgggcaaaaatctatttaacattaattctatttaacatttaattttgagttgtttagtgatatgggtgaaacagtgttttttagtgttgttataccaacttataatcggttgccaattttgcagaagtgcctccgcgctttagaagtacagaatttcaaggatacaactcttgtagaagggtatgagattgttttagtggatgatggttctaccgatgggactttagactggttagctgaacatcaagatcagtttcctcatgtgcggtgttttcaacaggatcatgctggtcctgcggcggcgcgaaatttgggtgtagaaaaagctgcgggtgatacgattatttttattgatagtgatttggtggttttgtctaatttcttccaagctcatagtaatgctttattgcaaggaagagagaaattaggaaacgacgctttttttacctacggtgcggtaattaatacttgcaattttgaaaatcccacttctgaaccttataaaatcacagatttttctgcggctttttttgctacgggtaatgtggctattcctaaacattggttagaaaaagcaggtttatttgatactggatttcaactttatggatgggaagatttagaattaggtgtgaggttaaaaaatttaggtttgcaattaattaaatgtcctcaagctgtgggttatcattggcatccaccctttagtctacaacaaattgataatttaattgataaggaaattcaacggggaaggatgggagttttgttttatcaaaaacatccgacttgggaagtgaaaatgatgattcaaatgactttgtttcatcgtttattgtgggggatactttctttaaatgggttgtttaatgaaagaactagcgcccctttattgcaatggttgattaatttgggtaagccgcagttagctttggaaattgcgcggatttttttgaattggtataatgtgaagggggtttatcaggcttatggtgagatgatgaataaatgattgtttcgcgcaaagagtcaaaggagcaaagaagagaaaaagggatataatagaagaagtgtgatatttttctactaagggtagaaatcctcatctaaaatttgctctactgagaagggagaagttagaggatatttattttctgatggtatggtaattccaaatttagccagtttaccttcttttatggcaagtttacgcgcatcggggtaagatttttctaatgcttctgttaagtaatttttgagagatggggtatctgttaaattatcaatcactcgttgacgatgttcgacgacggaactataccaacttgctttcattgtctctggtacattatgttgaacttttaatttaaggaggtgagttaataagatttttaggttgctttttagtgcatttttttctgatttacccaactctattaactcctctatcaaatgatcaatatccagggatgcaaattcatgattttgtaattgttgaattgttgcatctatccataattgtaagtcttgatcatatagggtgttagacatctttccgacctatttgtttaagagttgtgatatttaatattttaacatacattttttagatattctctcaatacgggggtgagatgaaataatctttcgtcgttttctgatttggttaataaaaatcgtcgtgttaatgattgtatactgttgattatttctagagatgagagggataatagctttttgatttcttctctggatagaggttgatcattttgactgatttttaatagtgtttgtttttcaatattggttaatctctcccaggttaagaggatgtttgatttgatatcttctgttaagattaaattgttttcttggataaattctgcaatttcaccttgaaatacatcttttattaaaatgctgatatattgtaaatatcgaggatgagtttcgtataagtttattaggtttaaccaatgttcttgattttgcaatctttgattttttaatatttctgtagctgcattacctaaacctgataattctaaggaatgaatggggtaaatttcatcatctaaggatatcagttcttggcatttttcttgactaatcaaaattacacagctttgattttctattgctgtgatcatttgtaggttgggttgacgttagaaaacccaactaactacacttaaatataaattacaacttcctcctctttccatagctaataatttttatcaaccataaaaaccctttatttataaacatctcaccgcgcaccaatagccatgatcacatataattgattaacagtattctcaataaacaaaatcctatatttaccaactcttaaacgactttcttctctacccttcaatggtttaatatcaagattttctgttcctgtgattaaaccatccaacgcacgaataattcttacttgatcttcaactcttaatcgttcaagatattttgggcaggttttaagataatataatcaagcaaaatcttctcctagtaattgacgctttaactcctgagatgaaattcctttatcttttcctgtaagataatcttgtaatgcagatgcactcatatctaacaattcatcatctacatcttcatcattgtcattagtctgttgatcagcaacatttattttctgaataaactctaatacataactcaatttttcatcaggaatgaggctgatttgttttaatatttcttgacgaataatgctagaattagtcataaatcaaactcctattttttgtcacataactattatgtgtgtaaaattatcatcaaggtgaaacttaatcttgtttgacattttcacccttataacatttattattgttgatttaaccatccctgtaaattagatactttactaaaataattaattcccacattagctaatacctgttgaatattagtattaccaaaatccttagtattttcactaaaaaataccttcgacattgataaattattctgagcatgagctaaaatcacctgtaaaataaaatcatctcgcttttgatttttaccaggtattaaaggagtatttaaggtactttccaacatttcaattctgggttcaatcaattcaccatgatttttcagatattcgagaatcttcaaaaataggtttctaaaatcagttaatatgtcatcataatcaattaaggaactttctaagtagttgacaaaagaggtagagttagataattctttatttctttttgcttcattcatctctatttgaagagtttgagaaaaagattgactacgtttgtcttctctttctattgctactagggtttccatcaagcaaatactcggtatcacaaacttgagtttatctgaagactgataaacaaaatcttctaattctttatttcttcctttggcaattgccataatggaattagtttccaaataaataattatcataataattgtagctcctctgtagttatatcatccaaaagagcaaataaaccaatttctttcatttcttcaatgtaaggaggattttcacttttccaatgataatctaaatctcttaaccaggattgaagcaaagtgattaaagtaaattgataaatgattacttcaatactttttggactataaaatcctaaaacttttttggtttctaatctggaaacttctgcaaaattcggacttttaaagattctgatcacatcggagttagcaaacattaaaaaaggaatattttggtattgttccatttttaatatatccagttctggggaagcatacatggcggaaaatcttacatctatcatcaaaataggttgttcatctttatctttgacaagaatagcaggatcaaaatcaattgctgtgggtggtttaattatgctcatggatttttacctgttgatttaagatgattgacattgttattataactcaacttcactatatctaaatacagaaatatttattgtttgaattttattgtttgaattttattgtttgaattttattcacatagtttcttttatttgctgatttttgttgttattagtcagttttttcagacttgtgccaaaaacagctatttgataattaaccaatttcttaaaaattctgactcctgactcctgtacgggcgttcgcgaagcgtgctggaagcatcagcattcggttgataaattttcgatttttacccaatagacctgtccgaatgcttcgcccctactgactcctgactcccgacatttcaaaatatttctgcaaaattgccacaattgtgctaccctagtatggttgtctaaattccgcacatccgggaattcgggtgtttccactgtggaaatacacctggatggaggtttaacccgaataggagctataaaatatgccagtcgtttctttggctcagatgatggagtcaggtgttcactttgggcatcaaacccgacgttggaacccgaagatgtctccttacatctacactgctcgcaatggtgtacacatcattgacttagtgcaaaccgcacagttgatggatgacgcatacaactatatgcggacacaagcagaacaaggtaaaaaattcttgtttgtgggtacaaagcgccaagcagcaggaattattgcacaagaagctaaccgttgtggttctcactacattaaccagcgttggttgggtggaatgctcaccaactgggctaccattaaaaccagagcagaacgtctaaaagatttagaacgtcgggaagaaaacggcgcattagacttattgcctaagaaagaagcttcaatgctgcgtcgggaaatggcgaagctacaaaaatacttgggcggcattaaaaatatgcggaaagtgcctgacattgtggtaattgttgaccaacgtcgggaatataacgctgttcaagaatgccaaaaactgggtattcccattgtgtctatgttagatacaaactgtgacccagatgttgtagatattcccattccagctaatgatgatgcaatcagatcgattaaactgattgttggtaaattagcagatgctatttatgaaggccgtcatggtcagctggaagtagaagaagattacgaagattacgaaggcgctgaggaagagtacgactacgatgaaagtgagtacactgactcaatgatgagcgatgacgacgaagaataaggactaaacaattttggattttggattttggattttttgggaaaagtccgttgttttgggtgcaacaaatctcaaatcgttcatttccaatgtctaagctgcatctgtttgtggtgcagccaatcgaaaatctaaaattggcagaggctaaatttaaaattcatcgcttttctgtacgtagttctcatcagaggacttgcagccgtcgggcagacggtgatgcttgctgagggtaaatttcttggaattactttgaagcaagaatcccccggcttctagccgtggggaatgtcaatagccctgagtaagatagaaatactcaacacccgtgagcgattataactctaggtcaagttaggataggaattgaggcaacatggcggaaatatctgcaaaactcgtccaagagctacgccaaaaaactggtgccggcatgatggactgcaaaaaggcgctgaaggaaaatgatggcaatatcgacgcagctatagactggctacgtaaaaaaggcatcgcttcagcgggtaaaaagagcgatcgcgtggcagcagaaggtttagtagacacctacattcaacctgatggtaaggtgggtgtactgatagaagtcaactgtcaaactgattttgttgcccgtaacgacgcttttaaaactttagttaagaatctagcacaacaagctgcgactgcggatagtgttgagtctttgctggctcaaccctacattgaaaaggcagaagtaactgtagatgaatttatcaaagaaagtattgctaccttgggtgaaaatatccaggtgcgacgctttgtaaacttctctcttggtgacacaccaggagtagtagacagctacattcacactggtggtagagtaggtgtgttactgcaagtaatcgctaaaacagacgatgctgctggtaacgaagagtttaaaaaatttgctaaaaatgcagcaatgcaagttgccgcttgccccaatgttgagtatgttagtgtagaccaaattcctgccgaaactgtccaaaaagaaaaggacattgaaatgggtaaggaagacttggcgaataaaccagagaacatcagagaaaaaattgttcaaggacggattgaaaaacgcctaaaagaattaactttgttggatcaaccttatatccgtgatcaaagcatttctgtagcagacttagtgaagcaagttcagtctaaagtcggtgaagacattacagtgcatggctttgtgcgatatgtactgggtgaaggcattgaaaaacaagaaagtaactttgctgaagaagtagctgctcaaatgggcgctaagtaatggcgctaagtaatttagttatgagtcagtagtcagtagttagttattaatagtatgttattaactgaagctgctggactaaagatttttgactaatgattaaatcagtacacagtagacaggtcagacagtttatggtaaaatgaatgttgatgacactgataactgataactgatatttgtaaaatcacaggtctggcaaattttgctgacctgtattttattgacaattattattacaattggagtaattcaaaactctagataatctggataattattttcactgcaaaatacaattcaggtggagaaaaaaaggaagatatggccagagcaattgagcgaatagaaggggatatcacagccataaaacaagcgattagagcgatcgccacagaactccacagcaattatgtcaattatttaactatcctgggtgaagctttacaaaaacagttaattttggcagtttatcacgtttgtactcaaggatatcctgataaatttctcaaattgtcactgaatcagcgacaacaattgcaacaaggcattcgtaaattaggacaaaaaggcgcacaacagttgcttgtttatcttcaaggtggagatacggaagaagctgaagaaaccgaggaatttgaggaaactgaggaaactgaagaaactgaagaaactgaagaaactgaagacagtaaaaacgatcctcaatcgaaaatagaaaagcaaaaatatttagatccttccaaccccatagaagtggcacaatggcatcaagatttagaggaaggaattcagaataccctgataaaagtttcccaggatgccaattctttaattcaaaaagtgggaattttaccgaaaaaactaccagaaccgattttagcagcagctgcagcagcagtttcagaagcttctggggaagtaataccgggtccgcctaatctattaaatttagtaattgaaatcagtagtgacgatgaatcagaagattctagcttgacacagctgataaccctgaacttgcgactaggagacattgaatttgctgataacacactcttgtcagcacgcaaacaaattcgtaatattttactgcaactgaataaattaggaaaagaatatcaaaagaaacacagagaattgaaaattgcggaagcggaagcggcttggcgtgcgagttggtttgaggactaacttataggtgattggtgactggtgactggtgattgggtagaattaactaacaactaatgactaatgactaatgactaacaactaacaactaatgactaacaactaatgactaacaactaatgactaatgatactcccgattggataagattggataaagccttggcggtagaggctgaaaatgggtttgtagatttgatgggtagacaatatcgcttcagtgaatttctcagtttaacctttgggaagtttcctcaaagtttaccagcaaaagagcgatcgcgctggcatcatatcgcctttcaatttgctgaatatccagatttagcagtagaaattagacagcagttagttgctgaagttaaaacctatctttatcaattacaacaacaattagaatcgggtgaacagcaacatcaagacataaaaaaacaagaaatcaaaaaacaggaaattaaaactcaggaaattaaaacccaggaaattaaaacccaggaaaaaaattattcaacaaaaacagttaaaacaactcctattgtgactgaaaccagtcggagactagcgccaaaaattgagcaaaaactcagcgatttaccagaaattggcatcaagagagcagaaaatttatctcgtttagatttatcaacagtgagagatttactgttttattatcctcgtgattatattgattatgctcgtcaagttaacattcaagaattacaaggaggtgaaacagtaactatcatcgccgaagttaagcgttgtaattgttttaccagtcctaaaaatcaaaagttatcaattttagaactattattaaaagataaaagtggacaaataaaagttagtagattttatgccggtgctagatttagtagtcgtggttggcaagaaagtttaaaacgacgttatgctgtgggtagtgtggtggctgcttgtggtttagtgaaagccagtaaatatggtttaaccttagataatcccgaaatagaagtattagcaaatcctggtgatgcgatagaatcttttactattgggcgggttgtaccgatttatggtttaacggaaggagttgttgcaaataccgtcagacaagcggtaatggcagctttacctgcggcagcaaatttaaaagatcccttaccagttggtttaagaaaaaaatatgaattaatggaattaaaagatgcaattcctaatattcattttcctaaagatagtgatactttaaaatatgctcgtcggcgtttagtatttgatgaatttttctatttacaactgggtttattacaacgtcagaaacaagccaaggcaattcaaacaagtgccgttttagcaacaaaaggcaaattattagaacaatttaacgagattttaccttttaaatttactaatgctcaacaaagagttattaacgatattctcaatgatttacaaaaacctacacccatgaatcgtttagttcaaggtgatgtaggttcgggtaaaactgtggtagctgtagttgcgattttagcagcaattcaatctggttatcaagcagctttgatggctcccactgaagtattagcagaacaacattatagaaagttagttagttggtttaacctgttacatttaccagttgaattattaacaggttcaacaaaaacagcaaaaagaagagaaattcattctcagttagaaacaggtaaattacctcttttagtgggaactcatgcgttaattcaagataaggtaaattttcaacgtttgggtttagttgtcattgatgaacagcatcgttttggggtagaacaaagggcaaaattacagcaaaaaggtgaacaaccccacgttttaaccatgactgcaactcctattcctagaacattagctttaacagttcatggtgatttagatgtgagtcaaattgatgaattaccaccaggaagacaagcaattaaaacatctttgttaactggtcaacaaagaccccaagcttatgatttaataagaagagaaattgcccaaggtaggcagatttatgtagttttgcctttggtggaagagtcggaaaaattagatttgcgttcagcaatagatgaacatcaaaaattacaagaaagcgtttttcctgagtttcaagtggggttattgcatggaagaatgacttcagcagaaaaagaggaagctattaataaatttcgggataatgaaactcagattttagtttctactacggtggtagaggtgggtgtggatgttcctaacgcgacggtgatgttaattgaacacgcggagagatttgggttatcacagttacatcaattacgggggcgtgtgggacggggtgcagcgcagtcctattgtttattgatgagtagttccagaagtcctgatgcacaacaacggttgatggtgctggtacagtctcaggatgggttttttatttcggaaatggatatgcgttttcgtggtcctggggaagtgatggggactagacaatctggagtagcggattttactttagctagtttggtagaagatgaggatgtgttgctgttagcgcgacaagcagcagagaaggtgattgatatggatgcgagtttagcgcgttggactctgatgcgggatgagttgcagtataggtatacgcggttaatggggggagcaattttgacttagaataattgaggaaattctttaattacaggaaatcaaaataacttaatggcaaaaataccttttacagacaaggaaatggagaaagcttggctgagaaatatatctgcttattacaaaacacctcaacctcataccaatgcccatcggttattattattttatgccgtcgaatgtggtcttaaagcaattttcatgaaaaaaaagcgttgtcctcgcacggatttggatttatgccaagaaattattgaatgcggacataatatcaatgatatgttagattgtgtagaagcacaaggcgacttaaaactacctgaaatacggatagaggatatacccgataaaaggaataataaaaagaataaacaagaaaagagaagattagatagtggacaaattaaccaaatatggagatatggcgcaaatattattggtataattactaaaaaagaagaaaaaccacaaaccgatgaatatatagaaaataaactgttagaaatatcaaaatggattgcaaaggaaattgacaaattatgaatgaactaaaaaaaataaaattatttacttggcttgatgtcagaagaattattcgtcaaaaaaccagctacgttactaatctaccaaaaggaatattaaaaatacgttgttactcggatagcttggaaatatatctttccacagaagaagatcaagatacagttattcatcatttaaagaattggtttaaagactggtatcaagaagaagaatccttgatttttctagatattggagatgcaacattacctgtagaatttatcattggtgaagaaccttatataactgatgttgaaattcgtcctttttgggaagaaattgcatatttgaaaagtgaatcagaaacagaaaatgccattcagcaggttgttaaactgccagaaatgtcccctaataactgtaatttaatagccttctattcttttaaaggtggtgtggggagaactttaaatttagcagcgcatcttttcgctttactagatagagctaaagagttaaatcaaccgatcaaaatacttgtcatagatgctgatttagaagctcctggccttacatattggaatgcttcggaaagccaaaaaccagaagtttcatttattaattttttagaggtttatcattattcaccgattgatagagaagaagctctgtcattatttgccaaagaggtaaaaaaatcagctaaaaatgaaggacaatctagtatatatttcctaccagcatttcttaaacacgaagacttattagatactcctattttacctgaacatttggtaagaggtatagatggagtttgggaatatgggaatgctctttatagtttaggtgcaattttggcagtagattatatttttattgatttgagagcaggtttaagtgaaatctcaagtccgataatttttgatcctcgaatacagcgttttttggtgacaactattaatgatcaatctattcaaggtacaagtctggttttaaaacaaattggtaaagttgcaccaccagaagcagaagttcaaaataaaacatactatgatccaactataattattagtatgttaaaagaagaatttaaagaattaccaaattttaacaatgctgtgacagacttagtttatgcttatgggcaagataaagatgataaattatcaaatgagaaaagactagaaattaaagaagcctattttgctgaggaactattgtatatcaataattgggatgatgcaagatcaaagttagaaagaggaactacggtaagagaaaatgctctaaattgggcaaatcagcaattagtcattgaggatcaagaaattacggaaaatatagaagaaataaaatcacgtcaaaaacaagaagtaaccaaactaagagatttatgtcaaaagtatgaatatgctgaatcgggagaaggggaagatttattaatcacagaacctttgcaaaatttggcaactaattttcaagatgaattacctcatgtaatatcaattggagcaaaaggagcaggaaaaacatttaattatattcagcttgcacggtttaaatattgggaaaagtttattaataaaattagtaaactttctcatgaaataattaatgaaactgttactcaaacacatatttttccttttttggaatcacgtacactcaaagaaaatgctaatactgtcatcagtgaagctagaaatgagacaagaatagcattagataatcatgttcctgaatttaaacattccgaatatgtagataggatcaagaacacactagatattgaagattggaatgaaccacgatggactcaattctgggttggtgaaattgccaaatcaattggcatgagtgaaaatatagataatcctcatactttgagtaatataaatcaatatttaagaaataaagaattaaaaattatctttttgtttgatggattagaagatattttctctgatattgctgctaatgaaaaacagcgtatagctttaaaagcgttgattgatgatttaccgaagaaattatcagaaattaggcaatctcacctgggtataatcattttcttgcgtcgtgattttctcagatatacaattactcaaaacttaggacaatttgaaaatctttaccgttcctatgatttatattggaatcacgaatctttcttgaggttagcttattggatttgtagtgaatctaatgttattggcgcagaaaaaggtaatatttatagtataactaaagaaaatctgattactgaattagaaaatttatggggtaaaactctgggtactgaaaaatctaaagaagcatatacagcttcttgggtatttgcagctttaactgattttaagggtaaacttcaggcgagagatattgtgcgctttttgcattatgcagctaagattacattagataatgctaaagatgtaaactttgaaaagtggtatacaaatcgactattacctcctcaagctattcgccgagctttaaaaccatgtagtgaagaaaaggtgagagaagctacagaagaatatccagcttttaaaaaatgggtagatgaacaacttcctcctgcttctgaaagaaaaataccttttgctgtcgagcagttcaacatggatcagcaaactgtaagaatgttagaagaaatgggggtaatttatgaagataaagaaaaagaggaaatagcgcgattttatatgccggaaatttttcgagaaggtttaggtttttctggtcaaggtgcaagacctcgaatagtagcattaaagcgtagggtactagggaaaggcattttgtaatatttgtcactgttcggctgacgctcacggcgaagcctgtcacctgtcacctactcactaaactccatcgtctcgataaactctaaaatattctgtttaatatcctccgcttcatccaaaataggaccaggactatcaccattgaaaaatgtccgctgactgctaactatatacaaaaagtcaccattgatgaaagctaacaaaccccgataagcatctaatctaatggcattgccgttagtttcttgtttggaaattgttgaacctttgggcatatcaactaatacataataataaccttttaaggtatcttgtaaatattctgtatacttgatttctgcacctgggacattaacaaaaatggcttgtggtaaatatttttcgattaaaatagagtggagatatgtttcctgtccctgagattccattgttgctaaatgttcggttggaagaggataataatcaattctcagtaaagttccaacatcatcagaaaagccaactattccttcttgactttgaatttttcctccctgttctggggtaactggtatgggaacaataaaattacccaaaggtgattgatatatttcttgcccaaattcatctaataatattgtttcctgttctatgtctacatattcttcttgatattctgcttcttctattgcagctatgatttctttgatcatttcttctgcttctatatcttctagttctaaggcttgttgtagttgttggatgtacggctgttttggtgtgggaatagttagggtttcgtcgtctaaaagcaatactaccccagcagcaaaggcatctaatactatttcatctacgaggctggcgttggcggtgttaaataatgcccctagtccttcattttcggcgatcgctaccagtctatcaactatttctagcatttcctcggctgagtattcattaaaaacctcaaattcccagagaatacctgctaaactttctgcatctaagtctttaatggaagaatcaactattccggtaattacacctatagctgctaccgcttcttctggactcaatgattcttgtgagattttttttgactgaaatattttatcatacttggtcataatagctccatcaatactcttttagtaataaccgttgtctcaaagtaacaattgttagtttagcaaggacataagccttgtctagattttatctagtgttttggtaatctatgtaatcagtaaaggataccaaaaaccagtcgccacttttcctgattactgttttttccgtatagatcaggtttctgactctgatttttgagtttcattcatacacaaacctatgtaaccttatttactcggttgagtaatacgttcctctatatcttccaaggtgcgtaacaatagacgttttgcctgtaactgccaaccccatttttggattctaaaagctgctacagtccccactatggctgctaataaaccgataggttgattcagagaaattcctaataataaacccaagccagcaataccccaaaatggtaaggctgcggcttgtctttgttcctctactatttctgcaattttactagattgcattgtagctaataattccgatttcatttgccgttgttgtactagtgataaggataaacttatcttcctgcgtagtttttctatcttcctggcatcagtgctgtactcggttagttcatcttctgccattttcaagaatttttctaattgtgacatggtgcatctatccgctgttttatgtacagttattatctctaataattgttcatttttcttgactagagtattataatcaccccgataacctcatggtattggtgatattcccttttcccaaggatctgcgagatgcgatcgccactgcataccaaattctttgtcaagaatacaacgcagctacagatgttgtagtctgttctagctccactgcggaagacttacctgatgcgagttttgcaggacagcaagaaggtgatctcaatattgtcggaattgatactattagtttgaatcctgattcggttttacagactatgttagcagtggcaaattttgaaactcaaggtgtttgtgtcatctatgatggtactaatgcccagggtggatggagactgaatttattgcaacagttcaatcaaaagttcaatcaaaagttcaattgagcgatcgcttcccctgtcttgtggatgggttggtatttacaccaacaaattttcgccttaaaatgcgttagcgtagcggcatcaagtccggttttagacccgattatttcgataaaatttaggacatagatgatagttaacatttaacagtattgcccagtcaccaatcaccaattaccaatgactaaaaaatggtttagaatctgtacaacagcaatatttatcctatcattgatcttacgattttggggattaggaagatttaacaccctcgtatttgatgaggtttattttgcccaatttggtaataattatcttaccaacactcccttttttaatgcccatcctcccctgagtcaatatatcattggtttaggaatttggattggtaatcatattcccttttggcaaaatcctgtcaacggtgcaacaggttctttattatctccttggagttatcggtgggcaaatgcttttacaggttcattaattcccttaatagttattttcctcacttatcaattaagttatcgtcgtggtttcgctttattagcaggtttatttacagctttggatggtttatttttggtagaatctcgctatgctttaagtaatatctatatagtgatttttggattaatcggacactggtttttattattagctttggagaaacaaaataaacaacgttggtttgctttattcatagctggaattagttttggtgcttccattgggacaaaatggaacggtttatggtttcttgctggtgcttatggaatgtggatagcagcttggataattcgttggttgcaatctttagcaccttcaccacgatcacctttattttcttatttacgcaactccttttcagccaatcataatcaaattaaaaatcaagaaaataccccacaaataccactgcaaaaaattacgcaaatcaatattttacaaatgggattttttctcggaattatccctatattaatgtacagtttaatttggattcctcatctccagctagacacaagttatggatttatagaagttcataaacaaattttacagtttcatcttcagttaggtggtaatgattctagtgtacatccctactgtgctgcatggtacaaatggccattaatgactcgcccaatggcttattattatcaaatcactcaaagttttcaagatcccattcctgtatttggaccacccttacctcctggtgcggggaaagtggtttatgatgttcatgcaatgggtaatccttttttatggtggtttggtttagcgacaattatatttttagtaggaatgttatttgtaaaaatcttactaccgggaatacagcaaaaacgattatttattcctaaaaatctaggcgttgatacttggattagtttatatattgttatcaattatgctgctaatttattaccttgggtaaaggtaactcgctgtgtgttcatctaccattatatgagtgcagtgatatttacatttattgcacttgcttggtttgttgatcaatgtcttcgcagttattatagaggaatgcgtatacttggtctaacaatcaccttcactattatagttgcttttgttttttggctacctatttatttaggtttacctctttctatggaagattatcacctacggatgtggtttagaagttggatataaaaattaaacggggatctaaaaagattttccatagcacacgatccctaacttcttattttgatactttcaatcaaatatgatcaatgtttagaagtcgcggatctggaaagattttcaatggaatcagaatcaaacctttgatattttcttatgatattttcttaatatatctatataaaaagtggttacttaatcactttcatttcacatttattatctgtagttaggataaatacctgttaaactttaatcagttaaagattagggtaaatctacccaatgacaaaaacccaatgacaaaaaagtcaagaaatgataagaggcagaaaaaaaattaacgcagtaatcacaaagtctgaaaacagcaaattagaatttaacatctcattcagtttcttcgctacataatcatctgcaagttagttgaacagaaaattgaaaagtgctaagagagttacatctgggtaggttaataaacctgacaagtgaaaacatctatcgctaactctactcttgatgcacctagataatagaggggaatcgtgatggatatcagcttacaaatacaaagcttacaagaacaaagcttacaagaacaaaatgtttcagatattaagatcaagagcttgaaagaagcaccaattcatctttctagccaaattcagccctatggtattctgttaatattagaagaaccagaattaaatgtattacaggttagtaataataccttaaatgttttcggcatttctcccgaaaatatggtgcagaaaaaattagaagatttaatcgatccattccagtttgagagaattaaatctgggttattagatcagaatctaaattttatcaatcctaccaaactttggattaagagaaaaggtgatgaatacacagtatttgatgctgtatttcaccgtaattctgaaggttttttaattctagaattagaaccagcaatttctcaagaaaatattccctttttaagcttttatcatttagctagagcatccataaatcgcttagaaaacacaaaaaacctcagagaattttgtcaaataattgttcaagaagtgcggaaagtcaccggatttgatagagtcatgctatataaattcgatgatgatggacatggttcagttattgcggaagaaaaaatagacgagttagaatcttacttgggtttacattatccagaatcagacattcccaaaccagcgagaaaattatttattgataattctatcaggttaattcccgatactaatatagaatcggtgataatttttcctgttgataatcctgttacaaatcgtccagttgatttaactaactctattctcagaagtcccgcaccttgtcatatagaatatttacataatatgggggttggtgcttctttaaccatctctttgattaaagatcaaaaactttggggattgattgcttgtcatcataaaacacccaaatatgtttcctatgaattgcggaaagcttgcgaatttttagggagagtgatattttctgaaatttccgctagagaagaaaccgaagattatgattatcgcatgaatttgacctatattcaatcacttttagttgaatatatgtctcaagaagataattttattgatggtttagtgaaaaaccaacctaatcttttagacttaaccagtgccacaggagcagcagtttgttttgggggaaattacaccctgattggtgaaactcccagagaagaagaactgaattttttagtagaatggttaaagaataatatagaagatgaagtcttttatacggattctttggctaatatttacccagatgcgattagttttaaaaatgtcgctagtggtttattagctattcctatttctcaaaggaattatgtattatggtttagaccggaggtgattcaaactgttaattggggtggagatccgaataaagcttatgaagttaatcaaactcagggaaatttacgtttatgtccccggaaatcatttgaactgtggaaagaaacagttagattaacatccttaccttggcaatatgtagaaatcaaagcagctttagaattgcggaaagcaatagtaaatattgtattacgtcaagctgatgaattagcacaactagcgcatgatttagaaagatcaaatgcggaattgaaaaaatttgcctatgttgcttcccatgatttacaagaaccattgaatcaagtagccaattatgtgcaattattagaaatgcgctatgaagctgctctggatgaagatgcaaaagaatttattaattttgcagtcgagggagtcagcttaatgcaaaccttgattgatgatgtattagcatattccaaagttgatactcaagcgatcgcatttcaagttacagaagtagaaacagccttagaaaaagcattaagtaacctccgcaaacgcatttccgaaactggcgcgaccattacccatgatccgttacccactgtcatggctgatagtacacaaataatgcaactatttttgaacttgatcggtaatgccatcaaattccgcagtaacaaaccaccggaaattcatataggtgcagaaaggctagaagatgaatggttattctcagtacgcgataatggaataggcatagatccgcattttagcgatcgcatttttgtcatctttcaacgtctccacaccagggatgaataccccggtactggtatgggtttagcaatttgtaaaaaaatcattgaatgtcatcgggggcgaatttgggtagagtcacaactcggacaaggtgcaaccttctactttaccattccagcaggaggacgtgatcgtgagcgtagaaacggaagaaatacacaaaataatctttttagttgaggataacaaagccgacattcgcctcatccaagaagcattaaaaaccagttcactaccccatgaagtagtaacagttagggatggaatagacgcaatggcctatctgcgtcaagaaggtgaatatgccgatgccatacgccccgatctgattcttcttgatttaaatttacccagaaaagatggacgagaagtattagcagaaattaaatctgaccccaaattaaaacgcattcctgtggtagtgttaacaacttccaaaaacgaagatgacatttaccacagctacgacttgcacgtaaactgttacattaccaaatctcgcaacctcgcccaattatttcaaattgtcaaaggtattgaggaattttggtttggtaccgccactttaccaacagaataatattggtgattggtgattggtgattgggtaaaaataaatttataattcataatttgtaattcaaaaacttctgcctcctacctcctgtacgggcgcagtaggggcgaagtaggggcgaagcattcggaaaataacctgtgataaaaattgataatttatcgcccgaatgcttcgcccttacaggaaaataacctgtgataaaaattgataatttatcgcccgaatgcttcgcccttacgactcctgaactcctgaactcctgactcctgactcctggaaaataatgactgcaacttgcttggtaaaaatcttgttaattgaagacaacttggcggaagctaggttgttacaagagtttttgaagcaatccccatcaaaagagtttagtttagttcatgttcaaagattacgagatgcatttcatgaattaagccaacaaaactatgacgtaattttgttagatttaaccttacctgatagtcaaggattatcatccctacccttactaataagtcaagcacccagcacacctattgttgttcttactaatatcaatgatgaagaattagcaatagaagctgtgagacagggagcgcaagattatttagtcaaaagacaagtaaagccagatgttttagtgcgttcagttcagtatgcgatcgccagaaaacaagttttagaacaattacgcacagtcaatcaaacattagaaatcacagttgaagaaagaactgctgaactggaaaaagcccaggaactatatcagtttaaaactgaatttgtgtccatgctttcccatgacattcgtaatcctttgaatacgatacttttagctgcgggattgctacaaaacaacgatgaaaaattaacccaagagaaaaaattaaatcatctaaaaataattcgctccgcaattaaaaacatggcacaattattggatgaagtttcctttattggtaaagctgattctggcaaattacaatgtcaactttatcctttaaatttagaagctttttgtcatcaaatattagaagatactcatttaactgctttagagaaacaagtaactatagaatttaccagttctggtgactttagctcaactctttgggatgaaaatttattacggcatattttaggaaatatccttagtaatgctattaaatattcctaccctgatagcaaggtaaaatttgaattaaccagacaagaaaaaacagcaaccttcaaaattcaagattggggaattggtatttctacaaaagatcaaaatcaactatttattccctttcatcgtggtgaaaatgtcagcggtatttccggtacaggtatgggtttagcaattgtgaaaaaatgtgtggaagcgcatggtggtgaaattaaatttgaaagtcaaattgatgtgggaacaactttcacagttactttacctgtaatttaaattgaaatttaacgcttgacaaacattgctcgatacacaggttcacctttattttgcgttgcaatttccctttctgtagccacaggaagcgggttttctgctaaccatttttctgtacccattttctcaaatgctgggtgttcttggaagcgatcgcacatttccacggcaataaattcctgatcagattgcaaaaataccaccccacccacagccaaataactagctaattcttcaactaactctggttgtactactctccgtttagcatgacgagttttaaaccaaggatcaggaaattgaattgatacccgttgtaaaattcctggttttaaagtagataaaattggactcaaagaattattcacattacaaaataaataatgtaaatttgttaaacccaactcagaaactatcctatttgcttctataactaaaggttctctaatttccaaacccaaaaaattccagtttgtttctacctgtgccatctgtaataaaaacctacccctcgcacatccaatatctaaatgtaagggttgttgatactgtgcatagattttttcccatgctgggggatcaacaggggtttgaaattttctcgctagggggttaacgtgctgacgaactcgaatcacagccataataaatactcctttgactacttctgactactcctgtcactaaaatttcgctaataaaagttaaacatacaaatattaagtctggttgctagtacgtaactagacaaggcaagagttatacttttgtaaaaagggtatatttactctttcggctttaacatttttttaaatcaatggatatcaactttcgttttgctatagttagtgacttacacattgcactaccccatacaatttgggatcatcccagccgatttcatttagtggaagtcagtattcccgcctttgaaagtgtactagaacatttaacacaacttgatttagattttcttctgattcccggagacttaacccaacacggtgaaccagaaaatcatgcgtggttagcaaacagacttgctcaactaccttttccggtgtatgttattcctggtaatcatgatgttcctgtattatcagcaaacaaacaatcaatcgcttttgtagattttccccattattaccacaagtttggttatgaaaacccacaccaaccttactacaattgtcaaatcttgcccggagtgcggctaataggtttaaattctaacacctttgatgaggatggtaaacaaataggacgtttagatcagcagcagtttcagtggttagaaacagaactagcaaaaattaacaatgatttagttttggtgatggtgcatcacaacgttgtcgaacatttaccagatcaatcaaatcatccaatggcaaatcgttatatgctagaaaatgctccagaacttttaaagttactgcgtaaacatggagtgagattagtctttacaggacatttgcacgttcaagatgtagcttgtagtgatggagtctatgatattaccactggttcattagttagttatccccatccttaccgtgttttagaatttgaacgagatcatctaggtaaagaatggttacaaatagtttctcatcgcgtggaatcagttccagattttcctaacttgcaagaatcatcaaaacaatggatgggcgatcgctctttcccttttttaatcaaattactaactttacctcccttaaatctaccattagtccaagcacagcaactagccccagatttacgggatttttgggcaactatcgccgatggggatgcagtaatagactatcccaactttcctttagaagtccgtcgttacattcaaaaatatagtgcagttactcacactggacatcccagccccatagataataacagtaagctattgcttgggaattggtgattcaattttggattttggattttggattttggattgtatttcattaacttcaatctaaaatctaaaatctaaaaatttttccccagtcaccagtcaccttcttctacaaattgcaaaaactgaagtataaccgtggaggaaagttctaccactcacaggaccaatttcaccactacagaaacaaccacccataggaatgtcatggaaataactactaaataactgggaatcaaaattgggttttccgtaaagtcctgtaccacgtcccacacaactaaacattaacgcccctaaagcagaggatggattgctattttcagcttgatattcttgcaagagaaattctaattcttcagcagaagcttgagcatcccgcaggtgaaattgtaacctttgaccaggacggacacgatcgccaatagcgatcgccccagcggctggatctactcctagtaagttgcgaatgagaaaatcaccttgctttaaagaaagcttaaattcattcattgccaaccccacaaacaaagaatgctgcgccagcattttttcctcatcactgaggcgatcaattaaattccgcaacaccgtcaaaggaacttgttcatccaactccaaaataatattgcgttcagctttagtcacctgtaatggttcaccaatgggacggcatccttgagcgacaacactttccagcacaatatcaccactcaaagccacacccacagtaccttgacgatataggcgatcattgcaaaataagccgatgcgatcgctgccaaaacctccgccgacctgtccccccacaaccaccgaaccagggtaagcaaaatccaagccctgcaacaaatcattagttcctgaagaaaaagcactagacaacaaaataaactggggtacagatgatggtggcacacccactaaatcaatccaagcatctggtgagctatccaaatcaggtaactgatcgcccaaaatatgaaaagggcgaacatcgacaccaggaagatgcgccaacgtcaaactaatcgccgcttccccttctatttcctgaatttggttttctgagttcgtccccaccacacccgcagcaccacaaccaatcagcactggtacagacagcttttctgccagcaatggtagaagtcgggaatactcactcgcaaaagcagacgaaatgaataccagccccagatccgcaggtgctgttaaagatgaaacagcttgttctaccacatctgaaacagctgcttccaaagaatgacgggttgatagggcatttgcccactgcatttggtctgccatgattgctggacttgtttttgtgttgaggctagtagtttgtgttatcgagggagatattgcatcttatcagaattgacaagctgaatggggcgtttactcctatattcatttaaatattaaatatattgtatgcttctttttcggtagttataccctgccaaatctgaaaacattaagagaaatccgggtatagttgtggtaatttgctgtattagtaggcgataatcaccatcgcagtctaactgagcaactcagtggttagaatagtaagcgaacattaaagcaaaaaccgcaatttttgattttctctacttagtataaacaaaacccagcgagattaacgcaatgacaaacactcaagaaacaaccaaaaccattcaagaaacaattcaagctgaagttgaacaagctcgtgttgtctgtgatatttccggcagcaactccgcagaatgtgctgctgcttgggatgcagtcgaagaattgcaagcggaagctgctcaccagcgtcaaaataaacccaaaacctctttagaaacatattgtgatgctaacccagaagcagatgagtgtcggctttacgaggactagagatttagctaatcactcttaactaaggcaggaggcaggagtccgttattgtcatggggtttataccccctccaaaaacttttgtccttcaatagcattagcgtagccgcacgaagtccggttttagacccgattgttttgatcatctctcaaatcactggttataaacctgatcaggagacaaatcaagtcaaaagtcaaaagtcaaaagtcaaaagtcaaaattataaaacttctgtcttttgtcttttgcttgttgcctcctttagcgaaggtaggaggcaggatactgatagctgacggatgaatgcttacaaaatcaaccttaattctacggtattaactaataaaaactatgccacaactttggtttcgcccctatgtctggatggattatagattagcattattatttagcttaattattcccctgattcttctgatttgggcatttgtacaaaaagcagatggtatacaacgcttgctaataatttactggcgggttgccagtttattggccatcacagtttacttaatgattggtgggttggcagtcagttttatcactggtttaatggctcgtattctcattcccatttctctttggttttgggttgatatcaacgatgaaattgagtatcaaccgaaaagtattttgaaattcattttcacatcttggcgttgggcaatgacgatttattccctgttaggtgtaattagttttgcacctttcttaacctgtgctttttcagaaaatgccctcaaatctaactactgtagagtttggttagaagcaccattaatgtttaaagattatttccattataatagcaaaccagcttttcttgggtttttgggtataattggcttagtaatttatgtagtttatctcagctattttgtattagtgaaactaggtaaacatggcagaaacgccacacagtagcaaaataatgcaaatactcaattaacttgtaaaatatcattttgatgaataattccattggtaaaaggctagaacaatacaccgtcaaacgacctcaagaggttctattagtaaccatcaatattgctgatgaacaagataaaattgccgtgtttaagggtttttctagttctttgatgcgccccacagcttttgatccagatgtgcctgtcttacctgatgatgccataattgtggctattgaccgcatagccagtccttataattctgaatctccccgttatatacaacaaggtatttcttgggaagctatggaagctttattgttagaagtaggtgtttagtttaggtgacaggtgacaggtgacaggtgacagcaggtggggagatggggagatggagaagtcaggggtagcagggcaagtaaatatactaaaaacggatgattgctagacttttgcccaggcaaaaatctttgtatagcaatactcttagcgatttaaatagtaaggctgtaacccgtttttagtataacctaatcaactgtcaactattaactatcaactatcaattatcaactatcaattatcaattatcatgtcccgttctggttacactctccccgtttttgctggtgctgctgctattgcggctttacattggttgcgtcatcgtcaaccattaaatgtaattaatattgatttaattacacctgctgaaatagcagaaataccaattgaacaagtagcgggaatatcggaaaatgcagctttagctattactcgcagtgatccgggtgataatctagacttaacaaaaaatacaccaatttgggcaacagtagaatggtatcacggagaaggtgaaagtgttgttattaaaggtggagaaggagttggcaagcaaattaatggtgaacaaaaagctgcaatttatacttatgctcaaaagttgttaacggaaaacttgcagcgacttttagcaccaggggaaaaaatcatcgtcacaattattttaccagaagggcgatcgctggcggagagaacttctaacgctgcttttggagtagttgaaggactatctttattaggaacaagcggtatttcccaacctttaagcacaccagatcaactaacagcttttcgcagtgatttacaaaaaaaagctagtgagtttcaaagtttagttttttgtattggcgaaaatggcttagacttagcacaaaaacagggaataaacccgcaacaactggtaaaaaccgccaactggttaggacctttattagtagaagcaaatcttttaggagtccaagaaatcttattatttggttatcacggtaaactaatgaaattagcagggggaatttttcacacccatcaccacctagcagatggccgacgggaaattttagctgcccattgtgcgatcgccagtttaccaacttcagagatacatagagtatttcacagtcccaccgcagaagcagctttaaaacatctccgagacttagatagcaaaactgctagtaattggactgatcaagtttatggcagcattgccgaaaccattgatactcgctctcaagaatatatcaaaagtcattgtgaccgagatattaacaccacagtatgcggttctgtgcttttcgaccgcaaccgagaaattatcatcaagagtaaaactggttgtgtcttaatggaaaaattatgttaacttaatatgaataatcataaataaagcaaataaataattttttgtatacctactccagagtgatttttcgcggttaataataagccaaatttatcggctcaataggtgcggccatagtcgtatctatatacagtaatatatcagtataatgtagtacacactttcataatatttacttatgtgggttggatatccttacccaaccttgtgtacctcatcaacatgaaatttgctgtattttaggtttctcgaccattattagcctaaaaagctattagcccaaaaagccgaaaatggtaactgacgtttttactatcaaagacacactctcaccatcatgaatacagcggtgactctaccaaccgaagcagcaccccaaactcaggaaaatttggggcagttaaatcgccaaatgattgttattctagactttggttctcaatattcagaactaatcgctagacgtatccgcgagactcaagtatattctgaagtgctatcctatcgcaccacagcagaacatttacagaaactcaaccccaaagggataattttatctggtggtccaaattcagtttatagcgaaaacgcgccccattgtgatccagaaatttggaaattaggcatccccatcttaggtgtatgctatgggatgcagttgatggtaaaccaactgggaggagaagtcaccaaagcggatcggggtgaatatggtaaagcatcattatatatagatgatcccacggacttgttaaccaacgtcgaagatggtacaaccatgtggatgagtcatggtgactcagtgacaaaaatgccaccagggtttgaattattagcacatacagaaaatactccctgtgcggccattgctgaccatgataaaaaattttatggtgtacagtttcatcctgaagtagtacattccctgggtggtttagcattaattcgtaactttgtttaccacatctgcgactgtgaacctacttggacgactgcggcttttgtagaagaagcaattcgggaaattcgcgctagggtgggagataaacgggtattattggcactttctggcggtgtagattcttctactttggcatttttgctacataaagctataggtgatcaattaacctgtgtgtttattgatcaaggctttatgcggaaattagaaccagaaaggttgttaaaattgtttgaagaacagtttcatattcacgtagagtatgtcaatgcacgcgatcgctttatttctgctattgcaggtattaccgatccagaagaaaaacgccgtattatcggtcatgaatttattcgcgtttttgaggaaacatccaaaaagcttggtcactttgactatttagcacagggtacactttacccagacgtgattgaatctgctgacactaacgttgacccgaaaaccggtgaacgagtagcagtgaaaattaagagtcatcacaacgttggtggtttacccaaagacttgagatttaaacttgttgaacctttgcggaaactctttaaagatgaagttcgtaaagtaggccgttccattggtttaccagaagaaattgttcaaagacaacctttccccggtcctggtttagcgattcggattttaggcgaagtgacagccgaaaggttaaatattttacgtgatgctgatttaattgtccgtcaagaaatcaaccaaagaggcttatatcacgactattggcaagccttcgccgtattattacctattcgtagtgtgggtgtaatgggtgataaaagaacctatgcttaccccatagttttacggatagtcaccagtgaagatgggatgacagcagactgggcgcgtgtaccttatgatgtgttagaggcaatttctaccaggatcgttaatgaagtgaaaggtgttaaccgtgtggtgtttgatatcacctccaaaccacctggaactatagaatgggaataggtgacagttgacaggtgacaggggaagaaaattttagattttagattttagattttagattggagttaacaaaaacaatccaaaatccaaaatccaaaatccaaaatacataactcctgcctcctgcctcctgctataatataagaaacttggtaatattaaatctagtgaaaatgaaattatcaagaatgtaaattgaggctagtataaatatgacacaagaattaatagacctcagaaatagtattttagaacagcgttatacagatgcgttagctatagtagacgaattagagggaatgagtagacaagcaatttttaggaatatccaatcattcctagtaagattaataattcatttgattaaaaatcaaatagaaaaacgcttaactaattcttgggcaaattcaattcgtggttcagttagagaaataaaaaaaataaatttacaggataataaaacctcctattatgtgaaaatagatgaatggcaaccaatcttagaagatgaatttgaagaagccattagagatgccagtgaagaagtaataaatggtatttacagcccctttcaactgacagaaatggtagataaagaacaaataattgaacaagcagaaaatttattaagactcacttataattactcagttaaagagttgccagcagtcattgataattatttaactcaattaccaggtggtgaaaattggaaattaggaaaaaaataaaattaactctcttatctttgcgttatttgcggtttaatcatatcaagacctgatagaacttgaagaatatttgattaactatttcctacctcctaaaaaatactttttcagcaacccctaattatgtatgatttcaagtatgattcaatcttatgaacaacaaggaaatatcatatttcatggtgacacaattaacgttttaaagaatcatatttcctcagaatcagtagatttaattattattgatccgccttataatataggtaaaaagtttggtgattttcatgataaatgggaatctgaagcagaatatttaaattggtcctatcaatggttagatgagtgtgttcgtattctcaaaccaaatggcacaatttatgtaatgtctagtacccaagcaatgccttgttttgatatttacttgagaaaaaaattaactattctcagtcggataatatggcattatgatagttcgggagttcaagctaaaaaatactttgggtcaatgtatgaacccattttacattgtgtgaaagataaaaataactatacttttaacgcagatgatatcaaaattgaagcaaaaactggttcacaacgtcaattgattgattacagaaaatctgttcccactgcttataatacagaaaaagttcctgggaatgtttggtatttttctcgtgtgagatataaaatgaaagaatatgaaaatcatccttcacaaaaaccagaatcattaatagaaagaatgatgttagcaagtagtaatgaaggagatttaatacttgatccctttgcggggacttttacaactgctgctgtagctaaacgtttaggaagaaaatctattagtattgaactgcaagaagaatatttaaaaattggtttaagacgagttttagcatggacagaatatcaaggagaaaaacttttataaaaccgaaaaaatcaaatatacaggagtagaatgactaataatcaatggttaataggtaaagaatttcgctttgaggcagcacataagttaccttatcatgacggcaaatgcgcccggttgcatggacatagttggcgtggagtcgtttatatatctgctaataccttagtgcaagcaggtgctaaacaaggaatggtgatggactattcagatcttaaaaaatatctccaacccttactagataattatttagatcattattatttaaatgaatctacgggtttggaatcaccaaccagtgaagcaattgcggcttggatatatgataaattagaggaagcgggattaccaggattaacagcagtgagaattgatgaaacttgtacatctatctgtttgtattctaaaaatcgcagatcaggctggttaaattctggtgaaagtttgaatttactgctttctcgtgaaagtgatgatgacggtgatattaatttaacaaccatcatttaactagaaattggcaatttaatggtgaaagtagcgcccttatccacaccaggactagaggcttcaattgtacctccgtgtaattctactaaatgacgagcgatcgctaaacctagtcctaaaccgccttttttatgattgcgttcacctatggtgggggatagcccatcgcattgatgatagcgttcaaatacgaagggtaaaaactctggactaataccaattcctgtatcactaaccgtaatttgagtatatttgagttttgtaacttgatcgtcaaccagtgacagtttcactttcacccttcccccggaaggagtgaatttaatagcattggcaattaaattacccaaaacttgcagtaagcggtgagcatctcccctaataagtggaattgactcagcaattactgattctaggaaaatattttcagcttttgctgtgggataagcagtttctatagctgtattcacaatagacaccagatcaacttgactgacttcaagctgtagcttgccccgtaggatgcgggaaatattcagcaagtcttccaaaagtttggcttgggagtgagcatttcgttcaataatttctaaggcacgattgatagtatgtgtatctaaagaccgagttcgcagtaagtttgcccaacctaaaattgcattgagtggcgatcgcaaatcatgggataccatggccacaaagtcatcttttgcttggttcgcttgttcagcttccagacgggcagctttttccatttctaaaagccggaccctttctgcctccaactgcttgctatcttcaatatctgtactcgtcccaaaccacttgacaacccttccccactcatccttaatgggtactgctctcactaaataccagcgataaacgccatcatatcttctcaaacgcttttcaaattcataaggtttccctgtttgtaaagctgttaaccatgcttccatcgcaatgggaatatcatctggatgcactattttagtccagccaaatcctatcacttgctcaagggtttgtcctgtaaaatctagccacctttgattgacatgaacgcattcaccctgagtattcgctatccacaccaattgaggtatggcatcagataagtaacggtatgattgttcactttggcgcaatgcctcttcagtttgtttgtgttgggttaaatccagaacaaagcagacactatagccatttttttcaccttctatcaaggcaattgctaatagcactggtatacgagaaccatttttgtgaaaatactgtttttcaaagggagtgcaaattcccaaagtttgtagttcttgaattttttgttggtctagatttttgtattctgaaggtgtcatcatatcccaacgaatactgccatttgcaaattcttcacgggtgtagcccaatattttcagaaaggcatcattagcttcataaatttgcccaccgatgtcaccaaaatagataccaactatattagattcgacaattctgcggaatttggcttcactttgtcgcaaccgttcctctgcttgttttttttcagtgacatctcgccaagaaaccacacagccatctttcattttggcaatacgaaaatcaaaatatctagctaattgcttctgtttagatttgcagataaattgttgtgattctttcattacaggattgcctgtttctataactcggcaatattcattaaatataccactagttcgataagcagggagtatttcacacagtcttttatctattatttcttcttttgtgagtctgtgacattcacaagctgctgcatttacataatcaatgcggaaatcaattatttcaccgttttggttgcgaatggccgaataaatgccaaagcaatcgagcatattttctacagaagtacgaaaacgctcctcactgcgttgtaattcctgacttaaattaacgtttttaatagctgaattgacggttgaacataagagttctgctgttgttttacctttgactaaataatcttgaacaccactttttatagcttgcacagcaaccgcttcattaccataccctgttaacataattactgctggtatattgccctgagtttgctgttttaattcggtgataaattctaatccatttaagtcgggtaacacaaaatctaataaaattccatctggttgaaactgccgacataaagctaatgcttcctgtcccaattcttcttcaaaaattgtgtagatatattcctgatcctgctggagataacgacgataaacttggcgatcttcaggggaatcatcaacaattaaaacagttcgtggttgcaccatagttattagttaaaagtctcaggaagaatgacaatatctagccaataggttaaaaaaacttgaatagttttaattagtcttttgatatctataggtttcaagatataactagcaaccgagtattggtaacatatatcaatatccttgggattagaagaagtggtgaatataacgacaggaattttttttaaattttcatcctgtttaatttgttgtaaaacttctctaccatcagttcctggtaaattcagatccagtaaaataattgctggatggggataagtttggatgtcaccatatatgccattatgatataggtaatcgagggcagtaaattactaatgagatgattactaatgatattgttctgatttatttgattcataatttatgattatacttactgataagtatggaaaaatcaatgtataaattatctacaaacacaggacgtaatcaaatacattggtagagaatttagaaatttattttttttacacaattttttacaatctttgtttatggaaaatctattgaaccatattaatattataccgaatcaaggcaaaaattttgtgtttttggagcagggtttaaatctccgtacaataagcctcctgccttctgcctcctgccccctgccttcgttaagttgctccattttcaaaggtaatactttcagatttgtatgctggtggctcaacatgaattaaaattctcactggactaaagcgttgttgtagttgactttctacttcttcggtaatattatgagcagtttctacatctggtgcatctactattaagtgcatttctataaaaacttgacgacccaaaacaccacgagaagcgatatcatggcaattaattactccgggaacagaaattgcgatctcatgaatagcttcaggtgcgatcgctatctgatccaccaaccaaggtaaattctcttttaaaactgaccatccactccaaaatactaacaaagctacgggaaaagctaacaccacatctaaccattgaaaatttaaccaccaaattcctattaacccccccaacacagaaatagtcacccacacatcactcatggtatgtgtagcatcagcaattaaaattgaactacctacccgcctaccaacattacgttcatagaacgccacaaatatatttactcctaatacaattagcaataaccacaactcagaacccgatattttcacaggtgaaccacctttaataattctctcaatagctccttggagaatttcaaaacaagctatacctaaaaaagccgctattcctaaagctcccacagcttcaaatttatgatgtccgtagggatgctctcgatctggacggggggaagaaaatttactagcaactaatcctaaaacattattggcgctatctgtcacactatgcaatgcgtcagccaacaaactcagagaacctgttgagtaccccacaaatgctttgagtcccattacgaataaattgaggagcagagtaataattaaaacctttttaacttccgcacggttatcgtaagtcatagcacattgatcatatcacgatctataatttctactttaagacctaaagcaaaaataaacacaaataaaatgtatcaaagtcttacgcagtaacgaatattcttctccataaactctcaatttttcgcccaattattgagattaattttaaataaagtcagctaaaatcccatacccataaaaaaattgtcaattgtcaattttcaattttcaattgataatatatgtaattactaagaagttttaatcaaaaagccctatgtcttctacccctttaacattaaatctaggagatggttctatatctttcagtttctcacccgcagcagcaagagaattaaaagcagcaatagatcaattaatgctcagtctcaaagctgttgcagctaaacctacacctggtagtaaagttactccccaacctcctttagagtatcgctacacaggagaggtatttttagaagttttttgtaatcccaatatctggcctactccctttgcagcaaaagtgctgttaacagttcgtaatgttggtattcgcttaaccacagaagctgaactcactcgcatgattgaggatattaaccagtatttagaacaggtgggataggtgattggggactggggactggggactggtgactggggactggtgactggggactggtgactggggactggtgactggtgactggtgactggtgactggtgactggtgactggtgactggtgactggtgactggtgactggtgattggggagaaatatttaccttctgactcctgactccttgatctcctgactcctgactcctgactcctgactccttgatctcctgacaaaaaatatacttgcccaaagtcatgaactctggacaagtataaataaaataatgactacttattcaaaatcacgatggggaggctcagtccatcgtcaatatcgctcactggaaaagtagtataaattcagactttaattgttctgtgttcatagttgagaatagatgatggacagggaaatatttcctgttagatccacacatcaaaaatcaacacccaatttaaaaccaacctttgattctaattagtcgttttcccattcttcacgaccaattaaatccccaatgcgatcgcgcaataaaaagtcacacttctccaattcatattcaacacaaacccactctctagcagggatgtattggcagagtgtatatattggctgttgacggctcaccattcccttctgcaccagttggcgtgcttcgtcctggattacgtcgagagagtagtaattgatagaaggcaccgtattcacactcattgtttttactcacaaatttacatttagatagtattcccaattttcatcaggaaagaaaatggcaataatttagacctttggctaggttttgtagtttgctatacggaactattatcattttgacgctatacacctataaattatctaaagaaatgttaagtttgtcaaggaagcacaacattaatattaactccatttccaattgtgcatcccaacatttagaatttggctgattggtaatgccttgcagctactattaacaggtttacactttaatatctatatacctatggttacaatttaatctagtattttctaaaattatgtatcaaaaaattattattgagattcccaataatcacttttagcccttgtaaagccttttctagctacaccgtcatggatttttaccaaaaaatatatctggtatcttgtaccggaaattggttatggtttgtccttttttatacattataccatacaggtgcgaccaatagatttgcaaaatttagatccatcaggctattgccaatccaacatctaaaaatttgaaatctgatcccaatggctaagttacaccactaaattttatagccagcatttgttaacaattttttaaacattttttaaacattctttaaacatttttaaactgtgctgctttctatttgtgactcttcgtaatcagtgatacaaaatttaattaaccaacaattcatcatatcattccattaagtatttttaagtttcttatttttaattacatcaacatacagcagattgcacatccatgaggtacaaacggaacaagcaaaacccaagccgcaaggatgtttcacctcctgccttctgccttctgccttctgcctcctgcctcctgccttctgccttctgctataattaaacgtaaaatagatgatagaaccccgattttttaaagaagtcggggatctggataagctgttacacagctaaattgtataatcctaatattctgaactcttgtggaacaggcatcttgcctgttccacttatacaaattaaatgcacaacagcttatttaagttaactattgggaaaaattttcctcatcttctgcaatgctttctgtttgacgctcctgctgaagttggtttaataaactcagcactttagtaccacgttcaagagagcgatcctcaacaaagatcacttctggagtacgacgcagccttactctagcacctagttcactacggacataaccagttgctgattttaaaccctccattgtttcagctttagcttcctgggtcccataaatactgacgaaaattttagcgtgttgcaagtcaccggaaacatctacatcggtgacactcaccattcctgtacccacacggtcatctttaataccgttgagcaacatttggctaacttcccgtttaattaattcagcaacgcgggaaacgcggcgatttgtagccatataaattccgccttctcacagaggttttacgatatgatatagatgcaaattcaggataatagctgtaaaacttacagcaattgtcctgatgtttaaaccctattcaggttttagtttagattgtactcaaacccagcatcgcccggagagtcaaagttacgaaaaagaaccctcctactaataaaccaagcactgctattagagtacctgggcgttttaaaaaaggcatcaatggctgaaaggtattcagcaaaagacctaagacgatagtaaccaagtaccgggggtagcgaaatacgttatcccaaaatccatcaaacatttgaatatagactgccttgttataaactatagtttgttttcaggtgcttatttaatttaattgtagtctatagggttgaaaattgctcaattcatataaaataactaattggtaataggtaattggtaatgggtaattggtaattagtaatttttattttaatagaaatatagaaatatatatgattagtaaagtttctcaaacaacttacccgcgtccttttttaaagtgggcgggaggtaaaggtaggttgatttctcaatatcaaaaatattttcccacaaattaccagcattattatgaaccctttttaggtggaggggcggttttttttcatctccaagcacaaaacatattttcccaagctgttttaactgatattaatactgatttaattacgacctattgctgtgttagagatcatgttgacgaattaattgaacgtctacaaaaacacaaggaaaaacatcataaaaatcatggagattattattataaaatacgttctaattcggaaggaacagatttacagaaagcagctaggtttatttatttgaataaaacctgttttaatggtttatatcgagtcaattctcaaggtaaatttaacgttcctttgggtagatataaaaatcctggtatttgtcaagaagatgttttaagacttgcatcaaaagcacttgctacagcagacattgaaaacgcagattttaccacagttttgaattatgctactagcagtgatgattttgttttttttgatcctccctatcaacctctgagtgaaaccagtaattttacagcttatagtaaatatttatttggggaaaaacagcaacaacaattaagagatgtatttgcagaattagctaaacggggtgttaaggtaatgttagcaaattcagattgtgattttattcgtgatctttatcgtcggtttaatattcatgcaatttccgctgccagatccattaattctaatgctaataagcggggtaatattagtgaggttttagtgacttcttattagaggatgtctgaatcagacaaaaaagattggaagtaagtattcagatatagcaatttttgatatccagatccctaagtaatattgttaattttctgcgatataatctacaaaatcaggaatttgttgatgatctggcaacttttgtaaaatttctttctcatcattaaacttgcgttgagcgatcgctatttcctctggtttattactagaaaatgtcaattgtttaaccgcttagttttttccatactgatccactgctaaatacagcagtttccgttattatgaggtacagatattaatgataaaacccttgtaacacgggcatacttcgactccgcacttcgacttacttcgacttacttcgacttacttcgactgcgcccttcgacaccgcccttcgactgcgcccttcgacaccgcccttcgacaccgcccttcgactgcgcccttcgactgcgcccttcgacaccgcccttcgacaccgcccttcgacaccgctcaggacaggctcaggacaggctcaggacaggctcaggacaggctcaggacaggctcagtacaagtcgctcagtacaagtcttgcctgttcatagtgtacctcatgacactgggaagtgctgttaagttgtcccaaaattaccacttcctaaaattttgagcagttgatattttccaccgacattattcataatagcaccaccatcacagagatgatccccttcttcatcttcagcatgagtaaagattaagaaattttacttgatctatactataccaaatatgctatgattggtgaaatttaccttggttgatttattaagtatttttacggtaatgattccggggtaagatccccgacttctgttaataaaccataatttcttgtcacgattaaataaaaaattcggggatctgacggggaatttttcaaaaagtcaaaataaaattaatcaaacaggaaaatcatgaacaataaaattcgttatcccctactaagtttaagcgtcttatttattctcatttatgctttcatcccatccagtagacaatatttttcatatttcgtagttttgggatttgccgtattaactatttatttaacatgggatggttatgacatcagaaaaaaattacaaaatcaatttcaaccatctttaaaacaagggatagcgaatgcaattaaagatgtttataatcgtcatccaacaaaatatgaacaaattaataaagcagctttaatagacagtgtgacaaattctcacttacaagattgggaaaaagataaacgttattatcaatcgttacccaatttcctcttatcaattggattatttggtacttttttaggaattactttaaatctgttattgattagcggtaatctaggaggtgaagtagacatacaaacaattttaccaaatattgttaactcaatgggtgtagcttttggtagtagtttatttgcattagcttgtagtatttttttagttaaattttacccagtatcagaattagaaatagaaaaagaaaatttaatcatctccatagaacattccattgataatgaatttttgctaaacagtcaaactaccagcaaaatagatcagttaattacatctattaataactactctgatagcttaaaaagtttcctttcaggtttagatcaaaacaccaaaaaatttgcaactgcgatcacggaagctacagataaaattaatacttctgcaaacaactttcaaactattgttaatcaatcttcccaaaccatgcaaacaggagcaaatgttttaagtaatgctactgctaatatagcaaacttaactacaaaatttgttgatatttcctcatccttactcacatcatcacaatcatttgaaaaatctatatcttccctagaaaaatatggagatagtttagaaaatctcagtgatagcttaatcaataattcccaacaaatccaacaattagctcaaaataatacagataatataaaaagtctcagtaacacattaattagtaattctaacgatgtaaaaaacctcatacaaaataatcaacaaaatctcactaccgttacagatcgtctcttgcagaatgttaacagtatttccacatctacccaaacatttaataataatgttaaccaaattgtcacatctttaaatcaacatagtttacaagtaggagaatataatacaaacctccaacaattagcaggattaatcaacaatgcaacccaatcatctaataataatataccccaattagcctctatgttaggaaatcaagttaatcaattacaaactaccgccaaccaactcaatcaaaattcccaaatgttgcaacaaatcaatagtaacctatctgtattattaaccaacttccaacaattccaacaatcacaaaattaacaaatataaaattaaattaaccagatccccgacttattttactattctgtcaatcaaatataaattgatagtagaagtcgaggatcttaacccagaaaatttgaacctattgaacttaattattatgcaaagaagaaatcgccagaattctaataataatagcgaaacctttacaatttggacatcctttacagatttaatgtctaacgcatttatgattattaccttattattagtatttgtggtagctcaaaaaaaaccaccaccaccaccagggatagtttgtgaaccgaaaattattaaccttccttctgaacaatatagttttgaatcagggagtgcggttttaccaaataacttaaaaagtgatattttgcaaggtaacaaaccagggaaaatattaaaattaattgaagaaaccctttctcaacaagaacaatgtaataatgaaactgaggtactagaaattataggacataccgatgatcaaccagtaaattttctcaactgtaataaccctaataatccaacattaaaacctttagataatcacctagaaaatgttgccacaggtaatcaaaatattaacaccttatgtcctcgttctaatgctgatttaggtttaatgcgagcattatcagtagtcaaagaactgcaaaaagcgcaaaatcaaactagattatctcgatttaaaaaagtccaatttagagcatattcagcagcacaattatttttaccagaaaatcaaggatttgctaaaaaaaatacgagaaaagatccagcaaccagaggtaaacgcagaagaatagaaatcagatttgcacaattgggagagtacgttacaccagatgaaaattgataaaaattgaaaataaaagcagttaagctgttgtgcaaatttaaatatcttttaaatatcttttaaatatctgctattaactgacttaaataatcatccatgatagctggtaattctttgggtgaataggtataagtgagagataaaaatgtaattgctgtgttgataacttgctttctatttactatagttgatagttgagaacgagtatatttaccgttcattatttctaaactagcatctgctatcgcatcttctataactgattcttctattaaattttcccattcatcttcattgatgtaataggattttttgttttctttgagattgatttcttgaatttctctaattgaattacgaatagaagccatccaagaatttgttaatcttttttctatttgatttttaattatatgaatgagtagtatttttaagaatgatttaatttgtctgattattgcttttttactcattccttctaattcatctacaattgctaaagcttctgtataatttccttgtaaaatactgtttctgaggtctattaattcttgggtcatttttagtagcctccggtttattttctatattgagaataacataaattcatactattaccgctattttaaacttttatctgtgtttatctgtgtttatctgtgttaaattatagtgataaaatttcgcacaactgggagagtacgtcacaccagatggaaattgatagaaattgaaaataaaagaagttctcatatattttaccatgccttttgtattcttcctttgcgtctttgcgtgagatatcaaaaactgactactcactggtatgataattaatctgcaaacaaacacccattaacaaaaccatgacaaaaaactaccgtatcaccctacttcccggagatggtattggaccagaaataatggccgtagcagtggacgtgctaaaagtcgtcgctaaacgctttgatttgaactttgattttcaaaccgccctcatcggtggtgcagcgatagatgaaaccggtgaacctctaccatctgcaactttagatacttgtcgcagcagtgattcagtattgctcgctgctatcggtggttataaatgggacactttaccatctgataaacgtcctgaagcgggtttattaggattaagagcaggtttagaactttttgccaatttacgacctgctaaaatattaccccaacttatagacgcatccaccttgaaacgggaagtagtcgaaggtgtagatattatggtagtgcgggaactcacaggcgggatttacttcggtaaacctaaaggtatttttgctacagaaaccggagaaagacgtggtgtaaatacgatggtttacagcgaatcggaaatagagagaattggtaaagttgcctttgaaactgcccaaaaacgcggcggaaaactttgttctgtggataaagccaatatattagatgtatctcaactttggcgagagaaaatgactaagctggcttcagaatatccaaatgttgaattatctcatttatatgtagataacgctgccatgcaattagtccgcgcccccaaacaatttgatactattgttactggtaacttgttcggtgatattctttccgatgctgcggccatgttaactggtagtattgggatgttaccttctgctagtttgggagcttctggacctggtgtatatgaacccgttcacggttcagcccccgatattgcgggacaagataaagccaaccccttagcacaggttttaagtgcagctatgatgttacggtatgatttagatcaaccagcagcagcggatttaatagaaaatgcagtgttacaagttttacaacaaggcgatcgcacaggagatattatgtccccaggaatgaatcttttaggttgtcgcgcaatgggtgaagctttaatgaaaattctggaaacaaaatagtttggttgtactagaagaaaattttagcgttttttgctaaaagtttcagatacactagaagcaaatctatcaataacataacaactaatagtgtacgcttcacaacaaggacaaggaaatttcaccaccccagcaaaccaaacccctttggtagatcccaccgtgatcaaagccgctgggcaaatttactatacctactgtgaggtacatcctgaaattgtggggcaagcttcaggagtagcaattagtcgcgtcactcatcggggtaaagtaatttttactcagcaacccattctcttaccacaggaatgttttatacccttacaacaaattgaatcgtatatgtattaggtgattggtgactggtgactggtgactggtgactgggaagaataactaatgactaatgacaactgacaatatggacacattagacatctccagaaaagaaattatggaacctatttatgggggctggtcgaagcttatgggatatctagatgtctgatttttccgttaaattatcgcccataagcttcgcccctacaatatattacaaattaatacattctattttggagaggtttattgattttcgtccctgctagtatcattgtcttcgctttgggggctgctattggtagctttatcaatgttgtagtttatcgcctacctgcgggattatctttactttggccgccttctcgctgtcctaaatgcttaaaccaattaaaagcttatgataacgtacctgtgtttggttggttgtggttaaaaggaagatgtcgttattgtcacaccaaaatttctccccgttatcctgtagtagaggcgataacaggaattatatttttaatagtattttgggtatttcaattttcagccttaacaattggttattgggctttttgcagttggttattagctctatctcttatagactgggatacaatgattttacccggtcaacttaccaagtcgggattggtattgggcttagtttttcaaatgggtttaggttttttaacagaaaatagctgggtgggtgggatcaaacagctaatgtttggaataggtggtacagtcttgggcttatggctgtttgatagcatctcaattttaggttatctagcctatggaaaacccgtcatgggtgcaggtgatgggaaactagcagcgatgatgggcgcttggttaggttggaagcatctgctaatagctagttttatggcctgttttttgggagtattaataggtggaagtgcaattatggtctcacgccatcaaatgggacaaagaatgccttttggtcctttcttagctttgggggcggtaattgctgtttttggtggtgaagagattttgtcttactacctacagtttgtgctaccaccatcttgaaatatatcagttaagtaggaggcagaagggaacatcccaaatttgtaaatttatttttatctaacgtaaaaatgctccaaaaacctaatatgattgaaccgcaaagaacgcaaaggacacaaaggtaagagattttcagagagtttttggttttagtgcggttcttttttcaaaattgggatgctcccacacagaaggcaggagggacaaggtttttatcaattttacattttgttacataccttggttttttcgtgccgacttacttatagcaggagtcagtacgaaggcaagaggcaagagtttattcttaccaattacttgttcccagtcaccaatcaccaatcacctattatcatcaaattcaaactttaaaatcacttttctttaatattagatttaaatgctttttattctcatcctcagcaacctacaccctccatgactgtaaccacatgactgtaaccacatgactgtaaccagcattacttcattggatctttatattttggtaagattaacctgtgaattgtattacagtccaataatacttttagcagttggcaaatacaactaatttcataaatgctgatggcttaccattgaataataaaaataatgtattgggaggaagattcattttcatgggggttttgtattttcacacctttgccgatacgttgatataattaagtcccctgacacgttgggaaaaaagttgtattggcagcagcatttttattaagctatcaaccaaaaaatacaaaatcaagtcgaaaattagttacaagcgtaatttggtgatttagtcaagccaagaaaaatcatcaggagtcaggagtcaggagtcaggagtcagagtgcttataaaatcagaaatagagagaagcaagattttagcaaaattatcaaagctgacgctataaggcgttattattctgacttctgtagtctatcttctgaatacttacctcaaatccacaattcacaatacccgctccagcagtgggtgaggtcaatctaaaatcccaaatcccaaatcccaaatcccaaatcccaaatcccaaatcccaatattgattgacctgttttgaatctcatacctacttaaataagataaaaatggcaaacaacgaagaatcacgcggtttaaagtctctatttgattggtttgcaaatcgtcgtaaatcaggatctccccatttagaaaaacaagaacgggaaatagccgatggtttatggcacaaatgcgcgaaatgtggtgttttggcttatgctaaagacttgaaagctaatcaaatggtttgtgcagaatgcggtcatcataaccgagtcgatagtgatgagcgtatccgtcagttaattgatgcaaatacttggaaacccatagatgaaaatttgcgtcccactgatcctttaggattccgcgatcgcaaaccctacagcgatcgcatccgggaaactcaagaaaaagtcggtttaatagacgcagtaaaaaccggtttaggtcaaattaacggtttacccatcgctttaggagtcatggacttccgctttatgggtggtagcatgggttctgttgtcggtgaaaaactcacccgcttaatagaacaagctacacaacgccgctatcctgtagttatcgtttgtacctctggtggtgcgagaatgcaggaaggaatgctgtccttaatgcaaatggcgaaaatttccgctgcactacaacgtcatcaagatgctcgtttattatacattcccgtcctgacaaaccccaccaccggcggcgttaccgctagttttgctatgttgggtgatatcatcatcgccgaacccaaagccaccatcggttttgctggcagacgagttattgaacaaaccctgcgggaaaaactacccgaagacttccaaaccgctgaagacttactcaaacatggttttgtagatgaaattgttccccgcactcagttaaaaaataccttggcacagttaatatctttacaccaacccatgcccaccgcacctaacatggttttgtgggaaaccatgacattaacttctacaggggtagattaggtgattggtgattggtgattggtgattgggttcttaatcttcccctgcttcccctccttcccctgcttccccatctctactgtcacctatcacctgtcacctattcctttacaaacacaagcgggatcaatgctgccagtctgcaaatgctagaaagggcaaataaacctaataaaccgccaaaatggggagattgggcgataaaaccgccgatagttgtccctaaagcaccagtgacaccggcaatagcagcagcgatcgcaaaataaatagattgatttcttaatggtgtaacaccaatctgcaaattattactacataaatccaccgccgccccagtaccaccgataaaaatatgtaatagtggtagccacaaccaaatatctaaatttctgtcaccaattccaaaccaaaataaaggcgtaactgcaacaattatccccacaaatatcaaaatcagacgatttcctaatttatctgctaacctaccccacaaaaccaccattagcaaacttgcccccgcttgcaaactgctgtaaaccgtcacccaacccacatctatatttaaagtttccagcagataaagatttacaaaaggggcgcaaagattaaaagccaacatccataaactaaaatacagtaaaaatatccaaaaatgggaatttttattattttccttattgtagggtaggggtaattcatgaattacccctactgattcatgaattacctctactttgtctttattttgcgtaagtcctatataagtattttgtaatttttgtaattggggattaacatcaatttgaaaatactgacaacctaaactaactaacccaaataaaatccccaccaacaaaaccaccccataaccttgaagagttcccccaaaccaatgagaaacagcaaaacccgctaaaggaacacataacaaattagttaaactggccgcactattacgtattccaaaatatctaccccgcaacctgcgaggaacaataattgctaaccaactcatccaagatgcacatcccaaacccccaacaagatgactaaaaaagacaattaccagcgttaatatcaccaactgctgagaattgatcaatccccaactcttacagataatacctattactaaaaacagccaaaataggcgagaaattccataaaccagcgccgaatatcgaaacctgctagtagtgcgctctgaaagataagcacctaaaggctgaattagatttactagcatgggaattgaagaaagcatcccaaaaattaccggactagcatctaattccaccaaaaaattactaagtaaaatccctccagtagtaatagaaaaaatggttgctaaaatagcatcataagtagaagcttgtaaactggtacgaatcgcatttttaggaaaacgagagctagattgagattcagaagataagacggtgtttaatgaatcaatctgaggaatttctagatttaaagatgcagatatttcaactttaaccgagtccataaactagcgtctagcggtgacgaaatgagtaaaatttccgatcatgataattgtttgttattctatctaccatttctcaacaaaaatttagactgcttaaagatcagtcttgagttacgggagtatcccaaatgtgtaaattgatttttgtctatggaaataatctgccctaaagcttaatataattgaaccgcaaagggcgcaaaggacacaaaggtaagagagtttaagagattttttagtgttgctgcggtcattttttatttcattgggatgctcccggagttacagcatctataaatgagaaaataaaatgagaaaataaaaagttttatctgtcttatctgtccatgaacaaatacaaatggttaaaattctgtatattaattatcacagtggctatcattgtgatcagttgtcaccaattaccacccagtaaatcagcagttactattaaactcagtggttggggtggttcacctgtagaacaaaaacttttaaaacaagtattacaagattttgaaatcaaacatccccaaatcaaagttaaatatgaattaatttctgatcaatatatggatgtcattaaaactcgcttaattggggatactgcaccagatgtattttatttagatgctgtagaagctccatttttgatgagtaaaaatgttttagaacctctcaataattacatcacagataaatttgatttacaagattttaatcaaaatttattagaaatatttaaagagcataaccatatttatggaatacctaaagattattctaccttagctttattttataacaaacgatccttggaaaatgcaggtttcaataaaccgccaactacttgggatgaattattaaattactctcaaaaattaacaggtaaacttaatagatacgggtttggagaaagtccagcaatatcacgtcatgtttacaaaattaaagcttttgggggaaatttaattgatgaaaatggtaatgctacctttgctagtgaaaaagctttaaaaggtttaaaattagtgataaatcaatatcgaaaatatcaaacatcagccttaccatcagatgttggtgcgagttcaggtacagatatgtttggacaaggtaaagtggcaatggtaattgagggaaattgggctattccttatctgcaagaaacctttccccaattagattttgctacagcagaagtccccaaaattaataatcaaaaaggcacaatggtttatactgttgcttatgtcatgaataaacaaacaaaacataaaaaagcagcttgggaattaatttcttatttgacaggtaaagaaggaatggaaaaatggacaggaacaggttttgctttaccaactcgtaaatctgtagccgagaaattaggttatgatcaagatgatttcaggtctgcattagtagcaggtcttgatgatgctactccttggcaacttgggaaatatccagcagtaattgtgaataattttgagaatcaatttttaagtgctttattgggcgaacaatctttaaaacaggcaatgttaaaggcgcagaataatgctaatcagcagatgaaaatgatggagtagaaattggattaaaggggatctgggtatgacgttttttaagtttgatttacttaattgagttatctttatttttagggagcatcccaattttcaaaaaatcaactcagcaataccaaaaactctcttaaaccctcttaactttgtgtcctttgcgttctttgcggttcattcatattaggactttgtagcaattcaaagattcccaaaaaatcgaattacacatttgggatgctgcctattgttgttgcacttgcaggaaaatatcaattatcatataatgattgaattatacatatcaaataaaacagaatatttataacccagcgatatgaaatcatccaacccagaaagtttatcaaaattcgtgcaattctgccaacaacatatcaccggacaggaacgcaaagaagcgcaaacatttcttgaccgcttttttcgtgcttttggtcatgaaggagcattagaagctggtgcgacttacgaagaagctattaaaaaaagtagtaaaactggtaaaaccggattcgctgatttagtttggaaaccccgcgttttaattgaaatgaaaaaacggggagaagacctcaataaacattattcccaagcatttgattattggacaaggttagtaccaaatcgaccgaaatatgtaattttatgtaatttcgatgaattttggatttttgactttgatattcaactagatacacctgtagataaaatatccctggagcaactaccagaaagggctggagcattggcatttatggaaatagggcaaaaaacccctgtattccaaaataaccaagtagaagtcacagaacgcgccgccaaacgcatgggagaattattattagaattagaaaaaagaggaattgaaaaattaacagcacagcgttttattttgcaatgtgtgttagccatgtttgcagaagatagacaacttttaccccgtgatctgttcatttcttgtgtgcaagattgcatgaaaggggcgagttcttatgatgttttaggtggtttatttcgggaaatgaatcaaccaggaattacacccgcaggacgttatcaaggtgtagattattttaatggtggtttattttcggtgattcatcccatagaattaactagggaagaattaaattttttagatgtatcagcacgggaaaattggagtaaagttcgtcctgctatttttgggaatttatttgaaggaacggtagataaaaaagaacgtcacgccagagggattcattatacatcagaagtggatattatgaaaattatccgccctacaattagccgtttttgggaagagagaatagaagcagcaaatacagttaaggaactttctacactgcaaatagaattacaaagttatcgagttttagaccctgcttgcggttcggggaattttctgtatttagcgtatcaggaattaaagagaattgaaatattattgttagaaaaaatccagcatttgagtaaatcaaaagacaaacaaatgcagatgggtttggtgacacctttacaattttatgggatggatacaaatccttttgcggtagagttagcgcgggtgactttgatgatagctcggaaaattgccattgataatttacagttaactgaacctgcgttacctttggatagtttagataataatattgtttgtcaagatgctttatttagtgaatgggtaaaagcagatgcaattattggaaatccgccttttttgggtggtaaaaaactgagaaaagaattaggagatgaatatacaaataagatatatcaaacatttccagatgtcaaaggacagccagatttttgtgtattttggtttagaaaagcggctgatttattagataataaaggtagagcaggattagtgggtacaaattctattgctcaagtttcagggagaaaagccagtttagattatattgttaacaatgggggaattattcatgatgcaatttccacacaagaatggtctggagatgctgctgttcatgttagtattgttaattggacaaaacaagaaacgaaacagaaatttttagataatattgaagtgtcttatatttctgcatcattaaaaagggagatatcagttaccactgctcagatattaaatgctaataaaaactattcctttcaagcttgtgaattatcaggtaaaggatttataatatctgaagaaaaagcgaaacaatggattgatgaagatcctaaaaatcaagaagtattaaaaccaatgattgatggtaagacattaattaatcctaatgttaaattagattgggtaattgatttttataatttatcaatagaggaagctagtcaatataaattaccttttgagtatgtctatgaaaatgttaaaccagagagagaaaaaaatcgtgagatttcccgaaaagttaattggtggaaatttgggagagaaagaccaaaaatgagagaaataatatcttccttatcttgttattttgccatcccaaaaattaccaaatgggtgatttttacacctgtgaatatttctatattaccttgtgaagctaacatggtaattgcatcagatgatttttatgtgttgggtattctcacatctaatgtacatcgtctttgggtaaaaacgcaaagttcaacgttagaagatagaactcgttatactaatacaacttgttttgaaacctttccatttccacaaacagcagatataaaaatagtagaaaaaatccgcgccaaagccgaagaactccatcaatatcgcacccaacaaatggaaacaaaacaatgggggatcaccacactatataataaattcttcaacgaaccaagcagccaactttataaactacatcaacaactagacaacctggtaatggcagcttataaaattcaaccagaagaagacatattagaaaaactgctaacattgaatttagaactagcagaaaaagaaaaacagggaataaaaataataggaccttggccaccaaaataaaatctcccttcttcccttcttcccttcttcccttcttcccttcttcccttcttcccttcttcccttcttcccttcttctcttcttctcttcttcccttcttctcttcttcgtgtccttcgtgtcttcgtggttcattagtaacaggacttatgcaaaagggaacgaaagtaggggtaattcatgaattacccctacgcaagaataaggctttcagtcacatcttacgtaagtcctaaataaaaaaatctctggatagaagatttaccatgaaaatatatataatctatttgtatgttgcaaatcaacagacaaacccgcaacctacccaaaaaggttaacgaaaacctagcaggttatcttttcatgctccctgctattttcatattacttacttttgttatcctccccatcctctacgctgtctttctttctctcaacaaagtacaacttttaggcggtattgaatatcaatttattggtttgagaaatttcacccatttggtagaagacgaacaattaaaaattgctctcaaaaatacagtcgaatatgcggcaattgttgtcccttgtcaaacaattttagctttaattctcgcagttactttaaattctggtattcgtggtaaaaactggtggcgaatcctctattttttgcccacagttacatcatcagcggtgttaacactcatctttatgtggatttataataccgatggtttactaaatgattttctggctttttttggcttacctaattataattggttaggagatcccaaggtggctttaaaaggcattatgatcatgaatatttggtcaactgcgcccttttatatggtgatttatttagcagctttacaggatattcctcaaacgctttatgaagcagcagatttagatggtgcaaatggatgggatcaatttattaatattactattcctttattgcaacctgtgactttgtttgtggtagctgtaggcataattggcacttttcaattatttgatcaatcttatattttttccggtggcactggtggaccaaataatgctactttgacggtggtattattaatttatcaagctgtatttagaaatttacaattaggatatgctgctgctgtggcttttttacttgcaactttaatcatttctatcactgtcatccaaaggcgaatatttggtggtgaaaaaatgtgaatcaagtttctcgttttccttggttgaaattcctgttatatctattgttaataatttatggttttatcaccattattccctttctttgggcgctttctgcatcctttaaacctctttcagaaattattagcggtgagctaaattttattcctcacaattttacttttaagaactatcagcaaatttttctccaagaaccgctattttggcgctggttatttaacagtgtaataattgctgttagcgttacgtttttaaatttaattttaaattcaatggctggttatgctttagctagattgacatttgctggtaaacgcttttggttattcttaataatcgcagttttagcagtacccacacaaattactctcattcccacatttttgattttaaaagcattgggttggcttaattcttatcaaggtatgattgtaccgactatggtaaatgctaccttcatttttatgatgcggcagttttttgttaattttcctaaagaattagaagaagcagcccaactagatggtttaagcacttgggagattttccgagatattgttttacccctagcaaaaccagcactagcagcacaggcggtttttgtgtttatgggtagttggaataattttatactacctttggtaattttatttgacccggaaatgtttaccttacctctgggtttgaatagctttaaaggtcaatatatcagctattggaattacattatggctgcttctatggtgtttactttaccagctttaggaatttatgcttttttcaatcgctactttattcaaggtgtgacttttactggtggcaaaggttaactttgcaaattgtaaatttttagataaagatttgtatcaattgtgagcatctgtcagcatctttcctatttctaattccctgggattaacaaactcaggatcagcacctaatggtaaactgattcatgctgatgttaatgatagcgagaatattttaccaaaatcatcctgatagcttttagccacaggatcaggggtgttgtagttctccccgtcggggtgatacccggcaaacttttagcatcagatagcatcagatcaatatctgtgctttttgaaactattggtgtcttagctgtgttgagcattacaaacttgaaggggaaatatgtttaaaagactgataagcgttgttgttgctgctgttgtattgagttttcaattattcatcggtagtgcaacagctttggaactagatcaagctaccagaactgtcaaattgaacgaacagggtgatactgttgtcattagcataccgcaactggcaataggtaaaaaattatttaatgacacctgcgctcaatgtcatgctggtggtgtaaccaagactaatcaaaacgtaggattagaaccagaagctttagctttagctacacccagacgtgacaatattgaagggctggttgactacatgaagaatcctaccacctacgatggtgaaatcgagatttctgaaattcatcctagtatcaagagcgccgatatctttacagaaatgagaaacttgacagacgatgatttgacagcgatcgcaggtcatattctcatccagccaaaaatcgttggtattagatggggtggtggtaagatccattactaaacatctgctcattggccttcttactttctaaaagtatgggcaattttgcccttactgtagaaaaatctcacttcctagtcctgatacctgagtgcattcaagcattactgttatcttggttgacttatacctactgcttatacttgactttgctctctggcagcaggattgggaactttgtattttaagctgcattttcctattaataaccgctaattaggacttgctgagaaagtctttccatgaggggataggagtcaggagtcaggagtcaggagtcaggaggaagtttgaaaattccttttccatctctcgaaatcccaaaaaatgcacactttttcacgtatacccttcaaaacccttgcacttttttcctatttatcagcctcaaacttttgatttatctgcgttttgcattttttcagcaaaccctaattattaaaaaaaaaattttatctatgacagggtgtcatatttggtgttaaatgtagttaacataagaaaagaaaaataaaactatatctcaggagagagccatgaaattaatagcagcaagttggagacgcttgactttagccgttttaactgtactgttagttgttagcagctttgctgttttcactcccaccgcatctgctgaaacctacaccgtcaaattgggtagtgacaaaggattgttgcaatttgagcctaagcagttaactgttaaacctggtgacacaattgtgtggtttaacaacaaagttcctccccacaacgttgtctttgatcctataaaaaatcctgctaaggataaagatttagctgcatctttgtctcacaaaaaattagcactcaatcctgggcaaaaaatggaaacagttatccccgcagatgcaccaactggtgattacactttctactgcgaacctcaccgtggtgcgggtatggttggtaaactaactgttgccagctaacaatctcgctcatttaacaccagatgatttttttgatcatcaggtggtacaaactaatgaataggagcggtaacgagtttgatccctgggaaagaataaagggatgagctagttaccgctaattttagtttgtaagataaattttattttataaatgccgtattataatatacaagttattccatcactgaagatgccacaatctcttggatttattagtgatatcaatccaaaatctaaaatctaaaatctaaaatcagagatgtgcttgttacgaggaaaatctcttgagaatacctttattaattttactgttggcgatcgccctgttgtttaacttccaattcattgatcctgccttagccgtagaagcatctacaggcagcgctatttttagtaatcactgtgcttcttgccatataggaggcgctaatatcctagttgaacataaaactttacaaaaatcagcactatcaaaatatttagaaaattatgatactgaacctattcaaaccattatccatcaaattcagaacggtaaaagtgccatgcccgccttcaagagcaaattaagcgagcaggaaattctggaagtggccgcttatgttttccagaaagcggaaacaggctggtagtatcatctttttttgaacacttgttatgaagaaagcagggagcagggagcaagggtaaaaattaattcttgattctgactgctaacttctgactcctgtaggggcgttcgcgaagcgtgctggaagcatcagcattcgggcgataaattatcaattttgatcacaattttcttgcacgggcgaagcatccgggcaataaattatcaattttgatcacaattgtcttgcacgggcgaagcatccgggcaataaattatcaattttgatcacaattgtcttgtacgggcgaagcatccgggcaataaattatcaattttgatcacaattgtcttgtacgggcgaagcatccgggcgataaattatcaattttgatcacaggttattttccgaatgcttcgcccctacgactgatgaattcttaattttcttgatttgagttttgtcttgtttccttgatttgacgtaactgttgaatcaacttttgagcagattcagtagataaagcaggtttatcatcactaactacagatgttggtgatgaattaggaataacaacagcttgattattagactgatttttgtctatttgtggatcaggtactgtttgattctctggacttggtgagggctttaactgttcaatcttttggggaattttcctatcgccattatttgtaaatctgagttggaaaggataagaactaatgcgttgctcacctttaggtggattagcgttgaaaaattccctagttttggattgtagttcaggagatactgatccatcttgaaacttgatatctaagaccttaccatcaggagctacaaccaatcgacccaaaacagtaccttccataccgggttgatttgtcgagatagtttcacggataactgcttgttccttaacattggggtatgcttcccgaattgttgttctcagggtgttataagagtcgagcttggccagtaactgttcccgtttctgaccttgagaattaaactcgcttccagttgttacttgggtttgttgctgagtggaagttgctgaagatgggatcacgattgctgctgcccgtaattgatctttaccttgtagagatggttcagcagcaagatcagaagcagaattagcagcaatttgaactgggttatctcctaactgaattttttgtggttcagtaacaccctgtggtgttgccgtagagccaatatcaatagcatcaggagatgggttaattagcggttcactaggtaatttattatctgtctcaacttgtggcaaacggttgatattcagtgcttgggtttctttaattttggcatctatatcatccacaaaaggagaggatgagggagaaaatgtatttctactgatgcggaaattagaaacttgagttctaaaatcgtttctagcaaatctttggataggctgacttttgggcaagtaagaaagattatagttggccgatgatgtagggatcggtggcagtaccgactggctaggtgaagtagcttggatagctggttctacaggtgggatgataactttttcctcaccaaagttaattaaaggaattcccggttgttgtggcagttggggttgtaaagccagttgggatggtgctgtttgaggcaatcggttttgatcagccgaactcaattccattaatccgactgcttttgtagaatcagctgctgtggattgactagaatcaacaggcattaatggcacaatcaaggcaatagcaccgtgaataccaagagaggctatagctgctattccagtgggttggctgaatatttctggtatatttttcaggatggatgcgtaagacatagctgttatcgttcactcggctcggttgcaatttactagtcgaatcaggcagaaggctgtaacagttataacaccagagaaaatcagctttttttcattgctagatacagccatttctgccatgctttactagggattttatcttttaaattatattgccatttttagagattgggtcctcactaacaaataataacttcctgttttggcatggaaaacaggaacattcaagccaaagcagagaacaggtttttgctactcgtgagtcggttctattaaagttcaattaccaaatgcttccgtaggagacagttgagagaatttagcggtgggtacttcttccacttctggtaacttttctaaagccaaggctgtagactgactagcaccagataaacgttttaacagatttggtcgggaatcatacaacaggtaaataatgcgatcgcctatttcccaactttgattaactgacattacctgtaggcgctcttccctttccatcaatagcggtactaacaccccagtcctaatcttttcctgtatatgctcctgctgactggaaaattcagcctcattcaaagtagttgttcccaattttacccggccattacttaaatattcattccaggttttcacaggtaagtcagagacaaaagcttgattcactctgctattgctgctgttcaccgagccagaagcttggggatcacggggaaatactgctaaaacacggggtggattaaactcctctgctgcccgttgtgctaacacaaaattcacttccccgttattagtcattgccaaaaaagtaccccttgaagcaatgccagcttcttccaatacttctgcatctagcgcactactagcaatcacgcgcagattttgagcttcagcttgagcaaaatattgggagtcagtgtcaataatgatcacactttctcctcgttcctggaagaacctggcaatcaataaactcaaaggattacaacccactatgactgccccagtcgcatctttagaagtgatgcgtaaccatttcaccagccacccagctgttaacccttgacaaaaaacagtcatgataattgtcaagaacactaaagctttaatcgcatcaccaccattaacaccgcgttgtgtcagggaaattgcaaataaagatgccacagaagcagaaactatgcctctgggcgcaacccaacctaaaaacaatttctgtcgccaattcagattactgttccaagtacacaataaaatgttgatcgggcgcaccacaaacatcaataccaaaacagtgaataaactaccccaacctaacgctaatacactggcaatagataaatcagcggctaggagaataaacagtacagaaacactgagaatagtcagctgatttttaaagctgcgtaacaggcgttcttcaggcactgatgagttagcaaataccgcaccagctacaactgtagtcataattcctgactcactgcgaatagtttgcgctaaggtaaacaaaccccacagtcctgccaataccattaggtttttcagttcaaaagagagaaaattggcgcgtttgaaaatccaactcatcaaaaaaccaccaacaccgccaatcattgcgcctacacttaaacgcaagattaaacccataatggctttaatagggtcaggatcaccattcaaaatagtatctagaaccacgtaggctaaaatagctcccaccgggtcaattaaaaccccttccccttccagcagcgttgccacttgtcggtctacgttgatttgtttgatcagtggaccaatgactgtaggacctgtgacaacgactatggaagcatagagaaaagctatattccagggaaattctcctagccagtgcgccgccatactgccaccaagcagtgtgatcaaggttcccaaggtgaccagcagttgcaaactgacggaaaccctgcccatctcccgcagatccaatttcagtccgccttcaaacaaaataattgccgtcgctagggaaacaattacttctagtcctgttcctagcagatggggatgtaatagtccaatgccatcagcacccaagagaatgcctaacaaaagtaataagacgatgctgggcagcttaaaatatgcagccatcacttgggcgctgatacctgcaagaactgtgaacaccatctgtagggtgatttgaaaagatgcttccatgttgtagattttgaggaattaatttcaaaatccgttaattaacctttgtcgagaatcatcaatattaacattaactttacaggtacaactgcacatccatcttgaaaacaataggatattttttcatgcttagttgtacatattacatcttttttcaggatttggcgaccgtaatcaataggctattggcagcaggaggcatgaggcaagaggtttttagaaattttataatttcataattttataatttcataatttcataattttataattttataattttataattttataattttataattttgtacttgctttggtttttcgtgccgactgacttacctgatgaaatgggatgtttgcaagccaataacacgataaaaagtttttgggcaggttgttgcgttattgaggggagggatgaaaaacgattccagcggctcctgccttctccactcctcgatttccatgaatttagatgccgaaaaaaaattttagaaaaaggtgttgacatcctctgggaaatagagtagattattaaaagtgaagtccgatgcccccatcgtctagaggcctaggacacctccctttcacggaggtaacggggattcgaattcccctgggggtactaaaacataaaacatcaaaaagtagggaagaaattttatttagcggatgctgaattaaggtcaaaatattacaagaaaagggttttagccttttaaattttcaaaaagtgcaaagtttattgaaggtttgctgaataaactgaaaatcacgatgaataaagagttggagggtgataacaaagaaaataggtgcaaggttttgaaaactatgagtaggaaaaccttgcactttgttggtttttacctcgtttccaaatacaaaaaactccttgatatccttgaactgctgactccttgatagcgacttgtactgagcctgtcgaagtaagcgtggcgttagccattctccttaatcttcacggaaagactttttcagcatcccctacttaactcattagctctttggcgaattgctatgaggtttagttgtaggtctttgctgagacgtttttcaataattgctattggcattgttagctttgtccaaacttgaattgtgtagcagaggttagtaccttgacttgtaccaactgtataagggtctaagctccagcaaccggaaaaacctttgaagtctccttctaccatttggaagttgatgagtttgggaaagatttcttctagatccaaaaccacacgcgcacaaaacttgaaattgagcaaacgctgagatcctatctgttctagacgtatacctccattgggatgctctaacaaacaacttttggcgagattagggataaattgaggtaaggcttcatagtctgtgagaattttccagactttttcgatggagtggggaatttgaacctgggcggtaatttgccgctgtcgttctgctaatttctccacttggatgatgactggatcaatatccaagttggtttctagagcattgtcatcaatgaggttgggggaatcaagccccgctgttttgttttctgtagtcactgttgagaatgtgaatgagttgctgaggaaaactgaggtagtgtgagggtaaaacaaatttcgctcaactgagagttgtcaatagggttactctcaacagcgatcgctccctgtaaataaagatataagctgcttccgatacaaaaaagctaactaatgctaacaaaagttggctacgagaaagtatcttcacctactagctccgatactttctcctggtggttgtggcttgcttaatatttgataattaaccaatacaaactttgttccagcactatgatcataactggtaagcaacctggactataatttgctatagagccaaactctcagcacttagaggaaccatgtcgccattctttgtcagtcctaataacattggctgttgagcttcaattaacttacctgtgaggacacaacgttcatcttgctgggctgtagccgctatactcgctcgaatgtcagcacgggaaaatcggggtttccactcacctgatttttgctgcacataattccagagaacatttctaatcaaagcttgatatccttgattgcctgctatctctttcagtttatctttcagttcgcgttctaaacggatgctggtaacttccatgtcggtggttgatgtgcgtgcgatggtatgcatttgattttttctcctttatagatatggacaggatagtaatacaagtgtagtatgtttaaaggaatgttcaatagataaaatttttttgaggtgaatttttttgtgaaattcatttaccccatttccagtcccttccatcccagcaactgtcaggccagttgggaaattgttgttgtgggagtggagtatttatttatggccgatggtattcagcatccaaggcaaaacacagagagtaattatgattttagatatatcaactttgatctgctgaatattaaaccactattagagataacaagcgggaggtacagggaaaatgttgtaccggaataagaccagaaaagtatcaggtcaattttagcccccgctgccgatataggtaaagcgggggtttttaatcagtaattggtgattggtgattggtgattggtgactaatgacagatttgcaagcaaacctggaataacaggagagcataagaaatgctgaaattaaattataccgaaagaagcttttatttagagtgtatcacgctgtcactggaagaatgggtggcgcaaagagtgattttggcgctgcgaatcggtcaaacgctacattttgaacctagcacggcttcctttttgctacctgtagatttaccaggagtagaaaggctcaaggctgaggcacaacgaaatgacggtgacattatagctctgtctacctgtgatgctgagtatttggaaatcaccttgcggggttcttggttatcagatggtgcggaagaagcccagggtgtgtttataacgacaatgagcgatcgcactgagttctttttacataaactttggcaagaagctcaagtttgtgcatctgttttaagtgattaaattaggcagggaatagggaatagggaggaaaattttagattttagattttagattttagattggagataacaaaaacaatccctgcgggttcagcagttgctcatgggggaaacccccaagaccgcactgcttcaccaaaatccaaaatccaaaatcaataactcctgactcctgctatattattgttccatttctaataattcgggaactgtgacaaatctataaccttgttgtttcaatcctgtgataatttctggcaatgcttttacagttctttctcgatttcctcccccatcgtgcattaaaacaatagctcctggttttgcacctttaaccacatttttcacaaacacttgatatttggcacgaggatcggtatcagcagaagttaaagaccacatgacaacggctttattttgacttttagcataagcagctaaaccattatttaaataacctccagggggacgaaatatagatgtttttacccctgtggtttgatagattaaatcattggttttctcaatttcacttttagctgtggctggactcattcttttatataaatgattccaggtatgattaccaatggcgtgaccttccgctaccactcgtttagcaatttcgggatgattttttaaagaacttcctacccaaaaaaatgtggctttgacatcatgttctttgaaaatatctaacattgcttctgtggttgttggccagggaccatcatcaatagttaacgcaatcactttttcattgtttttgagtttgacttgataaactgtcttgccttgaaatttagcaggaacggtaaaattcaggttttcgatttttgctggtggttgtgattttgtgtttaccttattttcaggaatggaaacaccaaaggcttcgctgttagtatttggttgtggtgtatttgggttactggtacaagcagttataaataatgctattgtggcaacaaaaataatgtttcttgttttgttgtggttgtttgtggaagtagaattaacaaggtttagcattgatttctgtgatatatttcacaatatgagaatttgaacttttacagttttaacagaaaatctcaatttggggtagaggtttcattggtataaaattcatacccttaattctcaaatataagtaacagaacataccaagacagagtttgatagtttagcggcagtgagattttctatctccagatagattttgatgagctttttagtgcaaaattcaacctaattctctcgtaagattgatgaaaatgctctgacagtcaattaatctgaaaccagaaagaaaatagaaaagaaaaatagagtggaagaatataaaaatgaagattcttgattttgctaaatctagatggaaattagcatcgagattgatagtattagcttttgcttgtaccttcatatttttattcaatgcttttcctgctttagctatcagtagttatcaaagtgaaccaacagaaggaacgacacaattattagaaactcaacgcaaaactgatgaagctgctaaaaaaccacccataggaatgaaagaatctcaagaaaaaactaggagaggacttaacgaggttcaaggagcagctgatattgaaaaaatgaagcgtcctgaaaataccgaaagtgggactacttcagtagaacaggaagtagaaagttttttggaaaaaattacaggcagcaaccaataattcataattcataattcataattatgatttttcggttttgaattggttttgttgggttgatggggataatgtcgatattttgagaacttattaagtaagtagttaatagttgaaaggcaaataatgagcatgaatacaatcaatattggattgacagaagaacaacgtcgcggtgtggtggatttgttaaatcaagatttggcagatgcttatgtgctggtagtaaaaactaaaaaatatcactgggatgttgttggtcctcagttccgcacgctgcatgaattgtgggaagaacagtatgaagaaattacagaaaatattgatgaaatagcagaaagaattagaactttgggtggttatcccattggtacaatggaaggttttctcaatattgctactctcaaagaacatagcggagaaattcctacagcaacaggaatggtaaatcaattagtggaagatcatgagcagattattcgtaatttaagaaatcatgtagatcgttgtagtgaagaatttcatgatcaagtttccgccgactttttaactgatttgatggaagaacatgaagaaatggcttggatgctacgttcatttattgaaggacaagcattagaaccaaatgccaaacaacaaccaacagaaactaaagttccggtgggtgtttagttaagaatttgccacacaattttcaacacaaagagaagataaattaaaaggagtaaacaagtgccagaaggatatcaagcagagcgtaccatctcagctgtatttaaagaacaaaagcaaattaatgatgtaattcgtcgtttactaaatagaggtgtaccgaaagatcatatttcagtgatggggagaaatttccagtcagaaacgcgaatttctggttttattaccaagcgcgatgtgattttaggaggtttgagaacaggggcaatttttggatctttgtttggttctttcctcagcttacttacaggtgtaggagtattgtttattccttttgtcggaccaatcgtggcagcaggacctattggtgcggtgttgctgggtgctgcgagtggtgcgatcgctggtagtgctggcgctggcttggtatcggtttttacggctatgggaatgccagaagataaagcagcggtttatcaaactcgtttacaagcgggagagtttttattaatggtagaaattccgagcgatcgcagcggtgaatttcaattaatattagaaagttctggtggtgaagaaatgcacaccattggtaaaacacttacccatccttgtccgggtccttgtaacagtccagaagatttatctcctgaagttcgcgctcatttatcagcagaatcacaacaattgttcattcagcactataacactgtacttgatgaaaccaacgatgaatttaccgctgaacagtctgcttgggatgcggttcatcaacaatttgatgaagatgaaaatggtgtgtggtcaaaacaaaaagttggtgtttaatttcttttatttccataacgagtaataggtaatggggtaaaactcattacctttttatcattgactaaattttatttgctaatatctcgtaactcaggattcaatcatcttaaactcactcatccattaatgactggtatgaccactaactaagccccaaataaaaatggcgatcattgccccaataatagccacaattataccgggtatgctcaaggttgcggctgtaaattgtaatgttcctgtttccaataaagtaactaaagttccacctattaaagcaccaataattcctaataccattgtggctaaaattccgccaccttgacgaccaggataaatagctttagcgatagctccggcgatcagacccagaattatccaagcaataatattcatagtttattccatgaaaatttccatctatagattagtaattttatctactcattaagtctatcaaaagagagatttaattaattgataattgataattgataattaataattcatgacttatagtttgtgggtaattgtattttttgtgaataattaaatcaaataaatcaaataaatcaaataaatcaaataaatcaaataaatattgtggggtgggcatacttcgacatagttcgactgcgctcactaaccgtagttcgactccgcacttcgacttcgctcaggacaggctcagtacaagtcgctcagtacaagtcttgcccgccaatcgtgtacctcattacaaaggaaagtgctgtatttaaattggtatttaattggcatacattgagaaaattcgtttgcatatcagggctaatgcaactgtaatcatcataattaatgtaattttaccacctggtatcaatgattgataaataccatttgtcaatttttgtttttctcgttgttgccaactcataattgccggaataattcctcctaaaatcgaaacactaaatattcccgtatagtctagagcagtaaaaaatatgctggggtttattgttcctaaactcatgggtggaaatagcacaagtgagaaaataggaaaccgagaaatttgattttttgtcatccgagaaatgtcttgaaagaaatcgactaaaccgtaaacaaaaccgataaatgaggtgataattgcgaactctgaaaaaacagttaaaactaatcctaaaatttctcctgcttctcctgaaagcaaaatttgtaagggatcaaaaacactgccactttgtgaattattctggaggatatcaggactaacgctgcctaaaataacagcattccaagccaaaaacatcatcaaaggaatgccagaaccgataataattgatttcctgattttgctgatatcgccttctagttgtgtcaccactacaggcacaacgttatgataaaaaagagctacacaaatcacagaaactgcaccaccgacagcttgccaattttgaaagagaaattgtgagctttttacttgtcctgatcctagcagcaataatccaagaaaagaagtaatgacaattgccacaaaggcactatttaacttctgaataaatctttcttttcctaaatagagaatgccaccaaataacaatgtaaaagttgttgttcctatccagttaggtaaaatattttctaacccaactattttagttaatgtcgataataaaatatctccacctttactgatatacgccactaaaagggcgtagtgcttaaacaaatatgcaccaccagcaattctagatcctgtttttcccaacgtcttttctacagttgccaaaaaacctatgctagtcatgccttctgcacccataacatttaaggttacttcggcaattaataaaccggaaaataaggtgtataaccaaactgcaataatgacaattgtagatggtaaaatacccgatggtaaagttaccgcaggtagggcaagaataccagcaccaacagtagttccagctatcaaagcagtgcttcctaaaacgctacctggttgatgatttaatttattaccatcaaattccaggtgagaaaataatctggtgacttgcttttgttctgatttgagaacttgattcatgggtttttgctgggatatctgcccaaagcagcaagaaaatattacttgatattacttgatattacttgatatcagtaattttagcaaaagatttccgctaattcctcgtttttctcgttcccatacagagtataagaatgaattacagcagttttcatgtctttagaccacatattgacgcgaaacctaaatcaaaatgtgttttatttacctgaaaatagctgtattaaaagctctgcctttatgggatagcagagtcagagactctgtgatgacattcccagttagaaactgggaacgaaataacgagataaaggggaggttttaaactttgaatgaaaaaattgtcaattgtcaattgtcaattgtcaattatcaattgataactgattttttaaacaaaccgctttgtaaactcatacattaaatctactcttcctttacgtaacatagcgggatctaatctttctgtagtattgcaagtcatcaaaaccactaaatgctgcttcatttgtacaccagattcatcaattacactttggtacaaagtcccatctaacaaggctaaaatatgttcagttttgttgttatattgggctacttctgaagctctatcttgagctaagttatcagcttcgttgatgatgatacaaattttctctaaatagttgggtggcacaaagttagtaatagcatcatgatccaaaataaagatgacataacctaaaggtactaaaatttccttggctactgattgtgtccatgctgtttttcctgtacctggttctccatgtaccacaattgctaattgattttgattgagaatagcttgctgcactgaatcagtaaaatcttgaatttcttggggaaatgtgcgaatgggaaattgattatgaactttaccgacacggctttgatatccacttaacatcactgctaaatcataagtggctttattgattaatggtgctaaattttttgacattaaagtatattgtctgcgtccccgatcataggggtcaatttgtaaccaaatatcgtgttgagaccagtaagcataaacggtattgacgacatctaaccgttcccaactaacaaatttttcgacgggaaaatagaaatctctttctgcataatattgggtgataatatcaggacgttccaataaacgtagaacgcgcaaaacagtaatttcttgcaataaattcagtacataatcaataggaatgctgttacggctgacaaattggacaatgggtgtttctgtacttaaaacgtctttgtaacgataatctggtgtgagtgcatcgggtgtgacgaagttccaaaatttctgaaattcactacgagtatagtcagaagctaaatttaatatatttgcccaccaggtataatcttttctggctaaagcgtctgcataaaaactgactagattaatacttctttgtgttaactcttgagtatcatttaatattagttgttggaaatagtcccaatcaaaatcacgctgaaatggtcgccaaccactagctagtaggttgtgacgattgttgttcgcggaactactatcattatttcggaaatagtcaaaatccataggagtaagtagtcagtagtgaggattagaggcgttccggtggaacgtctgtacaggagtcaaacctggttgatatttgattcttgttacataattagtctggtatatcttacaatgtaactttatactacagaaatatagctacgtcaagtattatgcttaaaattgttcagtttgagcaagtatcatatcacttctttacaaacctacaaaataccatcgcaattcaagtaatatttctagcaatgtttatcgtctgctgtatttaggaaatttctcgattgatgggggtatatggcaatttcccatatattgacagcaaaataaatcactgaagtcataaatttaacagtttattttcatactgtttaatgcaactagtgtaatttaattttttgcttatagatatgtcaatagtgatactaaagtaaataactatgccttttttctctacaaagttattgtgaacttatgaggaaaatattctgtaattttgcatataatcaaggggtgtctactaaagctattcagattgagttgttctttcctgttgaatgtgggtaaggatgatcaactgagtggcagcaaaacactagctaatcttgaatcagcacgtcttatggtttgtgggattatcgcctagtttgactatcaagacgataaagcccaatttaatcttctggagactagatgtatctgacacattcattcatgagtgatgaaaagaagcaaaactctcagccgcctttgattttggtagtagaagatcatgatgatagtctattactacttagttatactttggagttactagggtgtagatttatttgtcaaaatgacagttacactacactcttagtagcaaaagaatatcagccagacttgattttgttggatattctgttacctgggttgaatggtctagatgttgtgcgatatttaaagcaagatccattaactcgccacattcctgttgttgctgttacggctttagctggcagggaacagcaagaacgtatcctgggagcaggttttgacgactatctcagtaaaccctatatgctggaggatttagaggcaattattcgtcgttttcttgatcacaaatttgagcctttttctccgtttgaacaatgcaggtaaatagaatcaaaatttttatgacttcaaaatttttatgactaatctttgctgtcacagggttttatttctgactcctgactcctgactcctgactcctgactcctgactcctgactcctaaaaaattaagtttcctttggcagtttgattttgaatatactacctttacttaattctgataaaagttcgatttttccaccatgcgcttctatgattctttgtgataaatgcagtcctaaaccactacctgatcttttatttctcccttgacgaaatcgctcaaaaattgttgcttgatcttctggtgcaatgccataaccagtatcttcaatttcaattactacttcaccttgatgtgttttggtggggcaagttttcaaaatgcgaatttctacaccgcctgtatctgtaaacttgattgcgttaccaattaagttattcaacactcggcgtagttctaatctatcacctaagacaattcctccatgattttctacctggtttaactcatgggtatctaatttgagagttaagtttttctcaacagcaaggggagttagttcactgatgacttcttcagatatttctgttaagtcgcatttttccaaatttaaggtctttttacctgcctcgaagcgataaacttctagtaaggtattgaccatttgcattaaattttggttactgcgaatcatcacaacgatcgcttgtttcatttctggagaaattttacaaaaagtctcctgttgaaacaaagctaacattcgatcagctgctactaaaggtgtgcgtaaatcatgagtcagacgcgaaacaaaatcttctcgctgacgggacattttttgctgttcatcaatactatgcttcagtcgcaatagcgatcgcactctggctaataattcatcagtatcaaatggtttgcgaataaaatcatcagcacccgcatctaacccttccactacactagattcatgaaaagctgtgattaacaaaattggaatataactcagatcaggattatcacgaattctccgtgttacttcataaccatccatccctggcatcatcacatctagtaaaatcagatccggtggagattgtgccactttttgtaaagcagttgctccatctgatactaaatcaatttcataaccctcactctctaagagtgtttgtactaaaattaaattatctcttgtatcatcaacggcgaggatacgatcaaccttatcacttttgacaaaagacatagtttatgtttacaactttttggtcattaatctaaattaatctactctggaatctacacttgggaatttacatggaagttgacagtaatttaaagtttcagatcaggatatcctagcgaaactttattgaattgaaatggtaggtgaggtagattttgctgagaataataaattccatcatcactaccgacattccaactataattatctctagtattatctcccgcatgaggtgataatgagatttgacgtggcaattcaattttaaataccgaacccactcctaattgactttctagaaatattttacctcccatcatttgtaccaatgaatcaataattgctaaacccagtccagttcctggatatttacgactaataccttgatctacttgtcgaaatgcctcaaaaatatgttgataatcttgaggggaaataccaattcctgtgtctttaatactaattgataattgatttctggtaatttctttcacttctactttaatgcttccatactctgtaaatttaaccgcattggagagcaggttaattaaaatctgatgtacgcgcacgggatcattaaataccaaagtattttctaattctatttccactaacaaagataacttttttgcttccgctaaagaacgaatttcacctacagtattattaactatctttgataaatcacatatttccggttttagttctaatttaccagcctccaatttagaaaagtctaaaacttcattcaataacatcagtaaatgcttaccattattgaggatacgctctaccagatccgcttgctgattggtaagttgaccaaatttaggacgtaacagtatttgcgaaaaaccaatgatggcattcattggtgttcgtaactcatgagatatggtagctaaaaattgtgatttaagtcgtgatgcttccaacaatctcaaattttgtaattgaatttgttgcctttgtctctccaattcttggttcttcctaatcagttgttcattactttctttaagttgttgatatgccaaatctgctttcatttctgcccgatataaccgcatcgtgtttcgcaaaaccaataccaaatgttctgaatttagttgagatctaatcagataatctgtagcaccagcttgcaataaatcaacagcaattttttcctctccttgagcggtgagaataactaaaggaactttgatttcacaagagcgcagcttgtgaattaaagtgaagctatcttggtttggtaagcaataatcgagaaaaacgcagtcaaaattagtattttggagagcagaaagggcattattaccgtcgctgacttcacacagttccatataaacatcagcttttgtcagggctagacggactgccatgcgatctacttcatcatcatctacaaccaaaattttcagcgtctcttccattagtttttattttcgctgtccaaaagagattgaagtacagcatttctattttcagatagtaagcattcagctaaaactgctttttcaactgattttccaggatgtttaggggagactgatactaaaatcaatttcctaatcccttgctacaaatgctcataaatcccagataataggtgattactgattactgactgctgaatactgacttccaatacagcagcagtcagaactaaaatgctgttagttccaggctttgtcaatctcattgtttactttatttacctacaagaagctgtatataactacagaattgacaatttttgtgtatctcaaaaaacgctattgagtaactcaggtattttacacaatatctaattaatattttttacattcaatttatcttcctccacttttagtagttttaatttgttatgtttttagctggttgcagaatcaagtatttgattttttctgccatttttttttgattgtgttgaatctcctggttataactctaacaaacggaaaattgctctcgtttaataaaaaataatttaaaaacaattggcaattatccagatgaaagtgattctctatgaaatctggcagagtcgagagaaagtaaaatcaaatactttatccatctcaacacaattgtaaatgagtaaatgatttaccgtcctcacccattagtgagagttgcatacaaacattgtgtaccatcagcttgagcagttttactcacttgaacagtagttagtcttgattcgtgagtgattaatcattcaatattaaaaagctgtaagtgcatatcttgctattgccacataaacgcgaatcattagttttaagcccttgccctcgttcataggtagaaaattttaaattatctgatgttgtatgtgatgttggcggagcctgtggtcggtactatgatagatgatgaagttaccagttggtcattctgttgatcatctcttgatacagcacttcccggtctaatactgtacctcaaaacaaaggaatctgctgtaagtttatgtcgcaagaatcttgtgctaggataaaaatgtgaacctccttgattcagcaggctatatacaaggctttaaacttgaatttgacagaataactagagtcagatgtaatacattttctgatcagagtcagtaaaaatcaccccgattactgtctcattagttactacgtaaacaactgatctggtgtcaaaaaagtaagatctcaagtttagcacaagcattgttgacagagttgatgagaagaaaaagacaaatttataacatttaaccaactcgtcaaggtgaggtaaaagtattcaaggagattggtagaacttaaaattcaagaaaaaatgagaataaggaaggcacagtcataacaaataggttgattgtctgattttccattggtttcaatatttcatattttccaaaaaaatagccatatacccgtagctagatttttacttctatcccagataaaataagtgaaatttattatttctgtcgatggatgcaaccaggtcaaaatatcatctatctttagtttgggaaaattagatccaaattagatccaaattagatccaaaacttacattcattgtaagaattcaggagtcaggagtcgtaggtgcgaagcattcgggcgaccaattatcaattttatgcaaaggctattttcctgtaagggcgaagcattcgggctataaattatcaattttgatcacaggttattttccgaatgcttcgcccctacttcgcccgtacaggagtcaggagtcaggggttagaatatttgtgtgcagcaggaatctacatgagcaagtttgtttatcagtttgttcatcaattatcaagcatgactcgaaaactctcattcattctgaatcctgtattctgtctcctcaatccttaccagtcaaattaagttcaaattaatttcaagttaagttcaagttaagttcaaattaagttcaaagcagcagtttaagttcaaagcagcagtcagatatatagttgggtgtaacaatgaatgagattagcattcttttaattgaagatcatgatttaacccggatggggttaagggctgcattgcagtcacacggagggttaagggtgataggtgaagcggcaaatgccagccaaggattaaaacttttggaaactgccaagccggatgtagcagtagtggatattggtttaccagatatggatggaattgaactcacccgcaagtttaaacgccatcaagcagaaactgggcaaaataatacaaaaattttaattttgacaatggatcatacagaagatgccgtcttagctgcttttgcggcgggtgcagattcttattacatgaaagagacaagtattaacaaattaactgaagccatacaagctacttatgctggtaactcttggattgatccagcgatcgccaatgtggtactcaaaaaaatgcgctcaagtttaccaggagaaagtctcacatctgataaaccaaagactgtaaaaattgaggctttagctacagaatatgaacaagttctggaaacctatcctttaactcagcgggaactggaaattttagaattaattgttgctggttgtagtaacggtcaaattgcagaaaaactgtatattactgtgggaacagtaaaaactcatgttcgcaatattttgaataaactttgcgctgatgacagaacccaagccgcagttcgggctttacgttctgggttagtaggttaataggtgacaggtgacaggtgacaggtgactggtgactggggaagaagtgatagaggttaagttaaacgttcttgcaaacattcggcaatacgtttggcagcaccaggtaaacccatccttttaactccattttcagaaatttcgtgtaaaagatcgggattttgtaacagagactgtattacttgggcaacttttgctggttggtttactaaaattagagatgatcctagaagacgactttgggcttctgcaaaagcaggattatattgaggacctttaccgggaatagcgatcgctggtttgcctaaaccaataaattgttctgttgctgtacctgccatagcgatcgctaaatcccccaaatgtagacaatcattataagcttgttgagtgagcataagataagcatttttttgtttaaaaatcaaagcattagcatcagcgagtttaactggagattgatcccatttttgccaacctggaatttttaaagtttgagtaaaaatattgccatctaaaccgggagcgatcgcacctaaaaacaccatctctcgctcccggaaactctcaatcaaagctgatacagcgatcatcatcacttcccaattatcataagcctcacctgcacgagaaccgggaagcaaagtcacaaccaaaggacgaacaatctcttgttgttcaaaactatcataatcaaatctagaagtgctaaaagaaggatctaaaccatccatcataggatttcccacatcaaaagctgtaataggccactttcttaaaatttccgttgtcagcgcatctctaggaaacaccgcccgacaacgacgacgactcatcaaccacctttcccaaggatgataaatagaacctgaaaaattttcccaacgtgccgattttgactttctgggtaataaacccaactcatcccgcacataatattcagattttgccgttcccacaaaagcataattagcaccgctgatagctgcaaacaaaagtggtacaatatcccccacagataaaatcgccttttgattatctaactttgtttgcgaacttacccaaccacgcaccgcttgaatctgcttccaagtcagttgtaccaaaccaccctggacatcccgcatcagttgacgactatccatataaataaaaccaccagaaggcatagtcttaacttcaccaatacaaggcacatttaaattttggtaagcacgaccttcacccactataggtaaagcaaagatatcaggaggagaagataactgttgcagttccttaatgatccgtgcagcaatgatatcttcaccatgaccattacttaaaaccagtaactgtaaacgagaacttttatctggagactgcttcaataaaagtaattgagatagatcacgcatagaattttagattttagataggggcttgcaatttgtcatcatcaagcctgataatgaataataccaattaccaaaacaaccaaaacacctgtacccagatcctcgacttctcaaagaagccggggatctttttaggttttggattttagattttggattttagattttagattcggtcttgcaatttgtcatcatcaagcctgataatgaataataccaattaccaaaacaaccaaaacacctgtacccagatcctcgacttctcaaagaagccggggatctttatcctcagcgatcgcctaacaccgtcagcttttgtagtagcatagtagtagcaaaaatctaaccagaaacaaaaaattacaattattggtctcttaatccataagtatctacagcaaagattatcattaattatgcgagtttcttctgcggcaatttttaccttagctactttagctgttagtaatgccactcagcaagccaaggctgcaccgactcaaaacataaatcaagagcataaaaccgcaacaacagatgtggtaatagtgcctgatgtagaaactcaaacagcacaggtagaaaccttaacagcaccagaaactacttatgccatagaatttagctctcaaccgatatcgcaaccagtagttgtacggacaaatatcaataattatattaataataataacaacagtaacaacttaattacagatgctaatttagtagttaccgccaccaatgtccagatcataggcgctaatacagaattagagcaaatcattcgtaaagttattaaaacccaaactggaggaggaactagtcaaacccaacttcaacaggatgtagccgcaattttaggcactgggttatttgctaatgccacagttaacagtagcaatacatccgctggtgtaaatgtagtttatcaagtgcaaccaatagttgtacaagcattacaattaactggtgcaaaagttcttacttatcaagtagccttagaaaatttccaaaatcagattggtaaagatatcagtccagcagcacttcagaacatagtacagcaaattaaccaatggtataaagataacggttataccctagccagagtattatcaattcaaccgaaccgtcaaggtatcctcacagtcaatgtagcagaaggtttagtaggtgatatcaaatttcggtttttgagcgaagaaggcgaaaaatttgatcaaaatggtaatcccatcaaaggacgtagtaaagcagattttatcagacagcaactcaaactaaaacccggaaaagtatttgcagaagatttagcacggcaagatatccaaactttatataaattaggtttatttaaaagcgtcaatgttgcatttgaaggagacgcaaaaaaactagatttaatctatgaactgcaagaagtaggagcgcgttctgttaacctgggaggtggatataatgctgatgatgggatatcagtgattgttagttatagagatcaaaatgttggtggtgtgaatgataccttgtctgcaaatgtggaactaaacagacaggatgtactgtttaatactaattttaacagtccttatcgagaaactaaccctgaacgtttgggttataacatcaaaaccttccgtagaagacaaatttccgatacctttgacgataaaatcaaactgccgaatggtgataaagtgcgggaagggaaaataggcgctagtgtgagtttgcaacaagaaatagatggttgggatgctgccttgggtcttaattatactcgtgttactatccgcgatcgctctggaaatattacccccagagatgctaacaataaccaattatccttgagtgatactggtgtggatgacctagctaccgtatcatttacagccactaaagacaagcgggataacccagtacaaccaactgaaggttcaattctcacattcagcaccgaacaatctatacctgtaggtaatggacagattaccatgaatcggctacggggcaactatagtcaatttatgcccgtaaatttatttaacagcacacaaccccaagtatttgctttaaacctgcaagctggtactgtagtgggtgacttaccaccttatgaaacttttaacttaggtggttctaactcagtgcgtggttatgatggtggtaaagtaggaagtggtcgtagttatgtgttagcttctgctgaatatcgttttccgatcttccctattgctgggggtgtgatatttgctgattttgccactgatttaggttctggtgatacagtgattggagaaccagctaatgtgagaaataaacctggtagtggttttggttatggtgcgggtgtgcgcgttgattcgcctttaggtttaattcgtgctgatttgggaattaatgatcaaggtgaaagtcgggtgcatattggtattggtcagaagttttaatttggttgtggtgtgttaaatttctaagtaatgaaccacgttctgcgaagcagttcccgaagggtagaagcaaaggacacgaagggaggaggtttagagagattttgcgtaagtcttgattaattagggtaaaattataacagtgtgttggttttgagtctatgcgtcaatgtcttaatcctgactgtctttttcctaatcctgataattttcaatattgtcaaaagtgcggtaataagttacttttgcgggaaagatatgcacctcaatcaattttaggtcaaggtggttttgggagaacatttttagctattgatgaggataaaccatcaaaaccttattgtgtaattaaacaatttttaccccaagcacagggaacagatagtattgaaaaagcatcccagttatttgcacaggaagcacaacgtttagaggagttaggtaagcatccgcaaatacctgagttaatggcttattttacatccgataatcgtcaatatttagtacaggaatttgttaaaggtgcaactctacaaactgagttagataaaaatggtgttttttcggaacagcaaattaaaggtttattaatagaactgttgccaatattggagtttgttcatagtaaacaagtaattcatcgagatattaaaccagaaaatcttattttgagtagtgaaaataagttatttttagtagattttggggcggcgaaaatagttaaactacagcaacgcacagctacaggaacaattatcggatctgctgaatattgcgcccctgaacagtcaatgggtaaacctttatttagtagtgatttatatagtttaggggtaacttgtttgcatttgttaacaggagttagtccctttgatttatatagtccgatggaaggggaatgggtatggagagattttttaaatggaaatgtggtaagtgatgaattagggaagattttggaaaaattagcaagtcctattgctaaacatcgttatcaatctgtaaaagaagtgatgcaggagttaaattttgtagatcaaaatgtgaggcgatcgccttctcaaattttaccttcaccacctccacaatctcaaccacctgtgaaaattccccaaccatctgttactgtaacaagtcggtatcaaaaactagagaaattattagcagcaagaaagtggaaagaagcagatgaggaaacaagacggataatattgacgcttgctaaccgaggaataccgggttatttggaaatagacaatgttcttaatattccaagtggagacatcagcattatagacaatttgtgggtaaagaatagtaatggacgctttggtttttctgtgcagaagcagatttatgaaagtgtggggggaacaacaacttacaaccgccaagtcttgaatagattcatagataaggtaggatggagaacaggagaaaatttactgtcttataacgagattacctttgacataaaagcaccaaaagcgcatcttcctttttttcccgtaggttcgatatggtggtggaaagtagttattagtttgtattctcaagatgattactggaaagcggttgtaatagttctgatcttgcgttcataacagtaaactgtaaaatttaaagattacagaaaaatattaagtctgaatcaggataaccaggattaaaggatgtacaggatgttactgttaacctattcaaaaataacagaaatttctctctgtgtcctctgtgcctctgtggttcgttctcaatctcctagtcacagatccacgacttaaaaacaaggtaaaatcaaagaatgattaaccaaaggtgaacaatggaaacccaacaactaaaagccctgatcaaagaaactattttagaactgatagaagaagaaaaatggacaattaaaaaaatattaatcccaatcttgaataacaaagaaaatgaagactggaacgagttttccttagaacaagctatgagagacttagaaaatgatcatcttcctgaatacaccgaatccgatttaatagaaaaatggcaatagcaggtcaaatagttctcttcagatttccgcaaactaacctgacactggggaaattacgccctgcactactcatcaaacccctatctaataatacttatgatgactggttggcctgtatgatttccacaaaaacaggacaagaaatagtaggattagatgaaattatctcaccccaagatgttaatttttcgcaaacaggcttaaaatcagaaagtgtgtttcgagtttcacgaatagctgtagtttccgaacagatacttttaggaaaaattggtgaaatttctgaagcaagattaacaagaattagacaaaatctagcaaattggattttacaagattaggtatattattaaaccagatttagtaaaccgtgttcaatctctagttgctgatgtagaaattgatcttgatgcaattctatctgaagaggatgagtagcttgtctgcaaatcagcctttatatacaacctggtctaactttctgtaaaaactgaaaattctgtattataataagacaagtgctgcttatagcatttcatagtcattactcaccacaaaaaacactatgcgcttaaaaagatgggaatccccccgtaaacaggggagaaacgacaaaggccggggcggttcagccagaaaaagacaaatcaagaaacaacagcagatgctgagaaacaaactcaaagaacggcaaaagccagaaaacaaccaaaaaaaccagaaaaacaaccaaccaagggaagggataacaaccttccctctttttttgcctcaaatccctcagaacccggacttctccaagaagtccgggatcttctatagccacctgctaaggaatcggaaattttttggaaattttttggaaaaaacccttgacaaaacctatggggtgactgctatattatttagagtgaaagcagtggggcgtagccaagcggtaaggcagcgggttttggtcccgccatccctaggttcgaatcctagcgccccagtattatcaaataattatcaagggtagattaaaaagtctaccctttttgatattttggattttatattttagatttgggattttagatttgggattttagatttgggattttagatttaccaattactcaatattgttatttttcgggtgattttaaagcttgatctaaaatttctctcgcttgttcagctttcgcttttgcttcttgataacgaatattagcttgggcgaaatttttcagcaccttgaaaccttccttgagacgggtaatttcatcctcagttacagtattatcagaaaatagaacatcaacagctttacgaatttctaaagcttcagcgcgggtttcctggacttttaacttgagtgtagccaaattactgagaacttgtacagcttgggtaatggcatcctcaccgttagtattatcaacagttggttctttgacttctattaactgttgaggaccaaaaccttcttccaattctgtgggtagtttatcagcttccatcagttccatcaactgatccattgctttatcacgggctttagccgaatctcttccaggaacagtgaggataatttctggactttgagcgagagtatattgaaccatagtaggggaaaaatttgctggtttaccaagatggtatttaattttaacatttaaattaattggtaattggtaattggtaattggtaataatttattcccactgtcacctgtcacctgtcacctgtcacctgtccccagtccccagt

SEQ ID NO: 8 - DNA, 105395 bp, Sphaerospermopsis sp. LEGE 00249
  LEGE00249_17
ttgtttgatttagttaaacaatattaccaaaaacaccgattaaaatacaaataaaatcgatgaaatacactttttattcttttgtataagatatattcctacattattgcatttcgtcgatgtttttttaaggcataaaaaaaccactcagatcggagtggtttttcaaagagtcgaaatagtttaagccgacttataaattctgttaatcgggatggaatgaccttgttttaatataacccgctggtcagtaacagcccaaacagtagtttctaccacttttttggattcattgtcttcaaaataaattctgatttttgaatgttctaaattaccaagcgctaatgccctgaccaattctaattggcgttgctgcacttcttcacgagtggctaaaacatcagcttgtggaaaagaaagaagatggataacttctttggaaatagtttcgaaatttggcttcatactattagtgttaagttagtgaatagatttatgggtagattaaaagtaataaaatatctttgccttccaagaaaaaaacaaaaaaaatattttacaaattgattgcaacactctcaaattcaacactatctgtcagcataaacagcaaaggagctgaactcatctccatccaaaacatccaaaccaaacgcgaatacatttgggaaggaaaccccgaatactggggcaaacactcccctattcttttccctattgtgggtactttaaaaaacaacgcttaccttttcaatggacaaaattatactttaccgcgtcacggatttgcgagagatcatgaatttaaagtaatcagcaaagaacaagataaagtcattttttctttacaagaaaatgcagcaacactagcgctatatccatttaattttgagttgcaagtctgttatactttaactgaaaaagaagtggttgtgtcttatcttatcaaaaacaacaaccaaatgaccatgccattttccattggcggacatccggcttttgcgttaaaaaatgcttttaccgactatagtttgagattcgaaaaagaagaaaatttaactagttatagtttagataacgacttgatttcggataaaacagcaattgtgccgctacagcaaaacctactaccgttaagttatgcattatttgaaaaagatgctttagtctttaaaagtatggcatcgaaacaaatacaactcttggaaaataatgtgcctattctcaatttcaaatactgcgattttcctcatttcgggctttggactaaagtcggcgcgccattcgtttgcttagagccttggttgggttatgccgacaccattgccgctaatggaaatctgatggaaaaagaaggcattacgctattggaagctaattcggaaaaagaaatcagttatagtatagaaattgtataaatttaccaaaaacgattgtcatgcttaccatcaacttccatcctttccaaaacctcgaaaccgaacgactattattacgtcgtctaaatcctaacgatgtagcagaagtattcgccatgcgaagtaatccggaagtgatgcaatatattcctcgtccgctagcccaaaccaaagaagatgccctagcgcacattgtgatgattgatgaaaaaatcgaaaacaatacaggaatcaattgggggataaccgttaaaggtgaagataaaatcatgggtatcattggccattatcgcatccaacccgaaaaccaccgcgcggaaatcggctatatgtcgctgcctgaatacaatggaaaaggctacatttcagaagccataaaagcagttgttgcttatggatttgagcaaatgaatttacactccatagaagcggtaattgatccgggaaacacagcttcggaaaaagtattgctgaaaaacggctttgttaaagaagcgcatatattggaaaacgaattgtgggaaggaaaattctgggataccgtgatttattcgttattaaaaagaaacttcaaaccgtaatagtattatccgagtttcggtaacgttttgatatatagtgtttccacttgctttcgagcccattcggttttgcgcaaaaaagtcaaactcgacttaatactgggatcatggttaaaacacctgattttgattaattcacccaaagtatcaaaaccgtaataagctaccaactgctctaacataagctgtaaggtaacaccgtgtagcggattgttgggttgtttattttccatgtcgtaaaagtaaaaataaaaaccgcctgtcacaacacaggcggtttaaactccgattaaatcgggactaacttataactattaactataaaattaaaacacaaatttaaatccgaatgacaatggagtagttaaattcggagcacttccacccaaagcactaatgtaagctgggtctactgaagctacatgagctacagagaagttattgatggttgatttatcacctccgtcaggtttaatagtagtagaggtaaaactagccaagttatatgaaaactcaacactaaagtttttagttacaaagtagtcaaaaccacctgacatagccacaccgtattgatttactttagtgttagcttctttttctttccctgtaataattggtgttgctaattgaccaaagaaatagaagttaccggctacattccaatactttcttactaatggttcaaccactactaaattagtgttagcatttgtagtagaacctgtttcagatttgatgtttactataccaacaccggcaccaacagttacagaaggagaaacgaaataaccaaccaaaggtaaaacggttaaattggtccctttagtatcaccttctttagtttgttggtaaccaaactgtgaagtggcccaccatgcgccttctaatcctttacttttttcttgtgcttgagcagttaaaccaaaaaatgctaatcctgctactaataataattttttcattttgattgttagtttaaaattataccccaaaattagggggaacaattccactaaaaactgatataaatcatagtttaaacattttttttattgataatttcacattttttaattcctacttttccgcttttgttcatacatttgccatcctatgttgaaaaccataaacatatttaataaaagagccaagtttgattacgaaataatcgaaacttacacggctggtattgtactaaccggtacagaaatcaaatcaattcgtttagggaaagccaatatcacggaaggtttctgtgaatttcacaatggagaattgtttgccatcaatacccaaattgacgaatacctttatgggaatcaattcaaccacaaagccaaaagcgaaaggaaattactcctgaataaaagagagttaaaaaaactcgaaagaagtatcgatacgaaaggattaaccattattccactaaaactctttaccaacgaaaaaggtttggccaaattagatattggtctttgccgaggaaagaaaacttacgacaaacgagaaagtttaaaggaacaagatgttaaacgcgatttagaccgaatcaaaaaatccttttaattcttatcttctagtaaaggaacaaaacgaaattcaccaaactcgtgtttttcaaattgggtttcgtttttgcgaatcaacatcgtcatgatttgctcgccttcacctaacggaatcaccagcctgcctcctatttttaattgtgccatcaaaggtttcggtattattggtgctccggctgtaacaataatactgtcgaatggcgcaaaattcggcaagcctttataaccgtcaccaaaagacaaatgttttggtcgtatgcccattttaggcaacaaagctgaagtaatcttgaaaagctcgttttgtctttctaccgaatacactttggcgcccatagctaccaaaactgcagtttgataacccgaaccggttccgatttccaaaattttatcgtcttttttgacttgcaataattgggtttgaaaagctaccgtaaaaggttgggaaatagtttgcccggccgcaatgggaaaagctttgtcctgatacgcaaaatcttcaaaaccggaatccaaaaacaaatgtcttggaatgcgtttaatggcatccaatacagttttatcagttatgcccttttcttccagcaacttggccagttggtttcgtaatccttgatgtttagcggtatctttcaattggggtagcaatttatggggtaaaaatagcggttaatattgcaatacgcaaattctaaatcccgataaacttttatcccgaagtttcgggacttaaacttttaaactttaaactaaaatgctacttttgataaaatttatttttatgcttaaagttggcgttttaggtgccggtcaccttggaaaaatacacttgcgattactacaacaatctgaaaaatatgaattggtggggttttatgatgaaaaccctgaatatgccgaaaaaattgcagccgagtttggttacaagcgttttgataccattgcaaagttgatacatgcagttgatgtaatcgacattgttaccccaacgctttctcattacaaatgtgctaaagtagccatcaaatcggggaaacacgtttttattgaaaaaccgattgccactactgtggaagaagcggaggaaatcatcacgctagccaaggaatacaatgtcaaaggtcaagtaggtcacgtagaacgatttaatccggcttttattgctgtaaaaaaccaaatcgacaatccgatgtttattgaaacgcatcgtttggccgaattcaatccgcgcgggacagatgttccggtggttttagatttaatgatacacgacattgatgcgattttaagcgtagtgaaatcgaaggtgaaatcggtacacgccagcggtgtttcggtgttgagccaatcacctgatattgccaatgcccgtatcgaatttgaaaacggttgtgtggccaatattacttcgagtcgcatttctatgaaaaacatgcgcaaatcgcgtttcttccaaaaagacgcttacatctcggtggattatctcgacaagatttgtgaagtcgtaaaaatgaaagacgctcccgaagtacctggcgattttgatatgattctgcaaaatgccgaaggcgaacgcaaacaaatttatttcaacaatcccgatgtggcacctaacaatgccatattggacgaattggaaacttttgccgatgctatcaataacaacactacaccgatagtaactttggaagatggaaccgaagccttgcgcgtggcttatatgattattgattcgatgaacgaaaaataatttgtttagcgtaaataactttaaatcttaaacttcaaacaaaccaaactaacataatgaatacaatagctgtaattggtgccggaactatgggtaacggaattgcccatacctttgcacaaagcggatttaccgtaaaattaattgacatctctgaaaaatcattggaaaaaggtatggcaacgattgctgctaaccttgaccgaatggtaaccaaaggaaccattaccgaagacgacaaacacaaaacaataagcaacattattacttataccgatattaaagacggtgtggtgggttgtgacttggtagttgaagcggcaacggaaaacgtaggtttaaaattgaacatcttcaaacaattaagtgaggtttgcgaccataatgtgattttagccaccaacacttcttcaatttccatcacccaaatcgcggcgcaagtcgtacatccggaaagagttattggtatgcactttatgaatccggtgccgattatgaaattggttgaaatcattcgcggctacaatacttccgatgaagtaaccaaaatcatcatggagttatcggttaaattgggtaaaaccccaacagaagttaacgattatccgggctttgtggccaacagaatccttatgccgatgattaacgaaagtatcgaaaccttatacaatggcgtggccggcgtaagcgaaattgatactgtaatgaaattaggaatggcacatccgatgggaccattacaactggccgactttattggattagacgtttgtttgtctattcttaacgtaatgtacgacggtttcaaaaacccgaaatacgcgccttgtccactgttagtgaatatggtgatggccggaaaactaggcgtaaaatcaggtgagggtttttacgactattcagaatctaaaaaagcagagaaagtttcgaagcagtttgcataatgtaaaaagccataagggataagggaaagaggttgaacttatccctttctacttatctctttcaactcaaaaaaaaatgagtaaaataatccctttcaaagccgttcgtcctacgccggataaagtagcgttggtgacttgccgcaattacgacgattatagttcagccgagcttgccgcttggttgagttttaacccgtattcgttcttgcacgtgattcatcccgcctacatgtattcgcaaaaaattactttagacaaacgctttaaaggtgttgcccacaagtaccaggattttaaagatgacggtgtttttatgcaggaagaaaaagcggtttttttcttgtatgaaatccaaacaaaaacacagtctttcaccggtatagtggcaggaacttcaattgaagattacaagaataacgtcatcaaaaaacacgaagacaccttgcaataccgcgtagaatacttcaaggattatttacaccaaacgggatttaataccgaaccggttttaattacttaccctgataacgaaaccctgaatgcttggatagccgagaagaaaaaaagcacaccggtgtacaactattcgactaccaataaagaaaagcaccaactttggaaaattgagaacgatagcgaaatccaatggctgacacaacaattcgaaaacatccccgagttgtatatagccgatggccaccaccgttcggcttcggcagaattgttatttgacgaagaccaacatttgggcaatcaaaatttaaattatttcatgagttttctgattgcggaaagcaatgtgaaaatctacgaatacaatcgcattatccgcgatttaaacggctacaccaaagcggattttctcgaaaaactggccgagtatttcatcatcaaagacaaagaacaggaattgtggaaaccacaaagcaagttcgaattcggcatgtatctcgacggcagtttttatgctttattttacaagcaaaccaacagtagcgaatcgtcatgccgagcgcagtctagggacattttagagaatttggacgctcaaattctatacgataaagtgttgcaaccgcttttaggtattgaagatttgcgaaacgatgaacgcattgagtatattcccggaaaacaatcggtagcgaccatcaaagaattggttgacgaaggcgagtttgaagttgggtttatgctctacccttcggatatttccgaaatcaaagccttggctgataaccatttgatcatgccgccaaaaagtacttatatagaacctaaattccgcagcggattgatggtttatgaactatgatttgaaaattagtcaattttgaaaatttgaaaatgtctatagcacaaaaccttcttgatataaaatcttcattacctgataacgtaaccttggtggcggtttccaaaaccaaaccggtgtctgatttgatggaagcttatgaagccggtcaacgcatatttggtgaaaataaaatccaggaaatgaccgaaaaatggcaacaaatgcctaaggacatcgaatggcatatgattggccatgttcaatccaacaaggtaaaatacatggtgccttatgtaaaactcattcacggtgtggacagtttgaaattattgaaagaaatcaaccgtcaagccgttcgctggcgaaaaaacattaattgtttgttgcaaattcacatcgccgaggaagaaaccaaattcggtttaaacgaacaagaactagaggaattattaaattctgaagaattcaaagccatgaccaacatcaaaatcgttggcttaatgggcatggccacctttacagataaccaagaacaaatcaaacgagaattcaatcatttaaaaaagatatttgattctctaaaaaaccaacctacaacccaaaacttacaacctacaaccctgtccatgggcatgagtggcgattaccaaattgctatagaatctggtagtactatggttcgaattggaagtagtatctttggcggaagataataaaattaaacaacatcaaacctttaaactgtttaaaccatttactgcatactcgacatagaaaccaccggaggccaattcaacgaagaaggcatcactgaaatcgccatctacaaatttgacggtcatgaagtggtggatcagtttatcagtttggtcaatcccgaaaaaccgattcagccttttgtggtgaagttaaccgggattaataatgccatgttgcgttcggctccgaagttttatgaaatagccaaacgcattattgaaattaccgaaaattgtatagtagtagcacacaacgcttcgtttgattaccgcattttacgcacagaattcagtcgcctaggctacgattttgtgcgaccaacattatgtacggttgaattgtctcagaaacttatccctggacaaccttcttacagtttgggaaaattagttcgttcgctcgggattccggtaaccgacagacatcgggccagcggcgatgccttagccaccgtaaagttgttcaaaatgattttggacaaagatgtttccaaagaaattctaatcggtttaatcaaagccgaaatcaaaaaagggttatcgcctaaactgctggatattgttgaaagtatgccgacaagaaccggaatctattacatccacaatgaaaaaggcgatttgatttacattggcaaaagcaagaacatcaagaagcgtatcaaccaacatttcacaggaacttcaggcaaaagcaaaaaaatccaacgcgatgtttttgcggtaacctatgaagaaaccggtagcgaattgattgcgttgctcaaagaaagtgaagaaatcaaaatcaacaaacccatttacaaccgagccaaacgcaagaccattttccaatatgccttgtatgccgaaaaagatgccaatggttatttagcgttgagagtacaaaaagccgacgggcgtaaaaaggaaatcacctcttttacttctatccaagaaggtaaaaatttgttgcataaaatcaccgccgaataccaattgtgtcagaagattaacggcttatacgaaaccaaaaacggttgttttcaactcaaaatcaaagagtgtaaaggcgcttgtttgaaccaagaacctacggaagaatacaatgagcgcgtggaggaattcatcagcgaaatgaagtttgacaacaacaatatggtcattatcgacagaggcagaagtgtcaacgaacgtagtgcggttttaatagaaaatggagtttacaaaggctattgtttcttcgatttgaattaccaaatcaacaatattgaaatcctgaaaaacatcatcataccgatgcaaaacaatcgcgatacacgaaccattattcaaggctatttgcgccgacataaggtcatacgaattgtaaaattttaatttgaagccgtttcccgctattcgttacaatctcttcgaggatttctcccgaagtttcgggactatcggggctaaaatatagtgcattgaactacttaattaccataataggaccaactgctataggaaaaacttccttaagcatcgctttggcccaacatttccgttgtgatattctttcgtgcgatagccgacaattttttagagaaatgcgcattggaaccgcagtgccgtcgaaggtcgagctacaatcagcaccgcatcatttcatccaaaacaaatccatttttgaatcgtatacggtaggcgattttgaacaagaagccattgccaaactcgatagcttattcgaaaaaaataacatccaaatcatggttggcggttccggtttgtatgtagatgccgtattgaaaggttttgatgattttccggagataaatgaaaatattcggaagcaaattaacgctgaatttgagcaatttggaattacttatctacagcaagagttaaaaaaacatgatcctgattattaccaaaaactaagcctggaaaatccgcaaactttgcaaaatcctcagcggatgaaacgctttgtagaagtgagtatcggttccggaaaaccgtattcgagctttatcggacaaaagaaaaacagtcggaacttcactcctattgtcattggattagaagccgagcgagaagtaatgtatgaccgaatcaaccaacgtgttgacttaatgttacaagaaggattattgactgaagctgaacaattacatccgcacaaagcattgaatgcactacaaaccgttggataccgagaactgtttgagtattttgttggtatagtgactttagaccaagccgttgaaaacattaaaatgaacacacgtcgctttgcgaaacgccagattacgtggtttaaaagaacagaaaataccacttggtttgattataaaactgacacaaacaccattgttaagcaaattgaaaataaattcctaaatcttaaatcctaaatataaaaatgcccattgcaccgaatttcacttctaaactaacccaagactgggaaatcaactttttgcagtgttattcgaacggttatttaaaatacaccgatttgtgtaacattttgcaattaacggcagccttacatgccgaattgggcgggattagttttagcgacatgcaagcacatcatcaggcttgggtgttgagccgaatgcgtgtggaagtaaaccgtttacccaaatggcgtgatgtagttacggtaaaaacttggattcaatcgttagaaaactcgaggtcgatacgttgtttggaattgtatttgggtgatgaaaagttggcaggatgcgaaacgttttgggctgtttttaatactaaaagtcgccgaccggaagctttggccttaccacacgagcattttgaaaaatatccgaatgagtcggccactgcagaaagcttttctaaaattgacactacgctaacgaccgaattggttgttgaaaaaaaggtattgttatcagacttggatatagtgaatcacgccaatagcatcaaatacttagaatggtgtttggataatgtagcgccaaaactactgctagagcaacaacttaaaagttttgaaattaattacctaaaggaagtttcgctaaacgatactgtagctattgggaaaaacgaatctgaggctactactacttttacccttaccgccaatgacaaaatttgttgtgcggtacaacttaactttcaataaacactactaccctagcccggattatctcactaagataatatttgttattggtgttcaatgaatgcttcgcatttgaagcgagctaccgtgtagcgcggaaagccggacacgagcgcagcgactggcgcagcaaacagctcctaaaaaaaatccccgtcagatgacagggatgttatttatttctttaccaccaagcgaaaaccttctccgtggatgtttaaaatttctacgtttggatcgtcttttaggtacttacgcaatttggcgatgtacacgtccatacttctggaagtaaagtagttgtcttctctccagattttggttaaggccaattcacgcggcatcaaatcgttttcgtagatggccatcattttcaacaaatcagattcttttggcgacaatttgataggctctttatcttcaaatttcaagaaacgcaactttgagttgagcatgaatttgccgatttggaattcgaatttggccggttcgtttttgttttcagtcgcctttctttggatgatggctttgattttcattaatagaacgtcggagtcgaaaggtttattcaaataatcatcggcaccaactttgtaacctttcattacatcttctttcatggatttggccgttaagaaaatcaaaggcacgtctttgtttttttctctaatttctttggccaaggtgtaaccgtctttataaggcatcatgacatctaaaatacacaaatcataattgtcttttttgaatttttcaaaaccttccatcccatttttggccaaggtaacgtcgaaatcgttaagggtgagatattctcttaatacgataccgaagttttggtcatcttctactaaaagtatttttttatttgtttccatagtctattttaatttatgagtgggactttaattataaatgtgcttccttttcctttttcactttctacaaatatttgacagttgtggtcgtcaagtattcgtttaacataagccagacctaagccgtggcctttaacattgtgcaaatcaccggtatgctcgcgatagaatttttcgaaaattcttttttgggcgactttagacattccggcgccttggtcttttattttaatgatgacaaactcttttacgttttcagtgtagacatcaataataggcgctaaaggcgaatatttgatggcgttgtccaggatgtttactataacattggtaaagtgaacatcattgagcaataccgtagttctggtagcatcgaaatgcgtggttattttaccctcacggtcttcgataatcaagttaacgtgttcgatagcgtcttctataattccgtgtatatcgttgctgtctttgctaatgtcaagctcttttttctccaactttgaaatgcgcaatacgttttctacttgagcgtgcattcgcttattttcgtcgcgaatcatttgcagatagcggtgaactttttctttgtcttcaatcacctttggattcttgatcgcatctaacgctaagttaatcgtagctataggtgttttgaactcgtgcgtcatattgttgatgaaatcagttttgatttctgaaatctgacgttgcttgatcaattgactcaaagcactagaataagcaatgatgatgattaacgtaaaaatgatggacaacacgcagatggcaatcaactcggaaaacaaaaattttttcttttgcggaaaagtgatgagcaattggtacttattgttgccgtcgttatcaataaagattggaatagaataagttgaagctttatcgtatttaaaattttccgattttactttagtcgctaatccgttactgtaaacgttgaactcaaaaggtgtttttacaccgtattcttttagctcttctgataacatcttctgcagcatctcatttgaaatcctttcttgtattggtcgcatagcggcgatatcacgaaaaaacatttcaaattggtagttgttcaacaaatctaacgaacctgttttttcaatttttacatcaggagaactgttttgcttgatggatgaattatcgacaccatcagagtacacctctgttttccgattggctgaaaaatttttaattccctttaaactgtcgagttttttatcaaagaacgaaggtgagattccgtaatcttcagaaattatactgttagaatacacaatagtttcgttagttctggagtctctttgaaaataaccaaattccaaaaaatcacttttttcaggggctttaccgatactgtctttaacgtgattgtatttttcgtagaaagtataagcctcgtatttctgaagtttattagctacattacccagaacttgctttacatgaaatttaaattgttcttcgttgttttcaaaagacttgtcgaaccaataaacttgtaccaaaataatacctatcagggacaagctcattaagactacaagaattcggaaaaacaatttattcattaaacaaatttagcattttaacatttagacaataaatacattaaccaaacattaacaacttatgtcattactgattttttttcaatgttttaagaatattatctacttgaattttagtgagttcgatattgacattttggattacatagtcacttagtgcaattttctcatcttccttccattggtttttcattctggcaagcacttggtcttccgtgacactgtctctttgcataaccctttgtattctaacattttccggagctgtaactgtaataattttatcacaaaattgataactgcccgattcgaataaaattgcagcttctttaattacaaacggatgattgtggtgttttttaacccaattttcaaaatcttgtttaacttttgggtggatgatgttgttgagttcttgcaatttgtcaggagcattaaaaaccaattgggctaacttttgtcgattgacaacccctttttcgataacactgtctccgaaagtcttggcaactaaagacagtacttcaggagtattcataacttttttagcttcctcgtctgcaatataaaccggaatgccttgcgccgctatataacgagccacagtagtcttaccgcttcccatgccgccagttaatccgatgatttttgtcatgatttcactttaaaaaaaagttcaggaaaagctttttgcggttgctgtttcaaacatttgattttaataaatgattgcaagaatccgagtccgtaaccccaaaattgtttggttactgcaatcaatgccaaaaaaccgatttcaatgcttttactttgaacagttgcagaaataaagagcaataaatagtaaatactatagcaagctattgggaaaacaaacccgaacggtaacactgcaattgagaaaacaaatcccaatatgaagagtgtaggaaagagaaaagttggtttttggtattcaggataccaactgtctaaaataggtcgtgctttcccgaatttggatacttgaacagaaaacttttgccaatcaattctgcgtttgtgatagacgaaagctttaggaaacaatcgcgtttgaaatcccattttccataatcgaatggataaatccggatcttcaccgggatgaatattcccaaagccattggacgcttcaaaagcctttttagaaatccccatattgaaacttcggggttgaaattttcctattttttcagagcctcctctgatgccaccggttgttaaaaaagaggtcattgcaaaattgattgctttttgaatcttagaaaaagaatccaatgcggcatcagaaccgccaaaacaatctgtaaattctgtctcgagttccgcttctacttccaacaaatagttttgaggtataatacaatccgaatcaaagattagaaagtaatcgccttgggcttttctcatcccgaaatttctagaatcaccaggaccgctattttctttaaaatagtaggaaatattcaattgagtagaaaatgaatcgatgatgtgttgacacggaattgatgaaccatcttctaccacaacaatttcataaggcttagtgtaattagacgctaagagactatccagcaactcctttatctcctcgggacgattataaaccggtataatgattgaaaaaaacatctggtaatttttaacaaagataggatattataaaaaaagaaaggccacctaaatttaggtggcctttcaatatttaattgtatggaaaactattctttgattactctgatagttttagattggctgttagctgttgctacttttaccaaataaacaccattaggcaattgagacatatctacttgacctaaagttgcatccaagttgttgctgctaactttttgtcccaccatattgaatacttcaactgaagtaatttcttggttgtaagaaagattcaaaacattcttaaccgggtttggataataagtaaagttggcattatcaaatgaaccattgctcaaagaagcatcgtaagctgaaatagcaaagccaccggcattgtcatcattatactcataaactctgatatacaaagttgaaccagcagttaatccggttaaactttttaaagagtaagcacctgttgtagcaccatcatcatcacaattaatctgtgttaattgattacagtcgcctgagtaaatagtaattactgtatctaaaccggtagctcctgttgtagaatcaccagtctcaattgttaaacttccactagccggaacaacaacggtataccaaacatcacctcctgcaaaaccaaaacaagttgttggtgcagcttgagttgaatcagtagctcctatgttagtaccattagttaattgagctgaataagtacctccaacagttaaagcagtggctgaaccacactcgtcattagccggagccggtggaggagtaactgtcaaaataccatttacgaaagtagtgccatcccagaagttaccattgtttggagaactttggttaataccaccgtatacataagcaccgttgtttaagttaaaacgtgtagcatagtagtaagtccccggtgctaaagtggcaccaatattagcttcgtattcatcattattaccgattgaaccagcattgtgagttgcagcaacccaagtagtccaagaatttggatttgtattggtagtactgtaaccaacccatgcattgatacccggagcttgaccgttgatgttaggagcaacgtctgttaaacctccttcataaacttgtccgtaaacagtaactgtacctccttgagagatagtagctgttggtggccattgcaaactcacataatcaggagagtcagtagaagcaactccacaaattactattctagatctgttatcagtgttatcagtacaatctgtatcagcgtgagtgtaaaaacgaacttgacctgtaagtgtagaaacccaagtaaccggagttgttccgtaagcagcagcagtagcgcctccgtcagcactgattgtaattaaatctgtagcgattgaacttttaaaagtatacgtttcacctaaaacaacatttactaaagaatactcacctgcccaaccatttgtaaggatagaattctcagtaagaccgtcacaagttgccggtgtataccccgcagcacctgtaggatactgtccatttggagaacttaaacaatatcccggaggagcaattgtagtaaaacttgattctgaacaacctgttgcagaaccaccggcatttttaggaactaataaccaatagaaagttgtgttatatcctgtgatatcaataggtgttgaagtagttgtgaaattacctactaaaatggtagcattccctgcagtcaaaccatagtataaatcatatgaagttgcaggatcaccggttgttggtgcatcccatgaaaaagtaactgtacccggaactacagtcgtagagccattaacaggtactaaattactagcacatcccggagcaattgtagtattaaaagtaaaaggtcctgcccaagtactgaaactacttccggaagcacattcatctcttacgtaaaactcataagcagtcattggagacaaagtagttgcagagtaagtattcccagcaacatttacacctgtatcgtttgcagttccaggagttcctgtaccggcaacttgaattaaaacctctgcgtttgcagcaccacctgatgtccaagataagttagccgttgttgaggaagttacagtagcaacacctgcagtaggcacagcacaagccggtaaagaaacacttagtgtgtaatcttctgcttgaccataacctgcacctgtttgacaagccgtaccaaaagcattataacgcttcaccacacgcattcttttagaacctgcagaggcaccagccggtactgttatactaccaattaactcaacagcatcttctcccgttgagttaacaatatttccgacatcataagattcaccggcatcatcaaaatcattgtcagcattccaatccacaaacactcttagtctggtagtaaaattaccatcggtatttccttttaaggtgattgggtaagtgctgcctgctaacacattaccggttagcgcagtgtaatcttcatgagcaatgatggttgtgccgttattttgacccactgttgcagaactggtattgttaatacctgcaaaattgaccaaagtaattggctccacattgctcgtgtaagtcatcggtccgcaatagggcgcaggaaattgcccaaaagcagcaaaactgataaaagacatcagcaatagagtaatttttttcatttgttaaagattaaagttaattgctataaaggtataaaaaataaaaaaacccacaaatttttgtgagtttaattaaattaaaaacatgaaatgattttaactattgataatacttgggatcaaagtcatctcatttgcttctgaattgtaatcaacaccttcaaatccgaaaccaaacaaattcaaaaagtcttgtttataacctgctaaatctccaatttcaggaagattttctgtggtagctgtagcccataaagccttaaccttctcttgtatatcttctcgcatttcccaatcatcaatgcgaattctgccttgttcatcagttggcacatctttaccagcgtacaatctttctgaaaataaacgttgaatttgttcaatacaaccttcgtgcacgccttccgctttcatgattttgtaaagcaatgaaatgtaaagcggaataaccggaatagctgaactggcttgggttaccaaagccttgttaaccgaaacgtaagctttaccgttaatcgattttaaactatcggttatttcaaaagctgaggcttccaagtgatctttagctcttcctatagttccttttctgtaaaccgcttctgtaacttcaggaccaatgtatgagtaagcgattgtggaaactccttcggccagcactccggctttttgcaaagcttccatccacatagcccaatcttctccacccataacgactactgtattgtcaatatcctcttgattagcaggttcaatcgacacttgggttacattaccggtatgaaaatcaaccgttttgttggtaaaagtacctccaatcggtttcaatacagaacgatgtaaaacgcatgtaaccgggtgcatacgtactggtgatgccaagctgtaaatcaccatgtcgacctgacctaaatcggctttgatcaaatcgattgttttttgtttgacttcattagaaaaagcatctccattgatacttttagcgtaaagtccggccttacttgcttcttgttcaaaagctgctgtgttataccaacccggggtagctgtttttccttctgtcggctctttttcaaagaatactccaacagtagctgctccagagccaaaagcactggtgatacgcgaagccaatccgaaaccggttgaagctccaatgaccaaaactttttttgcgccatcaatggcacctcttgattgcacatattggatttgatttttaacgctttgagcacatccatcgggatgagctgttaaacaaataaagccgcgcattcttggttctataatcatatgctgtagtaattaagttcttgtattaaattaaaagtggcacaaaagtaacaaatttaaacggttagtttagtaaagctttggcatgattcaatgccgaatcactgatgtctttaccggaaagcattcctgcaatttcatatatgcgttcctctgcagacaacagtttcaattctgaaaccgtactttcgcccgaaacggttttgtaaactttgtaatgggaaattcctttggcggcaatttgtggcaaatgggtaatcgcaaaaacttgcatggttttactcatttgttgcatgatttcacccattttattggcaatttcacctgatacaccagtgtctatttcatcgaaaatgatggtcggcaattttgaatattgcgctaaaaccgacttcactgccaacatgattctggacatttcacctccggaagccacttttttcaacactccgaaatcagtgcctttgttggccgaaaataaaaacaacaaatcgtcttttccgttattacggtagctgccggaagcagaaatttctattttaaattggacattaggcatgcctaattgggctaaaacttgaaccaattgatgggtcaaacccggaatagcttctctcctacttgaggaaattttaacagaaatcacatccaattccgcttcgatatcctcaatagttttttgcaaagcaatcatttcttcctccaaattaaccacagaaactactttagattctaattcgttttggatgttgattaactcttcaaccgttagcacttgatgcttctttagtaaggcataaataagctgtaacttttggttgatgagctctaatttttcgggatcactaaaaacggaatcggattcttttgccaactcggcgactatatcatccaactctataacaaccgattgcgttctttcggacaaggcttgatattcagcagaaaaaccactatttttttgaagtacggctctaaattcttttaagtttttcaacaatccgaattgctcatcattagccaaagccaataacatggaaaggttgtctttgatcaattcgacattgtttaaagcctcataacttttctccaacccttctaattctcctgctttcagattggctgcttgcaattcattaaaaagaaactcattataatctttctctttcaagatgcttgacaaggacgattgttttgactctaaatcagacttagccgtgcggtattgcttcagtttagtaacataagatgcaataagttcttggttggaagcaatggcatctataatcttaaattgataagcttcgtcagccaactctaaggtttggtgttgggaatgcacatcgattaaaaactgactcaaatcttgtaattgctgcagattaaccggactatcattgacaaatgcccttgattttcccgagggcaaaatttctcttctgatgatggtttcctgctcataatccaaatcattttcaacgaaaaaccattgcaaattgtaggcgccaatctcaaaattggcttccactatgcatttttcctctttatttttcaaggaggacaaatcggctctttttcctaaaaccaaacccaaagcacccaaaagtattgactttccggctccggtttctcctgtaataattgaaaaacccttggaaaaatcgatattcaatttttcaattaaagcgaaattttcaatcgacagtgacgtaatcataatagcggaatgaggataaggtatggcaacaaaaaattacaacttaattgtagcccatttggctgaattaagtggtgaaattcggttcaaagtatcgatggcatccgataccggcacttttggtccgccggaaagtatggatacaatttcatcgactttagcatcaaaaaatacgcgagtcaagaaagcattcggacgcacactgtaaatagagcttagcgtattgatggaggtaataattgcttctttggcgactttggtatccttagtcatagtgtctaatccatctctgtggtattggtacatcgattctctgaacgcatcaaaagttccggacaacaaatcactgattaaaaagtaacggttttggttaccgtcggcctgagaccaacctttgtaaccactttgttgggctaccgacaatacttgttgggccgtatcaaaccaagatcttccgccattcaaagcgtaggtatcggcatcaaaacccaaaatcatgtagctgtaaaaagccaaaacggaaaccaaattcgagtcgaaactggccggattaaaaattaaattctcaaactctatatagcgaaaattaaagtctttatcgttgtaattaaaaaccggtgacgcataagaagaattaaaaatcggacgcgaagattcaatttgcaaagtagcgttgaactgattagagtcgtagctgttcaccgtaattaccattgaacagttgattttttcgtgttgcttgtattcttctccggtccaatcggttttattgacaaactcgctgacagacttttccaaattcttaaaaatctgggtattggcattagtcactttatcggaaatgacttgaacagtgcaattcagttgttgcgcttgggttaaaccgataaaaaacaaaaaaagaaaactagctatttttttcataatgcgatattactttgttgatgatgtcggttgctacttcttctttcgacttcaaaggcatggcttcaatatcaaaatttttatcaataaatgtcaccttattggttgctgtagcaaaaccggcgcctttatcctgcagcgaatttaaaacaatcaaatctaagttttttttctgaattttcaacttagcgttttcaatttcattttcagtttccaaagcaaatccgattaaaaattggttttctttactttgtccaagcgaggctaaaatatctttcgtcttttcgagttctaaagtaagtgtattttcgctttttttaatcttttgatcggccacaaatttaggtttgtaatcggctacagcagcagcacaaatggctacatcaacttcaggatagtattgatgacaagccgcatacatttcggcagccgaagtcactcgaactaaagcaatatttttgctctgaagttgtaaagttgttggaccggaaatcaaggttacggttgcaccgagttgtgcggcacattctgcaatatcaaagcccattttaccggtagaatgattgcctataaaccgaacgggatcgatggcttcataagttggaccagcggtaatgagcaatcgtttgccttttaatggcaattgactttctaaatcgcgctcgataaaggtgattatattctcgggttccgccattcgaccttctccggataaaccactggccaattcaccactttctgccggaataatagtattaccgaattgcatcagcgtttgaaaactggctaatgttgacggatgtttgtacatgtctaaatccatggccggagcaaagtaaaccggacatttggcagacaaatatgtagcaattaaaagattgtcgcagttcccattaaccattttagacaaggtgttggcggttgcaggagcaatcagcattaaatctgcccaaagtgctaactcaacatgattgttccatttcgcgtcctcatcttcttcgttgtaaaaagtagaatgaaccggatttttggaaagtgtggataaggttagcggtgtaacaaaatccttagaagccggtgtcatgaccacttggacatcggcaccggcttttataaataatctgactaatgtcgccgttttataagcagcaattcctccggagacaccgagtagtatttttttaccgcttaaaacagacataggaattagtcttttgtagtatctctataataaattttgtcatctaaccattcttgaacggccaatgcatgaggttttggtaatttttcgtaaaatttagatacttcgatttgttctttgttttcgaagatttcttctaaactatcgttgtaagtagcaaactcttctaatttttcagtcaattcttttttgatttcagaattgatttgatttgctcttttagccattattgtaattgcctcataaacattaccggtgcgctcttcaattaccgttttgttgtaggtaattgtgtttaccggtgcattcgtcttttttaaatccatgacttattatttagaaaattgttttaaatcgttttcaatacgagccaacatttcgtcagctttagttttgtattcagtatccggtttgaacttaatcaaactttgatatgcagctacagcggcattcaatcgttcttccattttggcagaaacgctattgatggctaagttgtaagcagaatcaaatttataaaaaagtgctttttctttgaaaggcgttccagggtaattgatgataaaattatcaaaagctaccatagccgctttataatctgatatggtattgtactgcttggcattttcaaaagcctttttttccaacttttctctgagcactttaaccatgctgttagcttctgccagataagctgaattcggataaacgtcaataaagttttgtaacttatcgatggctttgtaagtatcaacctggtctaaactgtagaccggagacaattttgaaaaacatttagcgcctaaaaataatgcttcttcaactttttcactttttggatagccggcagaaaaactttcaaattggtaaccggccaaataaaactgattggttttgtaaagcgattgcgagtacatgtagaataaacgctctgcttggggtttacctttataactaggtgatatttgttcaaacagtcgaatggccttgttgtgtttattggcttcgtacatcttggttgccatagtaaattttactgcgatgtcctcggatttcaatgctttttggtattcactacaagaagcaaaaaaaacaacaatggttataagggctaaaaatttcttcattagtgtgttaaagattactgatatttaagtcattcccgactttaaaccagtcccagaaataggggacaaatttagttattaattgtttacaacaaaatattttttttgagagaccaaaaactacattcttgagattttattggtaaaatctttgatacgattggctaaattttcgtccacatttaccaaaggcaaacgaacactattttcagctaaaccaagagttttaaagacttctttgataccggctggattgccttgctcaaaaatcatatcaatagcttccgctaacaggtaatgaagctggtaagcttcgtctacttttctgttcaatcctaagtgaaccatttctgaaaattgtttcggaaaaccttctccgataaccgaaattactccggaaccaccggctaacaccattggtaatgttatcatatcatcccctgaaataaccaggaaacctttaggagcgttttggattaacttcatggcttgaactatatctccagcagcttctttgatggctactatgtttttgaaatcttttgccaaacgaatggttgtagccggtaacatattgcttgccgttctgcccggaacattgtataagataaccggaatgggtgaagcttccgctacagctttaaaatgctggtatattccttcttgcgttggtttgttataataaggcgacacggaaagtaaagcagtgaaatcactaaaatctcttgattgcaactcggccactacttcttgcgtgttattgccgccaacgccgagtactaatggcaatcttcctttattggtttcgactacggttttaattaccaattctttttcctctttagacaaagtagcgctttctgccgtagtgcctaaaaccactagataatctatgccattgtcaatttgaaaattcacgatggcctttaaggcttcaacgtctacagagaaatcttttttaaaaggggtaactaacgcaactccggtaccaattaatgattgcattttaaattttgtttagaattcttaaatatttgaacatttcttcagcaaagactttataattctctgcatttgtattgatcatgaaatgattaagccttttatcgatggaagcaaaaccaactttaaaaatagcttttgataggttggacaccaacagcagtgctaccttttcagtatcgtaatagttgattaacaaatcaaacggttcagctataaaatcctcaacttctttcttgtcaactgtcccgtgccaactcaaatctttgtagctgaaagtaggataatcgaacgattcattttttttgattttatctttaaaaaccaatactttaaccgcgttttcagcaatgccgttttggattaactcctgaactaaagcttctcgctctttaaaatacgattcgtcaaagataattccaaccgtttttattttaccctctgaggtcaaatgctttacatttgataacctttttttaactattttttttgttgaaaaatcctttaagtaatttaaaaacatactacttttacttgaattgcaatattactaaaaataagagccaaaagcgatggtaaatctaaaaaactataacgttgtaacgaaactttttgttttattattaacatttgccgcatttacatcttgtgttgaaaaaaaattctacgtcacccgaattgaaggcaaagaaatcggaattacccaacctgctgaaacggcgaatgctactgccggacaatcggctcagcaaattgaaaatttcatcaaaccttaccgtgacaaaattgataaagatttaagtatggttttggccaatgctccggaaaccattgataaatcaggagaatggcaaaccccgatgggtaattttttatcagacattacctttgaaaaatccaacattgtttttaagcaaagagaacacaaatcgattgatatttgtttgctcaatcacggtggtattcgtaacattatttccaaaggtgatgtcactgctcgcaatgcttacgagattatgccgttcgaaaactctgctatagtggtaggcttgaaaggcgaagagattttggggatggcacaatacatcatcgcggagaaaaaaccacatccgttaaaaggattgacttttactatcggcaaagacaaccaacctaaagaaattttggttaatggacaacctttagaaaatgccaaaatctattatgtagtgacttcagactatttagtgaacggcggtgacaacatgcttttctttaaaaaagcgaccgagcgctacgacctagaatataagcttcgcaatattattattgactatttcaaagccaataaagtcatcaaagccgagaaagaccaacgaatcagcaaagaattgtaaaatgaaaagaagagattttatacaaaaaacggctgctacatcagcattgttaggattgggaggattctcattgagcagtttcaaatcagtaaacaccaaacatttgacggttttacataccaacgatgtgcacagttatatagacccttttccggcgaatcatcccaaaaatcctaatatgggaggcgtggccagaagagcggctttgattgaaagtatccgaaaagaaaatccaaacgttttgctgttggatgctggagatatttttcagggaacgccttattttaattattacggcggcgaattggaattcaagttgatgagtatgatgcaatacgatttagctactatcggaaaccatgattttgacaacggtatcgaaggtttgtatgcgcaattaccgcatgcgtcattcgaatttgtgtcggccaattatgatttcaaaaatacggtcatgaacggtcatgtaaaaccttataaaatcatcaacaaagacggcattaaagtcggcgtttttggtttaggcattggcttagacggtttggtagacaagaaaaactataaagagaccatttatttagatccagtgggagttgctcaagacatagcccgaattttaaaacaagaaaaaaaatgcgatttggtgatttgtttgtcgcatctgggttataaatacaaagacgaaccggacaaaatttgcgatactaaattagccacattaaccaaagatatcgatttaatcattggcggtcatacacatacatttttagacaaaccaactgttttgaaaaatactgttggtcaagatgttttggtaaatcaagttggatgctacgggattaatttgggccgaatagatttttactttgatgatgataccgctgtaatttccaatggaaaatcaattgtagtttgattgctcggccacaaccacatatttgtacaaggagaaaaaagccaacacattgaaagtcatggctaatggtcggaaaatattcgtaaactcgttaatcaacaagtatttttcgataaagactgtgaattgtaacatcacaaaaagcaaaaccgcaatcaacaataccgaattttgtttattgtcgttcatcacataacttgacaaagccaaccccgagaatacggaaatcaaaatgttttgggttaacaacaatagataacttctttgcggaatttcggcggtctccataaacagataaaaaaagaccaatagaaagggcaatgttgctatacaaaaaggaatataatctttgattctttgcatacgcaacaccattgataccaccaaaactcggtgaatggtaaagactattaaagcgtattgcaaatattcggtagattttggaataaacagtatattggttagcatggaagaaagcaagactaacacaaacagtttgtttttgtactcagattcgatagtatatattacgattaataagagtggaatcaatggctttaaactaataataagtagtttattctgtagatactctgaaacaacttcaagtatgcccacagcaaagaagccaatcgtcaagtattgtactatttttcctttttgaagcatagagactttatcactttagattaaacaacttctttcaacttattgacaatcaagtagcgattacgttgcttttctgtatgtagtatatatttcgtcagtaaaaattgagcccaaacaaaaaatgccatggctatagcttgcaaaaaattagcctcttcataataaaaacgcagtataaaaacgaattgattgatagcaaataacaaggtgctgacaaagagaattctattcgctttattggaagtcaatacataatttaccagactcaaacctcccagaaaaacagtaaaaattccttgaatcaagaagatatataaactatcaccaatggtattaaacgtgaaaatagcgacagatgcataaataaaaacaaatgggatactgcccaaaaacaatggcagtaaatcaggcatctttacttttttcaacactataatgatgaccaatattctgtaaactaaaaaacaagctactccgaaaagaatgtaattccaagtattatcaataaaaagcaaattggctatccaacaaaaaaacaaggctatcaaaaaatagggattgattttatttgaacgtctaatgtaatacccaatcagcagcggtaaaataagtggttttgttagccaaaccagcaccttatcttcattgaattcagccgtgatttctatgaaagaaacaataaaaaaagtagtcaatattatactggcaattttattactaccccatcgcttcaaatactcgttactacccatctgtttatttaagtggttgctttttagagaaataaagttaaactaatatttcacaactcaataatttattgttaaaatttttaacaatattacaaacaagtaagaaatattagtctgaaatcatggctaaaaaatcaatttccgtaatgatagaaatttttaattggttggctttttccaattttgccggccccatattatcaccagctactacataatctgttttggctgaaatggaactgcctactttgccgccgttgtcttcaatagccttcttcaaatcatcgcgagagaatttttcaaaaactccggacaccacaaaggtctttctggctaatttgttggtagcgtttggattatgcacttcaaccagttccatttgaacgtcgtattgttttaagcgctcaatgattcggacgttttctggattatcaaaaaattcgataacactttgggcaatcttctctcctatttcatccaccaaaatcaaatccatcagggaggcattacgaatcgcgtcaatcgatttgtaatgtttagctaacttcttcgccaccgtttcacccacatagcgaattccgatagcatacaacactctttcaaatggaacctcttttgatttttggacaccgttaactaaattctcagccgatttctgagccattcgttccaagggtagaatttggtcaactgttaactcgtacaagtcagcataatcttttaccaaaccattgttataaagcaaagcgaccgtttctccacctaatccttcaatatccatcgcttttcgggtgataaaatgttgaattctaccaataatttgtggcggacaaccataaaaattcggacaataatgattcgcttcgccttcgttgcgcaccaattcggcttggcattccggacaatgcgtaatgtatagtgttggcacggcttccgcatttcgtttagccaaatcaacaccgatgattttcggaataatctctcctcctttttctacaaaaacagtatctcctattcggatgtctaacttttctatttgatcggcattatgtaacgaagctctttttactatagttccggccaattgtaccggttctaaattggctaccggcgtaatcgaaccggttcgaccgacttgataggaaatcgaattaagccgggtagaaacttgttcggctttgaatttataagcgatagcccaacgcggcgatttggctgtataacctaattcatcttggtgttggaaactattgactttaattaccacaccatcggtttcatacggaagcttatggcggtgttcgtcccaatagttaatatagtcgaaaacttcatttaatgaattggctaacttggcttctttcgggactttgaatccccaatttctggccgcttccaaaccttcaaattgggttttgatattgagattattgcccactataaagtacaacaaacattctaaaggtcgtttagcaacctcgctactgtcttgtaatttcaaacttcccgatgccgtgtttcttgggttcgaatatggtgtctcacctatttcgataagctcttgattcatcttttcaaaaccttcaaacggcaagacaatttcgccccgaatgtcaaatcgctccggaaaattccctttcaattgcaacggaattgacttgatggttttgatgttgttggtcacatcatcaccttgaaaaccatcaccacgagtgaccgcgcgtttgagtttgccgttttcatacgttatggaaatggaagcgccatcgtatttgagttcgcaagtatattgcaacggtacgttacccaatactttttggatgcgattttcccaatcaactacatcttctttggaataggaattgtccaacgaatacatgcgataatcgtgtactaccgtttggaaatttttggtaatggttccgccaacacgttgcgtgggcgaattgtcgtcaaagaattccggatgccggctttctaattcctgaagctgcttgagtttttgatcgaattcaaaatcggatatggtaggattgtccaacacataatagttgtaattgtgttggttgagttcgtcgcgtaagtcttgtattatcttgtgaacatccataaaaaattggctaaactagtggcaaataatgcgcactaaaatagccaatattttggaaaaacagtagggtttacgactgaattatcccattgatttgcaaatacaattgtccgtcactcaagatagcgccttgggtgattaaatcgaatatagcaatattgcgctcttgttcgtattcttttttaccgagatgaatttctactgcatcggtaaataggttgtcgcttagccattgtaatccttctttttgcatgaaatcaacttccggttctatggattttaggactatcgattgaattagtgtttcctggcaatgaaaaaggaaaatgtagtttttagaaaaatgttctaaatactgtgcgttggcgagtacgccttcccaaatcaaatcggaaaacacgtctaattcttgttcggctacttcgggatttttggttttaatcgaatcccattcggctttgtctatagattgcgtcgccaaaaagttgctaaattcttggtgtaaggcttcaaattgttctttggtgagtcttttgtacttcatattcaaaggtacttaaggtactgaggttctaaggttctgaggttttttctagccccgataataatgaaaatccttttgtgccggtgttcggcgcaaaagattgtaatgaatagcgggaaaatgcttcacacgagcgaagcgaaatgacgaagtaaaaaaaaatcccgacttacatcgggacttttcatactgtatatcgaaatattatttctcagctacaatttcgtatggcaattcgataaccacttctctgtgtaatcttacagaagcagcgtatttaccggtacgttttaccacacctgaagtgatgaattttctatcgattggttgaccggcagcttctaatgcagcagcaatgtcaatgttagtgatagaaccgaaaagtttttcgccaccagctttagcagaaattttgatttctaatgcttttaaagcttccgctaattttttagcatcatcaacaattttagcttctttgaaagctctttgttttaagttttcagctaaaacttttttagcagacggtgttgctaaagtagcaaaaccttgcggaattaggtaattacgaccgtaaccgttttttacagttaccacatcatctttaaaacctaaattttgaacgtcttgttttaagatcaattccatgttgttgtcctttattagagaagttaggtttcttgacagaaaaccaacaactattgtttaatgattattttaataagtcggccacgtatggcattaaagctaagtgacgagctcttttcacagctacagacacttttctttggtattttaatgaagttcctgttaaacgacgtggtaaaattttaccttgttcattaacgaatttcaataagaaatcaggatctttatagtctacgtatttgattcctgattttttgaaacgacaatactttttagttttgttggtttcaatgtttaaaggcgttaaatatctgatatctccgtctttttttccttttgcagattgttcgattgttgacatactacttacgcttttacttttaatttttctcttcttctttcagcccaagctactgcgtgtttatctaaactaacagttaagaaacgcatcactctttcatcgcgtctgaattcagtttcgaaagcaattaagacttccggagctacttggaattcaaacaaatggtaaaaaccactttttttgttttggatttcgtaagctaatttttttaagccccaatcctctttagataccatctttgctcctcttgtagtaagaaaatcttcaaatttgcttactgtttcctttacctgaacttcagataaaacgggatttaagatgaaaacagtttcgtaatgattcataataaattttgttaaattttaaattgggcgcgaagatataaaatacttttcaataaccaatcgcaaaacattacaaatcgtctaaatgtaaaaaatatcgtttaaaagcaaaaaaaatcgacgaaatgttaggtagataaaaaaaaactatctatttttaccaaaccaaatctataataaataaaaagtatgaaattaaattgtgttgttgttgatgatagttcgatacaaagaatgatcattgcaaagctagtaaataatcacccgaatttacatttagtaggtgatttttctaatgcaatcgaagccaagaattgcatgtcggtacacactgttgacttgatttttctcgatatcgagatgccggtcatcagtggatttgattttttagacggattaaaagtaaaaccccaaattatttttatcacgtccaaggcggaatatgctatgaaagcgtttgattatgacgctacagattacctacaaaagcctatcgcgttagatcgtttcaatgcttctgttcgaagagctatggagttccatatgcttaagaaagaaaaccaggaagaagaaggtgaacacatctttattaagagtaacctcaaaaaattgaaggtttacactaataaaatcaaatggattgaagcctatggtgattatgtaaaagtagttacggaagacgacagtaacttggtgctttctacgatgaaatcgttcgagcaggatttatcgaaagagaaattcattcgcgtacacaagtcttatattattaatatagacaaagtagaacgcttcaatagtaagtttgctgaaatcggaatgactaaaattccattgagtcgcaacaagaaagaagatttaattaaagcgttagctattgcttagatttactcaataaaaatcaacgtttacagtaacctttatggttctgtattgcgctaccacttcaaaactattcagtactttctggatagttttttttgtgccttgcaacgacgcatcactcggaattttaaccattatagtacggatgtattcattgcgaatgcgactcaccgcaggttcctccggacctaataccggaatggaaagattttgtttcaatacttgatacagccacattgaaccttctttcaatttttcaaaatcacggtgttttaaggttaagcgaatcaagcgataaaacggtggataatagtaaatctttctttcgtatagttgttctttatacatgccttcgtaatcattgtgcgtcacttgctgaatgatattgtgcaacggattataggtttgaatcaccactttcccgcgtttttcgctacgcccggaacgtccggctacttgtgtcatcatttgataacttctttcaaaagcccgaaaatcaggatgatatagcatattgtcggcattcatgatacctaccaaagaaacattgtcaaaatctaaacctttggccaacatttgagtaccaaccaaaacatcgatttcccgattcttgaaaccgtctatgattttttcgaaactgtatttgccgcgcgtagtatcttggtccatgcgcttgatgtttttgttgggaaacaaggaagccaattctaactctatttgctcggttccgaaacctttcgtttctaaatcaacactcgaacaagtgtggcaattcgttggcttagccatattgtaaccacaatagtgacaacgcaactggtttttgtatttatgataggtcaaactcacatcgcattgcggacattgcggcacatgaccacaggttaaacattccaacaccggtgaaaagccacgacgattttgaaatagaattacttgttcgttattagaaaaagcttcggtgatttgttctatcagtgtcaaactaaaatggcttttcattcttttgcggaaataactgtccttcaaatccaccaattctatttcaggcatttgtactttgccgaatcgttcttttaaaacaactaaaccgaatttacccgaaatcgcattataatacatctcaatacttggcgttgctgaacccaacaagactttcgattgatgtgcattggccaaaacaatagcggcatcacgagcgtgataacgcggcgccggatcttgttgcttgaaagtcggctcatgttcttcatcaactataattaagccgagattggcaaaaggcaaaaacaaagccgagcgagctccgataacaatttgcgctttctcagattgctgcaaaacattttgccatacttctaccctttcgttattgctgtatttagaatgaaaaacagcgactttattcccgaaatgtttggtcaaacgcgaaaccaattgtgtagttaaagcaatttccggcaataaatacaacacttgtttgccttgagctatgtagtactcgatgagtttggtgtaaatttcagttttaccgctggaagtcacgccgtgcaacaaacaaatgtctttaccggtaaaagtatttacaatttcatcgtgtgctttttgttgggcttcgcttaaggcgagttggttttccttctggttttgggcaaaattgacgcggtcttcctgtatgtaataggtttcaaaaacacctttatctactaaggctttgataacagcgacagatgtattggcggtttcggtgagttgtttcaccgatataggtttgcgttcttgggcctgtagctgaaaatattgcaataccaattctttttgtttgccggcgtttttgttgaaagtatccaacaaggcaatcaaattttcttctgattggtagtgcgaatgcaacctgatgtaacgcgtgagtttaggcttgtaaacttcctgaatttctgcttctaatgtgatgatatttttatgaataagcttttgaatgacgggcaaaaccgacttcttattcagtatatccataatgttttgtactttcaacgagctttggtgttgcaaggcttcgtagattaaaaactcgtcgtcggaaagttcgctttcgttgattaccgtatctttttgttgggaaatgatggtttcactttccagcaacaaagccgatggcaaagcaccgcgatacacatcgccgatattacacatgtaataagacgctatccaaaaccaatggttgatttggaattcgttaactatcggttgttcgtcgagtatttgatgtatttctttcgcttcataaagtgtaggagcgttttgatgtaagtcgaccgccaaagccgtatagattttgtttttaccaaacggcacggctatgcgcatacctttttgaatgtattggaattcggcttccgaaaccctgtacgtaaaggttttgggcaaagaaagcggaataataacttcaacaaaaaaagacatatacaacgtttaaaaaaaggcgaatagtttgaattttaaccctgacagcagcggcacgaagtagagcgtatggcaggaattacgtttaaaaaaaagcctatggattggtttctaattctttttctttttggcgtttaattttattaatcgaggcatttaaatcgaagcctaacagcaatatcatacagttgatccaaatgtaaaacataatcaccaacagcgttccgatggaaccgtataattcgttgtatttagaaaatttaattacccaaatcccgaaagtataagacgatagtattattaaaatggtggtgaaaacagaaccgatagagatgaatgaacgccgcgaatcgcgtttgatgccgaatttaaacaacaacgaagtggcgaacagaatcattaaaatcacaaaagcataacgccccatttcgatgagcggaatgttgtcggaaagtacatcttgaattttggttttttggataattacctcaaagattacaatggcggctacggttacaattaacaaaaatgccaatagtatggaaagcgccaaagagaccaaatactggcgcaggaacttgcgtttgtgtgaaaaatcgatgtggtgtgaattttcaaaaccgcctaaaatagcgttcacaccattggtcattaaaataatcgccataaaaaatccggtagaaattaaacccgagttactgttgtgtaaaatatcgttgatgattttaaaaacggcgtcgtaagtggttggcggcacactttgttgcacaaacccgagaaaatcatcttggaaaccttcaatgggaatgtacggaattaagttaaggataaaaagcgcaaacggaaacaacgacataaaaaaactccacgcaatggctgccgcacgataggaaatggagccttcaacgattccgatgatgtaatgttcgattaaatcatagagtgacaacccgtgtaaccaaggcaacggaattttttgcaatagcaacacaaaagtgctgacaatgggtatttttttgagtttgtcctctatctcgatgctcatcttaaaaggctttcagacttaaatccatgttgtacaccgaatgcgttaaagcacccgatgagatataatctacaccgcattcggcatattggcgaatggttttttcgttgatattccctgaagattccgtttgacagcgatcaccaataagcactactgctttttcggtatcttcaaaattgaagttgtcaattaagatgcgatgcacaccgtcattttggagaatttcttcaatctcggctaagtttctggcttcaactatgatttttaaatcgaggttattgtgcttcaaaaacgctttggttttgttgatggcatgggtaataccaccggcaaaatcgttgtggttgtctttcagcattaccatatcgtatagcgcaaagcgatggttttcgccgccgccgattttgactgcccatttttcggaagctcggaaacccggtgtggttttacgcgtatctaaaatcttggttttggtaccttccaaaagttgaacataactattggttttagtggctatagccgacatgcgttgcatagaattgagcaccaaacgttcggcttttaaaatcgattgcgaactgcctgaaacgtgaaatacaacatccccgtgtttgaccggcgttccgtcttggataaaaacttcaacttgcaatgttggatcaacattttcaaaaatcatttgggcaaaggcaactccggcgatgattccggtgtctttgaccaacaatttggcacggccttccgccatatccgggatacaagccaacgagctgtaatcgccgggaccaatgtcttcgcgaatgccgttttgaatgattaaattgagttcgttttgaaattgagcttctgaaatcatgagatttggtattgtttggctaaagtaatttgaaaatttgaaaatttgaagatttgaagatggaaaattgccttttccaaaacattttcaaattggcacattttcaaatcttcaaatctattacctttgtagcacaacaacacaacccatgtacaaactactcattcgcccaatccttttttggtttgatccggaagaagtgcattatttcactttttcgttagttaaatttctttgcaaaattccatttgtgcctcaactgtttaagtcgatttacgaagtcgaagaccaacgtttagagcgagaagtctttggtttaaaattcaaaaatcccgtaggtttggccgcaggttttgataaagatgccaagttgtataacgagttatcgcattttggtttcggatttattgaaatcggcaccttaacgccaaaacctcaagatggcaatccgaaaaaacgattgtttcgcttgaaagaagacagcgctatcattaatcgaatgggattcaataatggcggtgtggaagcagctgtacttcgtttacaacaaaacaaaggcgttttgattggcggcaacatcggtaaaaacaaagtaacaccaaacgaaaatgctactgccgactatttactttgttttgatgctttgtttgcctatgtggattattttgtggtcaatgtaagttcgccgaacactccgaatttaagagcgttgcaggaaaaagaaccattgaccgaattgctcaacactttgcaatcgcacaatttgttacaccaaaatccaaaaccgattttactgaaaatcgcacccgatttgaccaatgagcaattgttagacattattgacattgtaaacgattctaaaattgcgggcatcatcgctaccaatactaccatttcccgcgacggtttagaatccgaaaataaaatcgaaaccggcggattatccggtaaacccttaaccgaacgttcgacagaagtaattcgttttctatccgaaaaaagcaataaggcctttcctattattggtgttggtggtattcattctgctcaagacgccatagataaactggaagccggcgcgagtttggtgcaattgtacaccggatttatttacgaaggtccggctttgattaaggaaatcaatcagaaactattggaaaaaagcaaatcgtaattttttggattgacttgattttataatgtaatcttagcggtttttcttttgaaacgaaagcggttttagtatctttggaaacgaatatgaagcctatcaaaattatagaatgtccacgcgatgccatgcaaggcattaagacttttattccaaccgaacagaaagtcaactacattcaggcgttactacgcgtgggttttgatactatagatttcgggagttttgtatcgcctaaggccattccgcaaatgcaagatacgcctgaagttttggctcaattagatttatcccaaaccaccagcaaattattggccattattgccaatacgcaaggtgcacaaatggctgctgtacacaaagaaatacagtatttagggtttccgttttctatttcggagaacttccaaatgcgcaacacacacaaaaccatagcggaaagtttacttaccttacaagaaattctagacattgccaataccgctgataaagaagtcgtagcttatctttctatgggatttgggaatccttacggtgatccttggaatgttgaaattgtaggcgaatggaccgaaactctggcgaaaatgggcgtcaaaatcttatcgttatccgataccattggtagctcaaccccggaagtaattgattatttgttttcaaatttaattccgaaatacccagaaattgaatttggcgcacacttgcatactacgcccgaaaaatggcatgaaaaaattgatacggcttacaaagccggttgtcgtcgatttgacggtgctattcaaggatttggtggttgcccaatggctaaagacgacttgaccgggaatatgcctactgaaaaactactctcgttttttacgactcaaaaagaaaacaccaacaccagtcccatgagttttgaaagtgcttacaatgaggctacaaaactatttgggaaatttcattgattcataatggctatgtcaatgttttttgtatttttataatcccgaatcctaaaaataatcactttgcctcgaatcataagactttcgattgcggtatttatatgcttgttggcctacccaaaccaagtacttgctgccttttcacctaaagactctattgattattacctacaagaatccaaaaaatattcttataccgattttcaaaaagccaaactttatttgtacaaagccgataaaatagctcgatcggcccaagacaaaaacagtattgctaatgtaatgctgcagttgggcgctaactattacattaacggttcctatgatatcgctttaaaaaactatatcaaagcagctgttatttgtgaagcagagaacaacaaactcggacttgcaaaagctttaatgggacaaggcttaatacagcaagtgtatggcagagacaaagaagctttgaaaaattttaaaaaatcaatcgccatttgcagagtcctaaacgatgagcagtataccgtcaaaaacctattaaacattggtatttcacaaagcaatttaagtcaatttgatgaagcctaccgcagtttcttggaatcactcaaattaggggaacaataccaactgacgaatgattctcaaatggctcgaaacaaattggccaacatccatttcatcaaaaacaagttagattctgctacatattactatcaaaaagtaataaacgattcccaaaagccgaatttatgggaagaagcatttgctttatccggactatcggaaacatatctcaaagcgggaaattacacccaagcggaagattatggcttgcgaggttttaaagctgctaaaatggtaggcgctaaatgggatattgctcgatcttctgaaattttatcaaaagtttactttcggaaaaacaatttcaaatcggcacatcactatttaatgatcaacaaaaaatacaacgatttattatttgccgagtccaaaatcagggaagtcaacattttgcaattagaagccaaaaaagctgaaaatgaaaaattagaagccaaagcagaaacagcacagcaaaaacttaacaatatccgaatttttgtaggatgtatcatcttgttgtttttatcgctttccatcttcacctattactactacaagtacaacaaacaaagagggaagttctacaaagaaatcgacatcaaaaatcgggaaattgaaagccaacaatcgttgattacttctcaaaatattgtgctggaagaattgaatcaaaccaagaataggatcttttcaatcttatcacacgatttgaaaacacctattaactcactgatacaagttattgaactcaacaaacaaaatgatttaaccaaagaagaacaactgtttgtttttgagcaactccaaaaacaagtggaaggcactgctctagttttgaacaatttgttgcgatgggccaattcacaaattgatggaaccagtatcatttttgaaaaaatagcacttaaccaaatcgcagaagaatccatcagttcattttatgccgaagtagccaagaaaaaagtgtcgttcaaccatagttacaacaacgatatctttatcaaagccgatattggtcaaacccgcatcattattcaaaacatcattgctaatgcagtaaaatttgctccgctgaacagtcatatcgaaattttttattcctcggatgaacaataccaaaaaattcacatcaaagattttggtaacggactcaatcagagtaaaattgaagaaattttaagtttcaaccgccgcctttcttctgaaaaaggtacttccatggaagaaggaaccggactaggattactgttggtaaaacagtttttaatcaacaataaagggcaattaaacatccaaagtgttgagggcgaaatgaccgaattcatcatttcatttttgaaagactaagccgttaaagtatagagattttttactatatttgctcgcaatttaactacaactacaaattgcaacatgaaagcacacaactccaaaatcgttggggaaggtttaacctacgacgatgtactgcttattccgaattactccgaaattttaccgcgcgaagttagcatacaatcgaaattttcgaagaacattacgttaaatgttcctattgtttccgctgctatggatactgtaaccgagagtgctatggcaattgcgatggcgcaagaaggtggtattggcgtgttacacaaaaacatgactatcgaacaacaagccgctaaagtgcgtaaagtaaaacgtgccgaagccggaatgatactcgatccggtaaccttacctctaactgcaactgttggcgatgctaagatggcgatgaaagaatttggtatcggcggtattcctgtggttgatgaaaacggtattttgaaaggcattgccaccaaccgtgacttgcgctttgaaaaagtcaactcacgttcaatcacagaagtgatgacatcacaaaacttagttaccgctgctgttggtactactttacaagaagcagaaggcattttgcaacaaaataaaatcgaaaaattaccggtcgtagatgccaactacaaattggttggtttaatcactttccgcgacataacgaaactcactcaaaaacctatagccaataaagacaaattcggtcgcttaagagttgccgccgctttaggagttactgccgatgccattgaaagagccactgcacttgttaatgccggagttgatgcggtaattatcgatactgctcacggacataccaaaggcgtcgtgagtgttttaaaagaagtcaaagccaaattccccgaattagatgtagtggttggaaacatagctactcctgaagccgcattatacttagttgaaaacggagccgatgcagttaaagttggtattggaccaggttcaatttgtaccacacgcgtagtagccggtgtcgggtttccgcaattctccgctgttttggaagtcgccgctgctttaagaggtaccggaattccggtaattgccgatggcggtatccgctacaccggtgacattccgaaagccattgctgccggagccgacagtgtgatgttgggttcattactcgccggaaccaaagaatctcctggtgaaaccattatttttgaaggtagaaaatttaagtcttaccgcggaatgggttctgttgaagccatgcaagaaggttcgaaagaccgttatttccaagatgtggaagacgatattaaaaaattagtgccggaaggtattgtaggacgcgttccatacaagggcgaattaaacgagagcatgcaacaatttattggcggactacgagccggtatgggttattgtggtgctaaagacattccgactttacaagaaaacggtcgctttgttcgaatcactgccagtggtattggggaaagtcatccacacaatgttaccattactaaagaagcgccgaattattcgaggtaattcaatggaattaagattcaatatcaatcaagccattgaaaccgaactttattacggtttatatactatttatattcttggcggtcatcatgttaaaactaatcctgattttttcatgcaaattgaaaatatcactacaggtgaagacattgagttaactgaaaaatggcccaaagctcgagattttaaaaacgggaagaaagcagtaaaattctatgaattccaaataaatgaatatggcaaattcaaaattacagtccataattatcaagacataataattaaggattcaatattggatgtgtttgatttgtttccattttcaattttaaaccgattaaattcagtcattttgggtcgaagccagaaatcaaaaagcattaatgagattgaaattctgattagttaatacaaaaaaggcataagttgaatcttatgccttttgttttatataaaattttaagaattatatccctaaataattgcttggtgtgatagccaataattccgctttaatctcctcagacacattcaatgttccgatgaatgcatgaatggattcctttgtcatggcttcgttagttcgggttaaacccttcaaagcttcataaggattcggatagccttcgcgacgcaaaatggtctgaatggcttcggctactacggcccagtttttctctaaatcttcggcaaacttagattcatttaataataatttattcaagccttttaaagtggcttcgaaagcaataatggtatgaccgaaaggaacgcctatgtttcttaaaacggtactgtcggttaaatcgcgttgcaatctggatataggtaatttggccgataagtgttcgaatatggcattggcaatgcccaaattcccttctgaattttcaaaatcgattggatttactttatgcggcatcgcagacgaaccaatttctccggctttgattttttgcttgaaataatccatcgacacatacgtccaaatgtcacgatctaagtcgatgatgatagtgttaatgcgctttaaggcatcaaaaaaagcagcaaaatgatcgtaatgttcaatttgggttgtagggaaagaatgttgtaaacctaaaacttcttccacgaaagaagtcccgaattgcttccaatcgacgttaggataagccacatggtgtgcattgaaatttcctgtagcaccaccaaatttagcggcaaaaggaacattgaataacaagcgtaattgttcttccaatcgctcaacaaaaaccaagatttctttacctaaacgagttggcgaagccggctgaccgtgtgttctggccaacataggcacatccttccactccatactcaattctttcaacttggcaatcaaagcaatcaagctcggcatatacactttctcaaaagcttctttagtcgataacggaatggcggtattgttaatgtcctgagacgttaagccaaaatgaataaattctttaaaagcactcaaaccaagcgcttcgaacttatccttgataaaatattccacggcttttacatcgtgattggttgttttctcggtttccttaatgactaaagcatcttcagtagtaaagttttggtagatggctctcagtgcttcaaaactgcttttgtttacgctttttaattgcggtaaatcactttcgcacaaagcaatgaagtattcaatttcaaccaaaacacgatatttaatcaaggcttcttccgagaaaaaagcagctaacggtttggtggctttgcggtatctgccgtctacaggagaaatggcgtttaaagtagttaatgacatgtagttgtatgttgttgtttcaaggtgcaaaaatagttattagttgtaagttatgagtgatgagtgatgagttttttatctaaaaccgagtaatttttctcttaacaacggaacacctacagtagcattcatagccatgacttctaacgggttttgcaaatcataaatagtagccggtttcggatcgatataaaaaacaggaatgttactttgagcataatgcagcaagccggccgcgggatatacttgcaacgaagtaccaaccaccaccaaaacatctgcttgcgtcactatactgacagcttcgtctaaggccggaacggcttctccaaaccaaacaatgtgcggacgccattgtatgcctttcgaatccacatcgccaattgttaaatcattgttccaatccataatttcaatagtatgcggatgatcacttctcaccttcaacaattcaccgtgtaaatgcaaaacctttttactaccggcttgttcgtgcaaattatcgacattttgggtaatgatatgaacatcgaaatcggtttgcatttcggccaaagtaaaatgacctaagttgggtttcacttcatgtaattgccgacgtctctggttgtaaaaatcgagcactaaagccttatttttgagccaaccttcataggaagcgacttccatcacatcatggccttcccataaaccatccgcatcgcgaaaggttttaataccactttcggcagaaatacccgcacctgttaaaaccactaatttctttttttccaaaatcttgttttaaaattgttttgaaggattatttgattttaaagctaagcatttttgctatttttggcaaaacaaattttatgattgacctagattatttggactacctagaaggctttttaaccgacagtcgtaaacaacgctttttagaagtattaaaaaaccgaaccaatcactttaccatcgctatggaagatgtctatcagctgcacaacaccagtgcggtaatgcgaagttgtgaagttttcgggattcaggaactcaatgtagtcgagcaaaaatttggcaaacgaatcgacaccgaaattgcaatgggtgcgcaaaaatgggtcgacattaaccgatacaattcgatgcaaaactgtatcgattccctacgagacaagggttataaaatcatagccacgacgccacacaacgattcttgttatttacacgaattcgatatcactaaaaaaagcgctatttttttcggaacagaaaaacaaggcttatcacctgaaattatagaacaagccgacggttgcttaaaaatcccgatggttggttttacggagagtttgaacatttcagtttcagcggccatcatcattcaagacataaccaatcgccttcgccaatcagatttgaaatgggagttaagtccggaagaattgctggaaaaacgtttgctttgggctaaaaattcgattaaagacatcaagcgtattgaagaacgctattacgcagaacgctagttattccttgatgtacttttcgtgttttttcgacaatactttgtattcttcgtaacaagaactaatagcatccataatttgtaaatcgttggccgtttgtataaaagattccgaataattacaacgctgcaatatctcggctatgtcttttttatctacacccaaaagcaccgcaatggtctcgcggtcgaacttcgattccagtaaattgcgaacggtatcgtctttcttcatcgctttaagctttttgagctctttgggtttgttgccaaagaaattgtataacatatctgccggattaaagatagaacccaaaacacgactaaaagcattgggagaactttccccggcttcatacgcttgcggcaatccggaaatgctgtaacggtaattttctttttcaggaatgagtttagaatcgatttccaaataacccgtcaaatcatatttgcgcactatcacttcttccaaagcaatggctttttcggtcattaaaattttagccgtaccgtttttaatccagtcgttagtcacacgaacgcgcaacgagcgatagcctaaaatagagatgtgcaatgtgtcactaacgctgacttccatctcgaaataaccgctggtattagtggttacccctttgactttgttaatattaatgatgttagcattcggaatcggtaacaaactattatcgttcacaatggtaccggaaactttttgagacaccggattaacctgagccgaagtggtaaaggctagtaaaaaaagaatagaaagtaaaaagtatttcatagctgtttttgatggtttaaaagtatgaaactcttttaagaaaacggacggttacgacacagaattagaagaaaattaacaaatactaccaaacacctctgaaaaaagtattttcatcgcagttttcaataggataaaatcaaaaaactccgttttaccaaagcaaaacggagttgtctatttgaataagaaattcgtataatactagcttcttctcggtctacggtttttagccgcttcaaacgagcgtcctgccggtctgtcggaattgctttcagaacgtcttggtgcgctgccttctctttgaaaagaacccggttctcttcttgatctgtctgaacttctttcgcttctgaagccaccttctcttggagctgaacttctgtcacttctgaaaccgccctcttttcgtggtccgaaacttccgccaccgcttcttcctccgaatccgcctgagcttcttctttctccgccaccacttcttccgttgtggtcacgtctgtcgcgacttccgccttcgtttttcgaaatttcaacgttgatgcgacggccgttaaggtcaaatccgtttagaatcgacattactttatcagtgtgttcgccatcagtattaaagaaagagaaaccttcttttacatctactttaaagacgtcatcacgacccaaatctaacgtttctttcaagaagtctttcaactgcatccaatcgaaatcgtcacgagcaccaatgtttacaaaataacgtaccggatcgccggctctgatttctctaggttcagaagaacctctgtctgatttctcacccgataaatcacgtttctttttgtagtaattgatgaatcgattgaattcaaccgataccattttcttgattaattcttctttggtcaacccatccaaaacttcgttaatagccggtaaatagttgtctatttcgtggtctacttcagtgtctttgattttgttagccaagtgtaacaattggatttcacaaatttcgatgccacttggaatagtcttctcttcaaatttttgttgaatgattttttcaatcgaatgaatcttgcgaatctcacttttagtgatgattacaatagacgttcccaattttccggcacgaccggtacggcctgaacggtgattgtacgtttcaatttcatccggcaattgatagtttactacgtgcgttacgttgtctacgtcaataccacgagcggcaacgtctgtggccactaacatttgaatctgtctgccacggaacgatttcattacaccgtcacgttgtgcttgcgacaaatcgccgtgcaaggcagctgcattgtaaccgtcttcaattaatttttccgctaccgcttgcgtatcgcgcttggtacgacaaaatactacggaaaaaatatccggattcgcatccgccaatcgtttcaaagcttcgtaacgatcacgggcgttgactacataaaattcgtgtgacacggttttagaacccgagtttttatgtcctacggtaatttctaccggattggccataaatttcttcgcaatacgcgccacttctgccggcatagtagccgaaaacaaccaagtgtttttctcatctggagtgtctgataatatcgaaacgatatcatcataaaatcccatgttcaacatctcatctgcctcgtcaagaatacagtaattgatgtttttaatgttcacaagcccacgattaatcatgtcttgcattctaccgggtgtggccacaataatttgtgcaccacgctttacttctctggcttgttccgtaatgcttgcaccaccataaactgccactgtatgtaaaccctttacatattttgagtattgtttaatctcgttggtgatttgtaagcatagctcacgcgttggtgataaaattaacgcttgcgtacttctgtcttcagcatcaattttttgaataagcggaaaaccaaaagcggcggttttccctgttcctgtttgcgctaaggcaaccaagtctgtgttttgttccaatagtgccggaatcgctttttcctggacttctgacggattctcaaatcctagatctttgatcgccagcagtaacgattcattcagacctaattgttcaaatttattcatataaagttttaaaatttggtgcaaaggtagtctttaaaaaccatatacgctaatttgttagtgactgaaaattaataagttaacttttgcttaacaaagtaactgagtttctgagtcgctgagcggctgagtcgggctatcattttgcgtagatttttaaggtttaggagcggaaccatttctttctcggcaacactgctcccgccatccgcgctacacggtagcttgctcctgtcggggctaaaggaactaatacttttctctgggaatcagtaacgcaaaaaatccacaaattgctttacctctgaattactgtttttattgaccaatatagaacaaaataccatttttaaatttacaaagagtttgtttctattgctttgatggttatcgtaacccctattttattcattaaagtttaataaactgattttcaaaacacaaataactttcctacaatcagacaaaattatatctaaaaaaaataattaaaatcttttatttttatttggattaaataataataatgttttagatttgccttgtttagaattagtctaatttaatataataaaaatgaaaaaatatttagtacttgttgttttgcttatatctgttaaaacctttgcccaaaaaaaggaggatgaacaagcaattaaagccatgtgtggctgttatgaaatcaaattcaattttgcggaaacatttggctatccaaaagacactttaaattacaaagcctctaaagtgaaacacgaaaccgctttagaatgggcagaattaattgaagatgaacccggaaaaaaatctatacaacacttattgatagttggaaaaggaatgattgttaagcattggcgccaagattggatttttgaaaacacaaaattttatgactacagtggatttaacaattggaagcacaaaacacttgctaaagaaaaagtaaaaggacaatggtcacaaaaaatatatgaggttgatgataagcccagatacgagggcagtgctacttggggtcatgttgacggcagaacattttggaaaaattcaacaaatgctccactaccaagaagagaatacactcaaaggagtgattacaatattaccaaaagaatcaacgagatagaaattgtaaaaaatggttggattcacaatcaagataacgataaaatcattcgtgatgaaaaaggaactgactaccttttggcacaagaaaaaggatataacacttacacaaaagtagccgactcaaaatgtgaagttgctcaaaagtggtggaaagagaatcaagagttttggaaaaaagttcgttcaaaatgggaagctgaattttcaaaaaacaacgatatcaaattattagcagaattggatggcatgccattgtatatgcatttacaaaaattaaaacctaacgccactcaggatgaaataaacaaagtaatagacagttttatcgttaccaaataatgaagctgaagttttacattattgtattgttttacttttcttttcacatttcagcagctcaagtcgcgactgattctgtaaaatctaatcaactccaagaagttgtcattacaggaaccagaacacaacgaagcgtagcaactttacctttacccacacaaataatcacaggagaaagtattcggaagtcaggattaagccgattgaatgaaatcattcaggagcaaacaggtttgattactgttccggattttggcggaggtgaaggaattcaaatgcaaggattagatgcggcttacgtgatgattttaatagatggtcaacctttgtttggcagaagcgcaggcaccttgaatttgggtagaataaccgtaaacaatatcgagagaatagagattataaaaggagcttcttcttgtttgtatggttcagaggctttggctggagtggtaaatataattacaaaaaaacctgaaatcactgaaaagctaaagacaaaagtaagctataagtatgcctcatttaacacgaatgatgtctctacaacagttgaatacggaaagaaaaaaattggcttggaactgtttgcaaattattttaacaccgatggctataatctctctgataatagctttactcaaaccgttgaaccgtattcaaatttcaccatacaacccaagataaaaattaatttttctgaagccgttaatcttttaataaactcaagaatatataaccaaaatcaagactataaatctgaagttaacgttgaaaaatacagtggtgaaagtcaaattaatgaatggaacaattcactgttattaaaccatcagatttccgataaatttaaattggtttacgatttttatgctaccaattataaagcccgtgaatttttaaatgatgctagcaatcaactgtttgatgagagtaaatttaatcaatggttttatcgcccggaaataagaacacattacaaaacaggtaacaatattatatcattcggtactggattaaatgttgaaacattagaccgaactttctttgaaacgaaggctaaactcaattccgaatatattttcggacagttggaatggttcttaaaagagaaatggaatgttttggttggttttcgatatgataatcatcaccaatacgaatcacagtttagtccaaagctgggtattaattacaaatggaatgagtctttttcattaaaaacatctgttggttacggatataaagcaccagacttaaggcaactgtacttagatttcaccaattccgctgtaggttatactgttttaggttacaatgtggcagaggaaagattggccgaactttccagtcaaggtcaactcttgtttagtaataattttactttttctaatccattaaagccggaaagctctgtgaacctaaactttggtggttactacaaaaagaagaatgtgacaatcgattacaatttgttttacaatagcattaaaaacttaatcgacacaaaagcaattgcgcaaaaaacaaacggtcagaacgttttttcatatttcaatgtagatcggatttttacttacggtttagaggtcaacagtacttataaaacaagttcaaatcttacgctttcaattggttaccaatatttaatagctaaagatcaaactgtagtagataaaattaaaagaggagaaatatttgcaagagatccaattacgctaacctctttcagactaaaaccaagagattatttcggactatacaatcgttctaatcatacggcaaacatcaaaataaattatcaaatcccagccataaaaacaactgtaaatatgcgtgttttttacagaagtaagtatggaatttttgatagcaacaacaataatattttagataaatacgacgattttgtaaaagagtattttttaacaaatcttacgcttatcaaagattttaataatgctttttcaatgcaacttggggtaatcaacttgatggattacaaagatgaaaccaatattccaaacttgccgggaagacaattattcaccaaaatagaatatcaattttaaataactaattaataaatccaaaattatgtacaaatcattttttttaaagtcagttttagccctttcagtactcagtttgttgacatcatgttctgatgatgacaataacgctgccaatgtttccttagagacgaaaactttttctaacctctatgctccgcaaaccggtggacaagggcaacctgttggaggcgcatttacaaaatttagtttttcacaaaatgcaactgtaacagatgattcttgggatattgcgtttcgtggaactacaattatcgtgaacggaggttcagctattggaattaccgatgaaccaactagaaccggaaatggagctgtaagtatagtgactaacacactggatgctgtgacaaccatcccggatatttcaacatttgttcaagatggcactaatacctacgcaattcctaccggaagcggaaacggttggtacaactacaattccactaataacttgataacacctgtcgcaggaaaagtttttgtaataaaaacacaagacggaaaatacgcaaaaatggaaatcatcagttactataaagatgcgcctgcaactcctgatgcaacagcattatcaagatattatactttcagatatgtatatcaaccaaatggaacaagtttctaattgaatatcctattcaaaaaattcctgtaaactaaacttcggaaaattagaaattgaaagacttattgtttcggcaataagtcttttctattcaactgaattattataactctactaaatggaaatcaataacaaagacttaatcacaaaatcagcgacttaaaaaatccaccaattgctttaccgccaaaccacggtgactgatagctgacttttccgccatagacaattcggcaaaagtttgggtatatccatcggctataaaaatcggatcataaccaaaaccgttagtgcctttttttgctttagtaatttgtccattaatgatgccggtaaacaactgttgctctccgtcgagatttaagcaaattacggttttaaaatgtgcttttctgttggtattgtctttcaaattcgccaacaacttgtccatattatcattcgaatctttctgctcaccggcatatcgcgccgaaaaaacgcccggttcaccattcaaagcgaccacttccaaaccggtatcatctgcaaaacaagcataaccatattttttggtcacataattggctttcaaaatagcattgccttcaatagtatcggcagtttccggaatgtcttcgaaacaaccaatatctgccaagctcaaaacctgaatagtttccggcaataacaattgaatttcctttattttattggcattattcgaagcgaaaacgagttgcataattttgacttgtttaaattacaaatataacacagctaaaacacataaaacataattccttttatcttaaatttaaaaaatataattattatttttgcctcgtttttaaatacacatttacaatggtaaaagatttattcgaaagaatacaaaacaataaaggtccgctaggaaaatgggcttcccaagcagaaggttactacgtatttccaaaattggaaggcgaattagggccaagaatgaaattccacggcaaagacattttgaactggagtttgaatgattatttaggattagccaatcatcctgaagtacgcaaagctgatgccgatgctgctgcacaatacggagccgcttacccaatgggcgctcgtatgatgagtggtcacacagatgcacacgaacaattagaaagagaattggctgcttttgtacaaaaagaagctgcttacttattgaattttgggtaccaaggcattatgtcggctatcgacgctttggtcactaaaaatgatattatcgtttatgacgttgatgcacacgcttgtattattgatggtgtacgtttgcatatgggtaaacgttttacatatagacacaacgatttggaaagcatggagaaaaacttgcaacgtgcgaccaaaatggctttggaaaccggcggtggtattttattcattaccgaaggcgtattcggaatgcgtggtcaacaaggcaagttgaaagaaattgtggcaatgaaaaagaaatacaatttccgtttgttagtagatgacgctcatggtttcggaacactagggaaaacaggagccggcgccggtgaagaacaaggctgtcaagacggaattgatgtgtacttctctacttttgcaaagtctatggccagtataggcgctttcttagccggagataaagacgttattgattatttgaaatacaatttgcgctctcaaatgtttgccaaagcgttaccaatgattcaaaccgttggtgctttaaaacgtttacaattgttgagagacaatccaagcttgaaagacaaactttgggaaaacgtaaatgcgttgcaaaacggtttaaaagaaagaggtttcaatattggtgacaccaacacttgtgtaacaccggtatacttagaaggttccataccggaagccatggtgatggtaaacgacttaagagaaaactatggtattttcttgtcgattgtagtatatccggtaatcccgaaaggtattatcttgttgcgtatgattccgacagcttcacatactttagcagatatcaacgaaacgctatcggcttttgaggctattagagaaaaattggtgaacggaacttacaagaaaattgctgaagcaacaactgttgatgtttcttaagaatacctaataaacataaaaaaaaccatcctgattcggatggtttttttatttaattaaattagattattgttgaatcttgataatcttgctttcgtcaatgttgtaagcgttgataaccgacttataatcgttgtaatcaatgctgccattctttccaaatgctgccggaattacgactactcgcaacacttgatttaaacgcacaccagatgaaagtccacctaaatcatatccttccatatatacttctgcatcaaaacgagtaaagttataatcgtatctgaaatctaaagtgccatcgttgaagtaataggtttccggtaataacttccaaacatcttctccttgaaaagtatcggataatcggtaaaccaacaccatatcagaactgtaaatagtatgcggataattcaatactaccgtataactatttggtaaaaagttaacattagtatactcaaaaacttcacctatggtgtcgttatctataccgtctacgttatcttcattgactgtacaactttgtagcgctatcatcccgataaaagctaaaacaagggtaatttttttcataacataataatttaaatggttgatgatgtttagcgcagttcaatattgatgccaaacttttattttaagataattttatatttttgccccatgagccgaaagaacgccaaaaatatcaaagcccataacgacaagcttcacaaagcacaagataaggaaaaagctaagaaagccgaacgcgctgctttgctaaaaacgatggtgcgaaaatttaatcaaaatccggatgataaataaaaacctcactaatagtgaggtttttatttactactagaaatcccgatatccatcgggctaagcgatcattaagtccttgcctactgtgagaaccagtgtctgcttacatattgcgtcggtactgaccgccaacttcaaacaaagcggaagtaatttgtcctaacgaacaatacttcgtggcttccattaatttttcaaacaaatttttattgttaatcgcagcttcttgcaacccattgatttgctcttcttctttgccggcgtttgctagcttaaggttatgcaacgtgcctatttggaattgcttttcttcttccgtagcgcgaatgacttcggccggaattaccgttggcgatcctttggaacttaaaaacgtattcacacctataattgggaattcaccggtatgtttcaacgtttcatagtacaaactttcttcctgaattttacttctttggtacatggtttccatagcgcctaaaacaccgccgcgttctgtgatacggtcgaattcctttaatacagcttcttccaccaaatcagtcaattcttcaataatgaacgaaccttgaattggattttcattcttagccaatcctaattctttgttgataatcaactgaatggccatcgctctgcgcactgattcttcggttggcgtagtaatggcttcatcataagcattggtatgcaacgaattacagttgtcgtaaatcgcatacaaagcttgtaaagtggtacgaatgtcattaaagtcaatttcctgagcgtgcaacgaacgaccggacgtttgaatatggtattttaacatctgcgctctttcgttagcaccatatttttgtttcatggctttcgcccaaattttacgcgctacgcgaccaattacggcatattccggatctataccattcgagaagaagaacgataaattcgggccgaaatcgttaatgttcataccgcgacttaggtaatattccacataagtgaaaccgtttgccaacgtaaaagccaactgcgtaatcggattggctcctgcttcagcgatatgataaccagaaatcgaaaccgaatagaaattgcggacattcttttggataaaatattcctgcacgtcacccatcaaacgcagagcaaattcggtagagaaaatacaagtgttttgcgcttggtcttcttttaaaatatcggcttgaaccgtaccgcggacttgcgtcaaagttttgattttaatgtcgtcatacacttctttcggcaacacttggtcaccagttacgcctaacaacatcaatcccaaaccgttgttgccttgtggtaattcgccgttgtatttgggtcttggtaacccttttttcttgtagatttcgttgattttctcttctacttctacttgaaggttattttcgatgatgtatttttcacagttttggtcgatggccgcgttcataaagaagcctaacaacattggcgccggaccgttaatggtcatagacactgaagtcattgggtgactcaaatcgaaaccggaatacaatttcttagcgtcgtccaaacaacaaatagaaacgccggcattccctattttaccgtaaatatccggacgcaaatcaggatcgtttccgtacaaggtaaccgaatcaaaagccgttgacaaacgcttggccggcatacctaacgacacatagtgaaaacgacggttggttctttccggtccgccttctccggcaaacatacgcgttggatcttcgccttctcttttaaacggatacaaaccggaagcgaacgggaattctcccggcacgttttcttgtaagttccattttaaaatatcgccccaagcttggtattttggcaaagctactttagggatttgagaatgtgataagctttcggtatgcgtttgaattttgatttctttgtcgcggactttaaagctgtaaaccggatttttatatttattgactttgtcgttccaagtgtagataatttcccaattgaacggatctaagttcattttgacacggtcaaattctttcaataataagtttagaaactctttgttatcttcattgaaattcaaactattagcttcgattccagacttgtcaatttgcggttgctttttggccacactttcaatggttttgtagataccgtatagcttttgagccacttccacttgcgttaaaaccgtttcgtcgtacttgcgattgttctcggctatctcggataaatatcttgttctgtatggcggaatgacaaatatcttttcactcatttcgcgagtgatttcgaaagtcgattgtaaatcggctcccgttttctctacaatcttatccataatttttttgtagagtgtattcatgcccggatcattaaactgggaagcaatggttccgattaccggcatatcatccggattaacatcccacaaattatgattgcgctggtattgttttttaacatcgcgaatcgcatctaaagcaccgcgtttgtcgaatttgttaatcgccaccaaatcggcgaaatccaacatatcgattttctccaattgggttgcagccccaaactcaggggtcattacatacaaagacacatcagaatgctctaaaatctcggtatcactttgtccaattcccgaagtttctaaaataatgatgtcgtatttcgccgcttttaatacttgaatggcttcgttgacatatttagacaaggccaaattcgactggcgtgttgccaatgaacgcatataaactctcggattgttgatggcattcattcgaattctgtcgcccaacaaagcaccgccggtttttcttttagaaggatcgactgaaatcaatccgatcgttttttccgggaagtcgattaaaaatcttcgcaccaattcatccaccaaagacgattttccggcaccaccggttccggtaattccgagaactggaatatgagtcgtttcatttttcttatggatggcatcgagtgtttctttagcaacttcaggaaaattttctgccgaagaaattacacgggcaatcgccgttggattcttttcttctaaatgattgagttcgccattgagttcattacccaccggaaaatcggcttgtttcaccaagtcgttaatcatgccttgcaatcccatagcgcgtccatcatccggcgaatagattcgggtaatcccgtattcgtgcaattctgaaatctcagacggcaaaattacgcctccgccaccaccaaaaattttgatgtgtccggcacctttctcttgcaacaaatcgtacatgtatttaaagtactcattgtgaccaccttgataggaagtcattgcaatcgcattggcatcttcctgaatggcagtatttaccacttcttctacactacggtcgtgtcctaaatgtattacttctacaccggtggcttggataatacgacgcataatgttgatggccgcatcgtgaccatcgaaaagagaagctgcagtaacaattcttactttatttttaggaatatagggctgttcttgaaccattgttaaataagtgtctgttttgagggtgcaatttacagaattattaaaaaattaccatttaaaatcggaaaaataaaaagaccaaatgcgacaaattccgaaaggttgaattaacatttatttgccacttttcggcatgaagattgcttacttttgaaaaaaagaaaccgcttatgaaaacaaaagtcgcgctactcctactcgttccttttttaggaatttctcaaattaaaatgttagacgatctcaaaaaaaagatacctactaaaaattcacaaagcttaggttcgctcacttccaccgatatttccaaaggattgaaagaagcgctgaataaaggtattgagaagcaagtgagcaaattaaccgcaaccgacggcttttacaaaaacgaattggttaaaattttactgccggaggaattacaaaaagtagataaaacacttcgcaaaatgggcatgagtaatttggccgatgaaggcattttactattgaatcgcgccgctgaagaagccgtaaaagaatcaactccgatatttgtagacgctgttaaaaacatgagctttaccgatgccaaaaatattttaatgggcaatgaaaatgcggctacgacttatttacagtctacaacgactaatccgctgtatgccaaattcagtcctgtgattcaaagttcgttagccaaaattggtgccgataaagtttgggctaacatcatcaaaaagtataacagtattccgttggttaccaagattaatcccgatctgacagattacacgactaacaaagccttacaaggcgtgtttacaatgattgccctggaagagaaagacattagaacacaattgagtgccagaacttctcctttattgaagaaagtatttgcattacaagataaaaaaccttaattttttagaaatcaataacataagaataacaaatccttaacacaaggacttgaaatcgagacttatctttgtagtgtaataaaattggtttttttattatttggttaggttagttaaaaaatgccggtgcttgggaaagcatcggctttttttatgctaatttttcacgtagttttttaaagtaggtaaaggctttgactaaacgactgccataccaagagaacatttcgccatccacaaaaaacgttttggcgtgatgcgtaaatcgacctaattcaaaggcgtgttcatctttaaacggaaacggttcagaggacaacaaaaccaaatcgggatcaccttgtaaacggatttttttaatttcaacctcaggatatctgcctgtaacattaggattgttttcgtagatgttttgaaatttattcagacgcaacatttcgttgacaaaggtatcgccaccggctaccatataaggattcgcccagataaaataggcgactttatacgaaggttggtcttggatgaactgctgaaaatcacgctgtacaaactgaattttatcgttccatttctgcgcttcggttcttttattgaacaactgcccgaaatcggttatcatttggtaattatcttccaaagtgatgatattggtaacccaaacgggacaaattttagctaattcggccaaaatttcttgtgtgttctcttctttgttagcgatgataatatccggttgtaacaaacggattttttcgatatgcacattcttggttcctccaataatctttttggtcgatttgaaatgaaacggatgcacacagaatttggtaatcccaacaatttgttcttctaatcctaaatcgaacaacaactccgttaaagaaggcaccaacgaaacaatacgcttgggcgttctttcgaaagtaagagaagtgccgagttgatcaacgaaggtcttcatgttttattcacagagattcacaaagtctttaaaattccttccatttcctgttgcaatagcaatgcttcttccctggccttttcggcgaaatcgagtccattagaagcgtaaattatagctctggaggagttgattaataaacctacctcttcgttcataccgtatttgcaaacctcagaaagactgccgccttgcgcgcctacacccggaaccaacagaaaactatcgggtactattttacgaatttctgcaaaatactcggctttggtggcgcctactacgtacatcaaattttgactgtttttccaagtcttcgatgttttgatgaccttttggtacaaagcttcgttatctacctcttgcgtttgaaaatcgaaagcaccttcattagaggttaaggctaacaatatggtatgtttgttttcaaaagccaaaaaaggttctacactgtctttgcccatataaggcgctaccgtaacactgtcgaagtttaaatcttccaaaaaagctttggcatacatggttgaggtattgccaatgtcaccgcgtttggcatcggcgatggtgaagatttcaggataatattcgttgatatagttgatggttttttggagcgatgtccaaccttttaatccgtgggcttcatagaaagccatattgggtttgtacgaaacacataagtcgtgtgtagcgtcgatgatggccttgttaaattcgaaaatcggatcttccagcgttaataagtgcgatggtattttttgtaaatcgacgtccaaacctatacagagaaaggactttttgttttgaatttgttggataagttgtgttgtagtcattatggtttgtttgtgcgtaaagttcgcaaagtttttgcaatgttggttgagaaaaatgacccaagtgctcggatagtttagttgccatcttagccccgtctcgtccttaaagacgagatcgcttccaacataaaaaaagcctcaattaatgaggcctggtatcttagaaaacttcgctttcttttaatttttcggtgttggctaccaattgtaactcgtcaatcattttttgaaggttaccgttcataaagccgtcaaggtcgaagatactcaacccgattcggtggtcagtgattctaccttgcgcataattgtaagtgcgaatttttgccgaacggtcgccgctacttacctgagaattacgctttttggcatcttcctcttgttttttggccaattccatttcgtacaaacgagaacgcaatacggttaaggctttgtctttgtttttatgttgcgatttttcatcctgacattgggcaaccaaaccggttggaatgtgcgtcatacgtacggccgatttggtagtatttaccgattgtccgcccggtcctgaagaacagaaaaagtcgatacgtacatcgttcatgtcgatttgcacgtcgaattcttcagcttccggcaacaccataactgtagcagctgatgtgtgcacgcggccttgggtttccgtttgcggtacgcgttgtacgcggtgaacaccggcttcgaattttaaagtaccgtaaacgtcttctccggtaacttcaaaaataacctctttaaaaccgcccgaagtaccttcgttcatgtcgactacagaagttctccaaccgcgaccttcgcaatatttggtgtacatgcggtacaaatcaccggcaaaaatggaagcttcatcaccaccggttccggcacggatttccaccataacgttcttggcgtcttccggatctttcgggataagcatgaacttgatttcttcttccaattgcggcaaacgctctttggcttcatccaactgcattttggccatttccaccatttcggcatccgagccatcggctataatttcgttggcttcttcgatatttccggtcacgttgatcagctcctcacgtttatccataagggctttcaaggttttgtattcctgatttaattgtacgtaacgcttttgatcggcaattacatcgggttgaataatcaaatccgaaatttcgtcgaagcgctgttttacatattgtaatctctctaacattgttgcagttttcttttaaaagtgtgcaaatttaggcaaaataaagcaataaattttattttttttggagctgtctcctgctgtccgctgcaatctttttgccacaacgttgaaccatgagcgttgtaacattaccaatggcaaaaaggatttccactaccatcagggctagtgactcttgcgtttttttttgtactattgcaatactaatgcactattatgaaaaaatcaatccttattatagctattgttgtattcggttcctgccaaaacaaatccgataaacaatttgagaaactcgaaaaaatgaattggctcattggccaatgggaaaatactagtccggaaggttatttaactgaaacctggacaaagacgaatgacagtactttttcgggtcaaacctattttattatcaataaaaaggatactgtacacaacgaaagtatagtgttgacgcaagttgatgacgaattgatttaccgcccaaccgtaaaaggacaaaacaatgatgaagctgtagatttcaaactcacttcagaagtggaaaacagctttgcttttgaaaatccgaaacatgattatcctcaaaaaattgtgtacaaaaaagtcaacgaaaagtcattagtggccaccatttccggaaaacaacaaagcaaaccaagtaccgaaagctatccgatgcaaaagaaataacactataattcttaataaacctcatcaaatctcgcctaaaccgcgggatttttttatgtctaaacgtaagtaaatcaattcggtaaaaattattatttatatttagtctaaataagttttgttatttattttcgtctttatagatttgcagtattattttaatttaatctaaataagaatgaaaactataacaaccctagttactgcttttttagtgtcgatggcagcttttggacaagaaaccaaaaaagataccatcaatgctttaaaagaagttgaaatcaacaccaacaaatacaagtacaaacgagaaaaaagtactacagtctccaaaatgccactcaacaatattgagaatccgcaagtgtacaatacagtcaccagcgaattactgaaagagcaagtagtaaccaactttaacgacgctttaaaaaacgccaccggagtaacgcgtctttgggaatctaccggtcgtggcggagatggtgctgagttttatactatgagaggtttttcaattcaacctaatatggtaaacggattgccgggcattaataacggaagtatagacccaattaatgtagacaatattgaagtcataaaagggccttcgggaaccttatttggcagcagtttaatctcttacggcggtttaatcaacatcgtaaccaaaaaaccacaccaaaactacagtggtgaaattggttataacgccggaacgtatggtatggatcgcatcacagccgatgtgaatgttccgctgaataaagatgtgacggtgcgtattacatcagcctaccaaaacgaaaactcgttccaagacgccggtttttctaaatcgcttttcgtagcgccatcattgagttacaaggtaaacgacaagttatcgtttttgatcaataccgaattcaccaacagaacttcggccaatgcgcctatgattttcttaagccgttactcgccgctatcattcaattcgatcgacttattcgaacagaattataaaaaatcatacacttctaacgagttgactatcagcaatccaaccttcaacctgcaagcacaaatgctttataagttatcagaaaactggacttcacaaaccgttttatccagaagtaacagcaaaaccaatggctattactcctacttgtgggattcggctaatggcgatgagtttacgcgttttatctcaaaacgaaacggacaaaccttagccaccgatatccaacaaaactttatcggtgatttcaaaatcggaactatcagaaatcgtatggtagttgggattgattattacgcccaaaatatcctaaacgctagtaataactgggttggcgccggaacgatttctttggtaaaccaaaccgattcgggtgccgccaacttaacccaagccggaatcgacaacttattggccggtaccgtagaaccgaattcggataccgaatcgcaagtggttagcgcttatgtttcagatgtcatcaatattaccaataaactatcggtgatggcgagtttgcgtgtggatgaattcagaggaaaaacatcggcttatgccgctgaagaagtgaaaagtcagattgcggtttctccgaaattcggagccgtataccaaattattgaaaataaagtttcggttttcggaaattatatgaacggttttaagaatatcgaacccggacaaagagctgacggaccaaccaataccgttgccagtactttcgatccggaacaagccaaccaatacgaattcggattgaaaaccaatttgtacaaagacattatctcggcatctttaagttattatgatatcaatgttaaaaaccgtttaatgacagatccaactaacccgaatgcctctgtacaaggtggagaagttgagagcaaaggagtagaattgagtctaacggtaaatccaattaaaggtttcaacatcatcggtggttacagttacaacgacagcgaagtaaccaaagacaataccaatagcgggtatttaggcttacgtccggaagaagccggtccgaaaaccttagtgaatttatgggcgaattacttctttaccgaagggaaattgaaaggtttcggtttgggtatcggcggaaaccatgccagcgaacacaaaaccttgaacagatccaacatagggacttttgctctgccggattacaccattttgaactcggcgctgtcttacaacaacgataagttcaacattactttaaaagtgaacaatttgttcaacgaaaaatattataccggttggtcaaccgttacgcctcaacgtttgcgaagtttaaccgccggattaacgtataaattttaatcctgattaaaatttggtttttgtttgtttgtttaatggaactcctcatttcggtgaggagtttttaatcttagtcaatgaaaaaagtaggctttaaaaaaatcatcagaaatatccatctttggttgggattggcttccggtagtatcgtttttatcatcgctattacaggctgtttgtatgcctttcaagaagaaattcagaacatcaccgaaacctatcgctttgtggaaaaacaaaacaaagctttccttctaccttctgaattagaaaaaattgcccgtgccgaattaccgcagcaatcgttacacgctattaaatacaatggtcaaagtcagtcggcagaagccatctttttcagtcacgacgaccaaaacaaacaaaacgattattaccacatcatttacctcaatccgtacaccggagaaattttggaagtagccgatatgtattcgggctttttccgatgggttttagatgggcatttttacctttggttgccgcacgaaatcgggcaaacggttattgcttcggtaaccttaatctttctgttaatgctgattaccggattgatactttggtatcctaaaaataaaaaagcagccaaacaacgcttttggtttcgctggaaagatgggataaaatggaagcgcaaaaactacgatttgcacaatattaccggattttatgtaatggctatcgctttaatctttgccattacaggtttagtttggggatttccttggtttgcttacggctattatacttcaattggcggcgaaaaatcattggtctatgaagatccgatatctcaaaaagaaatctcagtttctgccattgagaaaccgctggataaagtgtggttcctgatgcaaaaagactatcccaatgcccaatcgattgaagtacatccgcctgaaaccgattcaagctcgatagccgccaacgctaacttggacaaaggcacttattggaaaaccgactatcgttatttcgaccaatatacggtggaagaaaaagaggtgaaacacatttacggaaagttagcgaacgcttcagcttccgataaactcatccgaatgaattacgacattcataccggagctatattaggcttaccgggaaaagtttttgcctttttgattagcttgttgattgcgagtttacccgtgaccggttttttaatttggtacggcaagcggaataaaagcggtgtctaacgcgaataatttttgaacagatagatccaaatcatccgcgacaatcggatattaaaacaacttagcaatattattaccgtggcaatgatcggaataattctcaaatcgaaggttttgtcaaaaaacggactggcaatggcatacgtaatgattccttgaccaacggttaaagcataattgacaaacatagcgccgaaaaaataaccaggttctttttcgaatttagtgttacaatggctgcagtattcattcatcttcgggaagcccaaactgaaaaagaaactcttgtcggcaaacactttgccttggtggcaattgggacattcgttgcgaaaaatatggtagagactttggagcatgatgcaatttttagcaaagataacaataaaaaaacccgctcagtatggaacgggttgctaataatctaatagtctaagatgtctaacaatctaattttttgaaggaatgttagctaaaatttccaaaaagaatttccagaatttttgagacgattgaatcgacgctctttcatccggactatgcgcaccgtgtatggttggcccgaaagaaatcatatccattcccggataattggttcctaaaataccacattccaatccggcgtgacaagccactacattgggttgggttccgttttgtttttcgtagatagctaccaaaacttttaagatttccgagtttacattgggtgtccaacccggatagctaccaccgaattccacttcacaaccaaacaattcataggcagaacgtaagccgtttgccaaatccattttagaactttctactgaggaacgagtcaaattttgaatagaaatttgtccgtctttcaccactactctagctatgttattggaggtttctaccaaatcagccatgtcggcactcatgcggtagacgccgttatgtgcagcataaatagaacgcaacaaaccttcttgtacgcctaaatccatcactctcgacggtaaatcgctttttacaatttcgatagtcaagttgggctctgtcgttttgaattcggttttgatatcgttgatgatttcttgcatatcaaaaacaaaagcttcatcatacataccggccacaatcactttggctacactttcacgcggaatcgcattgcgcaaactaccaccattgatttcagcgatttgcaatccgaagttttcaaatccgtcaaacagcaaacggttcatgattttgttggcattccccaatcctttgttgatatccatacccgagtgaccgccattcaagcccttcacggtaatagtgtaacccatagaaccttccggagtttcttcttcatgataagctctgctagccgttacgtcgataccaccggcacaaccgatgtcgatttcatcgtcttcttcagtatctaagttgagtaaaatttctccttttaaaatgccgccttttaagttcaaagcgccggtcattccggtttcttcatctatggtaaacaaggcatcaatagcaggatgcggaatgtctttgctttccaaaacagccataatcgcggctacacccaaaccgttgtcagcccctaaagtggttcctttggctcgtacccaatcgccatccacatacatctcgatgccttgcgttaagaagtcgaattcggtatcgttatttttttgatgcaccatatccaagtggccttgcaaaactacagttttacgattttccatccccggagtagccggtttacggataattacatttcggatgtcgtcttcaaaagtttctaatcctaagctgtttccgaaatttttgatgaattctatcacgcgctcttcttttttagacggacgcggtaccgcatttaaatcggcaaacttgttccaaagggctttgggttcaaggtttctaatgtcttggctcattctgttttaaagttgctaagttactaagtggctgagatgctgagtttcgttgctcagtaacttagttactcagctagtccgtttctcagcttcgcaaagttacaaagtttaactacttcagaaattgatttgtgattatatttacattttaaaaaaataccttgaaacgaaaatacctatttcctctttttttgttggttcagattgtatttctgaaactgttggtcttttttcccgaagcagtagaacaaatctacagtaacggattgtatgtttggatttccaaaggctctcgattattattgggaaaaattcctttttctgtaggcgatattctttacagcgcggcttttatttacagcctatattggctgattaaaaatcgtaaagtgcaatggaagattaaaatatggccgattttaagttttgtatcgctggcttactttctgtttcatttgctttgggcgttcaattactaccgagtaccgttgttcgaaaaaatgaaaatcaaaagggaatacaccgaacaagagttggtggcatttaccgaaaaattgattaccaaaacgaatactgtacacttagccatcaccaaagacagtctgaaaaaggtatcgaatccttacccacaagacagcatttttaaactaacgcaaaacggttacgaccaattggccaaagaacatcctttttttgaatatacaatccctagccagaagaaatcattgttgagtgtaccgctaacttatatgggatttggcggttacttgaatccgtttaccaacgaagcgcaagtcaatgacaaactgccgatgtatggttttcccaatgtggcttgtcatgaaatggcgcatcaaattggttttggtagcgaaagcgaatgtaactttatcggattcttagccggagtgaaaaacgaagatttgtactttcagtattcggctttatccaatgctttacgctattgcatgtcgaacatagggatgaaaaacgaaaaggaattcgatcgattaaaggtaaaaatcaatccgggtatcattaaaaactaccaagaaagcgaggacttttggaggcaatacgacacttttatagacaaagctttccatgctttttacgaccaatatttaaagtcaaaccaacaacaagaaggcattgacagttacagcaagtttgtagatttattggtgaattattacaaaggaaaagaaatactgtagcataagattaacctttctgaaaccaacaatcgtctggcattttgattgaattttaaaaactcgcttgtcttagtatggtttttccgaaagggattaatgtgatcgattctatttgatttgtgttcacatttttagctttcaatataagttttccttctttgtaaatagccttattgtcttcaataaattgatagcgattgttacttttaggcgtgtacattaaatctgtaaaatgcgcttgataagactttcctttaatttcaatggcgtcaatggacaaggcgaaacataaagcaccataagtaaagtaatggtcattgttttgatctactttcgtgataacttcggcttcaaaagcaattgatataacatcttgttttttaaaaggcctattgaagaccaagaacccattttcgacggcatattgttcattggtaacaatggctttagcccaagaaggctttcttattttcagaataaaagtcgcttcattcggattagcaattttaaacttcaattgattttcgaaaggataattggtaattgtctcaatggttaccggttgatttttaatttcagtttccatcacattaggcatcaaaagtacatttaccaaggtattttcattttcttgtaaccaggccttttgtataaaatagggagaaattctcccggcattgggattacaacatacggcaacatcttggtgcgccggcgagtatttgtatcgggtttgttttcggtcgggttcaactgctccattctttgtaccgttcatttcaaatgagttgtccgttttgagataagcaatacaagagtgttcaggatttctggagccttgagccgcattataaaaaatattctctatggcatcagctgcagccgaattgccttgtttttgaagtaataccgtgtagctatccaacaattcgtgcaaggagcaatattcatagccggtttgagtggcgtgtgccgttcgctcggctatccattcatcgcctatagcaccaccggttactgtggtaacttttgctatcctgccaagataaatttcaagtgccttctgcagtgcttcattattggaagcataggtcgcaacaattaacggtcgtaaatgttcataggtatgaacaccgtgggattgaagcttataattgtaattcagaatgttagataattgtacatctttttcagattggtaggtttgacaaaaatcgagatataagaaaagtgcataatctgtatatttttgattgcctgttaattggtacatctggtctaatacatcggtaaaagttaggccgtgagatacacctccattgaattctttacccgatgaaaacggactggatttgccgataggataattggtcattacgttgtcgacagctttctctatggcttgccaaagctcttcatctttagaatattcatagtatgccagcaacccacgataaagggtagcttttgcccataattctccgttttccgaactaaattggtagcgtaattctttatcgtaaatgccaatgtaaccatcttcgtcttgggtttttaaaattccgtcgatatagcttttgactttttgaagcgctgctttgtcgtttaacaagatggcatttctaagatagccatcccaccaattggattgcgtttcactgttccaccatttatactgttcggaacctgctgcatcaccttctttgttattacctaagtctttcacttcactatttttatgcaatcgaccggtgctgtaaatgggatcattgattaaatcaggcaccaatttatccaaattacccacaaagccattaaggtctttttgcatttgtgccttcaaccagcctgatggtttaatggcaccaaaaggaagtaaacggtacttttccgaaacttttgagttggtattttcttgtgaactcatggtataattaaaaaatactataacaataaaaattattttcttcatagcttttagtggtttgtcatttgaaaagttagcttacctccgctcataatttcagcataagttatccaaggttttgacaataaagaattgttcaattgcgcttgctcttgataaatgttgttttcattaaaatttagggcttcaacagtaaactttttaccattagttaaatgcaaagtggcgctttttacttgaggtgaaccaagtacaaactcgccattagccgcgttcaccgggtaaaaacctaaagtagacaggatataccaagcggacatttgaccacaatcgtcgttgccaatcatgccgtcgggcgtattgttgtgaaacgcattaataatgttatgaatgtacttttgtccggttttgggagtattggaaaaagcatacaaataagtaatgtgatgactgggttcgttgccatgcgcatactgaccaatcatcgcctcttgccctaaaaacttgttcggattgggactttcgatagtaaaaaaatcatccagtttttttgtaaattgagctgttccgcctaataaagattttattccgtcaatgtcatactgagccggtgtccaaaaatattgccaggcattggcttcggtataatctccgggattattcatgggcgaagtagcggttaaaggatcaaaaggagttctccataaaccacgagaatctttacccctgaacaacttggtttctgtgtcaaaaagatttttgtaatagttggctcttttactaaaaattgctgctgtggttttatcgcttaaaaatgaagccatttgagcaacacaccaatcatcataaccactttccaaggttcttgaaacggcttcattatctatatgatcgaacggatagtacccatattgattgtacaactcccaattggaattgatatgacttttagtagtcgtttctaccatagcttgcagtgcttcagtcttatcaaaaccgataaaaccgttgtgggaagccgacaatatcataggaatggcatgattgccaatcatacaataattatcttggccccaagccgtccaaataggcaaaaaaccggctgctttgtggtgtaaaagcatcgtattgatgatcccgtctattttttcaggagctaaaatttgcaatagtggaaatgcgcctctgtaaatatcccaaattgataaagtagcatagtattcgttattgggagcggttcttattttgtcatctgcgcctcggtattggccatcaacatcggctatattggaaggttgtaatagcaaatggtataaagaggtgtaaaatatttccttttgtttttccgaagcttcaatagctattcgacttaaatagttgtcccaaacttgctcagccttttttcgggtcgattcaaaattccaatggggtatttcggtttttaaattcaattgagcaccggcaacacttactgtagatagggctatttttatcttgagcatttgatttttgggcaaattaaaatttacaataaactttggcgcattttcttttttttctttaagaagctcttttatggaggagaatgcagtttcaaaatttattttaaaaaaatactttttagtcacccatcctttggttttacaatagccggaaatgaccttattactttctattgtaatctcactttccagcaccaaactatcgttaagaaactgaataccgtgttgaaaatccaacaataatttggcttttcgctccggataagtgtattgatgaaaagcaactctttccgaacaagtcaactctactttaatatcgtctttttttataagcgaataatagccaactgttgctttttcggattctttatggtagctatttttaaatttcagttgcttttcattgaatggcaatagtaaaatattgcccatttcgcctataccagttccactgaaacgggtttgagaaaaaccaagcagtaaagtatccttgtattgataaccgctggtgtgattccaaccattggtattgttatccggaccgggctgaatcataccaaaaggcagcgatggtcctggaaaagtatgccccgtaccatcagttcctataaaggggttgacatatttcgaatgagactgcgccacaactacattggccacaaaagcagccataaaaagtaatccgacttttcttaattccataacgaatccatttgttctaaggttttatttttagtttcaggaacttttttccacacaaaaaatagcgaaaacaagcaaattagagagaataaataaaaaggaaatgctccgttaaaatgcgctttcaaccactggttttcgaccaaactaggaaaaaactgggtcacaacaaaattggctatccactgaataaaaacgctgatagccagagccaaactccgaattttgttggggaaaatttcagataataatacccaaacaatcggtccccatgaaatactgaaagaagccataaacaaaataagaaaaggcaataggtaattcccaatggtattgttgtaaataaaaaaccctactacagccaatgaaacagtcattccgaccgaaccaatatacaacaagggcttacgacccattttgtcaaccagtttaatagctactaaagtaaaaatcaggtttacaacccccaagatgctggtttctaatagtgacgcatcagttgaactgcccaagcttttaaatatttccggagcataatacaaaatggcattaatgccggttaactgttgtaaaattgaaagtcccacgccaaccaataaggcttttttaaagtttggattcactaaatttttccattggcttcggtcttctttactaatagattttttaatttcttccaacaccatttgagcttcttcctctgaatttattttttttaaaacggctatagactgctcatttttattactcaggaaaagccatcgcggactctccggtattaagaaaatgaatagcaagaataaaacagacggaatgatctcggaaccaaacatccatcgccaacctgtggttaaattccattgtgcatcaccttgtaaagcaataaaatagttcacgaaataaaccataacaatacctattacaatagctaattgataattgccaaccaaagcaccacgtcttttgggcggcgcaatttcggctatgtacataggcactaccatggatgccaaacctaccccaacaccgccaacaattctgaaaacaacaaacatggaaaatgaatcgggaatagctgtaccgatagaattcaaaacaaataaaacggctgcgaccatcattgttttttttctgcccaattttgtacttaagtagtcggatacaaatgccccaatcaagcaacctaccaaagcactggaaatggcccaaccaatttctataggtgttaactgaaaatagcgggttaaattcccgatagcgcctgaaatcacagcggtatcatacccaaataataagccgcccattgcggcacttaaagctataaaaaggatgtaattgtttttgttttggcccatagactataggttttgttgtaagaattttttaatttcaagattaatctgccactgatttgataatggcttcaaggtaaagggtgcttgaggcatgtaaggaaatggcccgaattcgggcgtgatgcttatggcatcagtattaagtttttcctgtttttcaatgatttgcttccaccaaaataaaaacaggttcaaatgcttttcccattcgggagcaaaaggatgattcacttgcggactttgttcaaagccaactctggcatgaatgtgcttgatattagggtatactttggacaataaatcttgttgatcttgtaaatcactttcagatactacacaaaaatgagagaaatctgcaatgagcttaatttttggaaatacatctatatagtttaagagtgtctttaaatgaaaggaaaaccgaccccgatgaatctcatgccaaatcggaatgccggattttttagaaatttgctcggtgatttcaatgattctgcaattgtcactaaaatcgaaaaaatcttttccggtatgtgagttgatataatccggttgaagtgctgttaagaaattcaatctttgggttatcctttctatatactcgtttacggattcattttggtttgaaagcacttgttgcgctatgaatatgaaatccttattttcagtacttcttatgatttgcaattccagaagcaattcggcaacaaaagaatcatcctccggaacattaatttcaacgccatcgtaaccgctttccatcactttagagagaaacgctttggccgacagctgctcacaaccccaataggtacaaatgtatttgatctgcatgcttaccttgaaaacaatattggattaataggtgaattaatgacttctccaattgttgcgccgggacaccaggtattccaatcatgtacttggtttttattttccggattttttaaaatcatgtccttgtccatgtaaattattgtcatcactttcctcatgtcgttagttacattggctccggctctatgaaaaacccaaccagaatgaaaactaatctctccaagatcgaaggcttctatcacgtgtttaaagtcggtaactcttaatctttcctgaatcagcgcttcacttgtatctccgatttccaattctctgccttcaacaataatatgactcccggcactaaactctaatggtcccatctcgagaggtgttgcttgcaatggtatccaagccgttatggttttatcggtttctaatggccaataatactggtcggcatgccagggtgtaattcctccgccaccttctttaaacagagcttgatcgtgatacagtcgaacaccgtcgacttccatcaaatctgaagcaattttagcaatacgtttgctaaaaattagttctttaattaaactgttttccagccataaattgaacaattgtaaaaaagctttcccataggttgtcctgtcttccaaagccttttgttccttattcatcaactcaacttgttgtgaaattacttcattaaagtaagccactacttcgggaggtaatacttctttcaatttaataaatcgattcgcttgataaaactcgatttgctctcgggtcaattcatacggtttgtacagaaaatcagctattggtttgggtatcgtttgcatagtattaaatatagttttggtaaacatttagtcataaggaccaagacaactaccattagaataacaaaactaattattgactgttgatagaattaacagtaatttgttcaattataatactatattgaataattttgaaaagaaactaccctacaaaagtttatataaaatatgaaagctgttttagaagacatccaagccgccaaaggaaattcgagtttttatgcttatcgcttgcgtgtacctttttttgaatttaaatggcattaccatccggaatatgaattgacttatataattaaaggaagcggatacagaattgttggcaattcttatgatgattttgcaagcggtgatttagtattattaggtagtaatttaccccatacttggtccggaaaaaccaacaatgaagcatattccgaagccatagtcatacaattttctgaggcatttatagcaccattcttaggactaaacgaaagtgttttaataaagaaaatgttgaacaataccgcccgtgggataagttttgaaatcacagaagaattggagtctaaaatgatagcattaaccgaagttaaaggtttagagaggattttgaggttaattgctattttagatttactatctaaacaagacaacacctttataagcacaaatacttttcacaacgtagtttcgaaaaaaaacggcctccgcattaataaagtttgtttgttcattcaaaacaacttcaataacaaaatcgctctgaaacaagtggccgatttacttcatttgacagaaagcaacttttgcaagttttttaaaaaagccaccggaaaaacgtattctgattatttgaacgaaatgagaattaacgaagcttgccgattattagtgcaaactgaaaaatctgttaaccaaatagcttttgactgtggcttcgaaacactaagctactttaacagagtatttttaaataaaaaagggattacaccttcaggctacagaaaacagaatcttgtttgattttttaagggtaaaacatacttaacgagaataaaattttgcacaaaaagttatctgaccttaattaaataaaccgtattctcttagccactatttttttgcttttaagatatgtctaaaaaggtgttttttttttaaacctataataggacaaagtgaaaaagtaaactattaggattaaagcgcttaattactcatagtaagtacattacaatttagccactataaattctttactttgatttgttgtatagtccggttattgtcaattattttatttaattaaataattatttcttatttgtgggtttgtatttgaaaaaaaataccataactttaaaaaaaaaatatgcatggagtagtaaatcaagccattgaaggtttaataattgaacgatttggaaaagatagatgggaagaaattttgattgccgcaaattgtcaaaacagcactttttacaacaatcaaaattatcctgacagtaccacatacgatttagctattaatgcttctaaaatattaaatattgaacttaacgatattttattcgagtttggtaaatattgggtgcttaccattgccaaacagaaatacgaagttttgttgcgttcgacaggtgatgatttatttgaatttttaattcaactgcccaattttcatagccgggtaatgttgtattatcctaatatagtacctcccgaatttaaagtcaaacaattaaacaacaacaccttacacctacactactactctaaaagacctggcttatttccttttgtatctggtattttagaaggcttgaaaatattttttgatacccattgtactgtggaaataattgaatcgggtgaagagaagggatatcataaaaatgtttttgaactcgttttttaactccctattatgtaaaatttatgctgacattaaaaaagctttttccattttttttacggcttgataaatctttatatatcattgagcgagggccaagtatgggaaaattgctaaaagatacagggaaatttgaagattatttcagatttatccgacctaactttggtattgactatacatttaattctattcttgatttcagtaatcaagtttttataattgaattaaaaaacaaatctacccctatacgctttaaagggcaatttatcatgcatcatgagtttgaagatgaactgtggttttgcggttctccatggttaattgctatggaaaatctgcatgaaaacaatttatttgtaacggattttgccctgcacgacaccgcaatcgataccattttaatgatgaatcaaaatttactatcaatggaagatagtaacaaaatgattgaagacttacgattaaaaaacgaaaaacttgaaaaaattaatgagcgcttagattctattatttatgccataactcatgattttagagctcctttattagcgagtattggcttgttacagttaaccgatgaattggtttccgaacaccttcccgatgtattgtataccttaaaaaaattagaccaaactatcataaatcttaatgaacttgctaaaaatgataaagttgatccaatcctatctactgtcaacatccaagaattagttaatgaaatttacaaaaattatcaaattatctttaaaaccgaaattccattaatacttactattattgaagatgctcctttactttctgataatttcaggattagaattattttaagcaatttaatttctaatgcaattaaatattctaatcccgaaaaagatgctgtaatttcaataacaattcacgtaaaagccgaagaatttacctttgaaattagtgataatggagaaggtattgatccgaaaaacctgaaaaacattttcaaactgttttacagaggctctgtaaaatcagaaggaagtggaatcggactctatgttacacaagaaatgattcaactcttaaaaggaaccatattggttgaatcagaaaaaaatattggcacaacttttaccctatctttgcccaactataaacctgtttaaattgaaaaatatcaattttatactaatagatgatgactatattttcttaagattaggtaaaatgtaccttgacaaaggagattgcacttcaactgtaacactttacaatgatgcaaaaattgcccttgaagctattggtagccagcttgaaaaattacaagacaatactgtaatttttttggacttaaatatgcccgttgtaaatggttttgaatttttagatgaaatccaaaaaaatcctaatgccttttcggataaattaagcatttacattatgagttcctcagtaaattttaatgatatagaacgggttaaaaactacaatattgtaaagaagttcctcaataaaccaattaacaaagaaatagtagattccatttgtaactagtcgtcaaactggtaaaaaattgtttttattaaagttaaccttaaggattttgctacgcaacttccttcaaagcgcctcccgaagcttcgggattgaaaaacaaaaaaccaaaataaaaaactcaagtaaacttggattttttattttggttttttgtttaattcgtgaactctatagacttgttttcgaaacaaattattgagtttattgaaaaattcacctctaggtaaatgaaggtttattttataaatactaatgatatacattctattttcatcaacttaatgtaattatggattatttatttaagctatctaccacataactatgctggtagttaatcaatgtctctttttctttaaagacgaccttacagtttgggtatgtgatactttgcaacaagagttgatggtgggtttgcaataggttaaacaccaaattatcaattgaaaagtcattagtttgaaattcatatgaacctatgaaacccatcactttttgttcaatataaataccgggagtatcatttaacgttaagtggttaacttctgttttatacagagggaataaatattgtgttgggtctaactcttgcaggtgtattttttgattttttttaccgtctatccaaacctcaacttgatgattggtagaccccaacaaaccaccaaacttttcacatggcaatttatccaaacttggaatggtattcaaccttaaataatggtaaaaaaaagggtctaataacgcttgatgcaggggctgatgcaaacgattagcaatttgtgtaaaatactcctgttctatagggtttaacttgagtttacttaagctccaccactccccaaagaggttgattttgagtttatgggaagtggtgggcatttgatttttcttaataatttttacaacactaaagtcccagcagctattacgtcacttatttgattattaaagcctgtgaaagccctattacttggagagttaaaaacattacgaccatcagttctaattataattcttgttattaaatgaggtggcagaaccgctacaattctggtaaataagcgcgtattagaccttatgcttgtaaacacaatttgttcagggttaagagaaattatatcttgacaaatatcaggtatattatgatgaggagtagttagactccaaggaacaccattaacataagtgtctataacagcatattttctattgtttaagaatatatttaatttatctatttcattagccgccattattccagtagctatacataaattatttaataaattatgattagccccgccaattaggtgaggatttcctgggagggttctgtaaaaataattttcatattttgggcagttttctgtaataaataaaatttttacaggacttactaaatgatcttctacaaaggtttcaactgttaccatgattttatatttaattagttaatatttgaaattccatttttttaataaatccttattcttataaaacctttacatcatcacgatacctacctagcagattatctaattccacagtttcataaaccttaatgtgaacgatacagtaaatttgttcattaccgtctactatttcagtctgaatgccatttggaatggtttgagtatggtgaatttttttcttcatcacttggctacaagcccattttgtaaactttaatttgatatgtttaggttcaactttcacgtttctattattggggttataaacacctatacagtaattaaaatagtctttcaaacctgatgattgtgctagctgtttataattatattttaatgacttgtaaaggccatcggcttgttgaattgtggcttcttgcacttttaagttttgtatcatatcaatacgaaagattgatatataatcatcaaacttattatttacgtatttgcaagccgctaaaaaatacatatcattacttagtctaatttgtaaaggagcaactgtataggttgagatttcattagtatttactttgcaataattaaatgttatagcagtttcagatttcatcaaccttatgatttttaaacataattctaattcaacatcattatctctctccgtaaaacttttagaaaaataggtttcattatgccaagcctcttcatcaatattatacttttcatttagctcttttttcaaccaatcaatagattgtaagtgttgttgttgatttaataaactaaaaagtattggtaattcatcagcacactcttcaggaatcaacatacgcttacttttctttggcaactcaattaattcataacctctaatatctgaattgtattcaataacaactccctcttttttcaaatactctttgtcatatgaaaactgtctattaacaactttaacttttttatttccaatctttttttcatatatatatttcgttccaagcactcgattgtaattatctaatatattaattaaagatgctcctttattactaattagataattaataagacaatttaaacgtcgtttttgttctttagaattgccaaaattgtattccataaaatctcaattataaaacaaaggtatgcaattactatgcaaacatactttgcatagtaatgatttatttttgaaaaaaaataatcaacatgctcaaaactaaacagaaaacattaatccaccaaaccgaactagattacatctcgcgctgcattcaagactatcctaaccttgaaattggaggcgacttatttggtttttacactactaccggattgccggttgtacaactagcaacgggtccaggacctaaagccaaacaaaccattcatgctttttatcaagacgaagcatacctgattgaagttgggaattgtctgcgtgaacgttttggtatgcaacatattggagaatggcattcccatcatcaattgggattggattgccctagtgaaaaggatgattttgttgtcaataaggcaatggacaagtataatctgccgtcatttttattggtaattggcacctatgtaaaggaaagtacaagagtgaatgcctttaggtattttccaagtaatagtcttaatgcccacccggaattttcgaaatggattgtacttgaagaacctagtccatttagaaaattaatagaaacccaacaatggttttcattgtatcaacccaaaacaaatgagggcaaaattcatgatttacaaaccactactttggaggcaaccgaagagttaacctatccaattgagtattggctttgtgaagatgataataaagtgttactaaacgatgtaatcaatcaattgaccagtgagtatccaaaagttcaattgcttagaactgattatggagaagtttatctggaaatcgtattggaagaagaaaacatcttccaaataaattttccggcagattttccaagatcggaacctagtgttagtttttatttaggtgaaggggattatgttgtttataaccctgaaaagaattgggatattgaccaaccatttttaccccaaattttggcttacatcaatgctggcattaaagaattaaaagaaaactaaaattcttatgacaactattcgcaagcaatttgagatcgccattttaaaccaatacttcccgcatcgatttgctttttttgaaaaggaaagtatgaaatggctcgaggttggtttgaaatccaatcaaggcgtggtatataggatagtgatagaaatatcgcaaaactatccgtatcaaatgcctatggctacaatcacttttccaaaattactaaaagggttcaaagggaaaaaaataagtagttattcccatgaattgcacaccttggaatgtaccaaagaatacataggactttgtttatttcatcccaaccaatggtcgcccaatcaatctttgtacaaagtaattgtaaaggcaaaactttggattgaagcctatgaaaactatctgaaaaccggtaaaaatattaatacctatttaaaatgttaatcgcaatactaataacaataatctatcacatcatgaaatcaaacgcaaaccatacctcaaaccaagaggtaatgaaaacattggatgctttaaacaacaactcaaaagtacagaatttggtttttgacccaaaaaccggagaatttgtagtgcaacgcgaaaacgaaatcaatccagatgccaccaccataaattctatagcgcgcgatggatttgcaggctaataattcctctatcctattcatgccaaaaaagtggttgggtgaagaatctgatgttgtacacggatatttgaatggctatactgaagaaggaatttatcatttcaattcgggaatgaaaatcttcaactatgccgatgagttagttgaatgcaaaatagttttatcaaaaactacagcggaaaatgaatttgaaattacccgatggaaaggcatatatgacgaatactttggggcgaataaccccaaaaaatgtcaaacctatatcatttgtattgctcttgacaatatcaaagaaggtgcaacaatcttgatggataaaaaatccatcaaatgcgaaattcatttctttcccgaatcggaaaatttattctctcgtcacaaagggttgttgacttaccaatcgttacaaaacaaaaaagtgggtatagttggattaggcagttttgggtctcagattgctatagaacttaccaaagcaggagtgcatcattttactttgattgatgatgatcgattgggagcagaaaatatagtacgtcaccaatgcggaattcgcgatttaggtcgatttaaaaccttagctgtgaaagatgccatgcttgacaaaaacagtaacgttgaagtggatacctttgaatgcactttgatggaatatcttgaatcggtaaaaaatgatttatccgcttttgaggtgttgttgtgttgcaccgacaataatccaagtcgctttttgatgagtcatttagcatcacaacaaaatattccgctacttattggtaaagcctttgcagaggctgaaggtggtgatgtttttgttcaaaaagggaatcaagaggcctgttattgctgtcatttagacttcagtaacaatgagtttaatcaagaattatcttcagcctctcaaataaatgagcaaactccggcttatggcattgatgaaaatacacctataacagtacaaatagggctttcttctgacatcaatccaattatcaatcaaatggtaaagatggcattgttagagttaacgaaagaatcttcgacttcttatcaaaacttagctgttgaactagactataattattacatctgggccaatcgcagaagccactattttgccaattggcttccttttaaccaaaataggaaccaacctactctactgcggtggtacggcgctaaaattcagaaaaacattcattgcgtttgcaaccaataactctatttccaaaaaaaaactgtcactatgacttaccgatttttatctgaaaaacacatcatcaattcaatgagtacggtttacgaagcctactttaacagacaaaacaacttatcaaaaatagtagcagaggaagcaatagcggttaaaaaaattggtgccttttttcaggttactgatgctacagctgttataacagccatactatggtgcaatcaagtcaaaggcaatcgttttcaactgaataaatacatgaaaaaattggaaatggatacgataaccattttagaatgtaatgctgagatttccgaattcaaaaagaaagcgtggcttattccctccaaacgagcctatgaaatcacaagtaccgatgactttttgttttctaaagattttatgtatgcgattaccaccaatgccgctgaagcattatccataaaaattgaagaagatttttttagtgctatgattcaaatgcatcgctacataaagaacatcttaagcagtttagagtttcattcacctgaaacaatcattttggagtttttagaaaaagtcaaacactttgaaccgattacaaccatcatgaatgacccaaaaattgaacctatggaaaaagttcttttggcttacatggtaggtgcttatgtgagcggagagagcagttttgatttggattattgtctgaactacataaacccggatggctcgtttcattacaagttcaaagatcgcgttgtacaagaaaagagcgttgttttttcaaaaggctatttgacgttttacactgaaggttttgctgatttttcagaagttaaccttggttcaattctgagggagaaaatcaatcatcatttgattactgacaacaaattagccttcaaacctaggatgctaactttaacaaaacctgaagagttacataaagtatcgctttattttaatgaaaacctaaacaatcaagtgactaatattatgaagattacctctgattcttttcaacaactggaagaaaagatggtagagcgtaatttaaaacccggactaacgctactctttcacggaaacccaggaaccggtaaaaccgaactagtcaaacagttagcatttgaaaataatcgcttgattttatctattgacagtagtaaaatcataaataaacatgtgggtgaatcagaaaagaatgtaaagttgattttcaacgagtataaagaagccaagaaacattatttgagaacaccaatcctactcttgaatgaagcggatgccttgattagtaagcgaaacagtattgaaaagtcaattgatcagatgtacaatactttacaaaatattcttcttcaagaactggaagactttgaaggtatttttatagctaccaccaatatgatacaaaatattgatttggcttttgaccggcgctttttgtacaaaattggctttgatgcccccaatagcgaaacccggctaaaaatttgggaggatgctttccctcaattgaagcacctggaaaatattgcaaaactgaaccaaaaatacgttttgagcggcggtcaaatcaactcaattaaaaaaaggagttttattgaaaattttctttttgaaaccgatagcctttcatcagattaccttgagcaactggctcaagaggaactttactttagagaccaaaaacacttaaaagttggattttaattttataaaacatgaaaaaaccattttacattacagaaaacgaaatcgttatttactacccttgttcaggtatagatttacatacaataatccgtttattgaataaagaatacagaaccgtattttttaaaaataagcagttgacttttatttttattgatgccgatgttgagacgtcttatgggcacagagatgaattatttaaattagaggacttgttttctgaattagggtttactgtggatcgaagagagcacaaaagaattcacgattcgtatttagagaccagagagcaatccattgaggcaattcagactgaacaatcacaggacctaaaaattaatgatgaccttttcaaacaattctacaaccaaattgaagaagcacaaaaatataagcactatgattattatcgtttgcaatatgatgacgaaaccatacgattgtattttgtgtatgatgatgcatacttagccttggctatttttaagaaactatatcctaatcaagagcgcaatttaatattgagtgttcccggtggtggttggataccaacaaactatttatggtcatctgaaagtccgttcataagactatttgagccgtatactatttacacctgtgattattttctaagaggtctaaaagagaaaggctattcagagttgtgttttatagaaaatgggcactcttcttggtttagatatgtatcaaagagccaaagaaatgcaaagttgaaagcgttcaatatacattttcacactaaagataaccaagcagagtgatttgcttggttattttgttagtgtaaatattatgataagtattggcttataattaacaacacttgatgttttagataaaatgctgattaataacgtgcgaatattaacaaaaaattttgaaatttgaataatatataagaaaagtgaattttagtttagttaaaaaacaatttttcaaaatgaacaatttaattcaatcaaaacattacgataagtactttgaaagaacagaagcctttttacctgttttcaaagttttaaaagaacaaatttgtaaaacagaagataaaattttattaatgggattaaaaggttcattagatatgtctttgagaacttggtccggttctcatgcaacttttatttcaagagcgctttgggaacacttaaaaaaaatgaaaattgaaataaatccctttgaactaaaatgggaaaatagagatttgtttggcaaagctgagggatcagaaaagaatatcgctgtttgggaacatactttacccattaaacaacttagagacaacatcataacttgtacatctgaaattgaacttgaaaatcttgttaaaaattatcctggcatagcttggataacaagagaagaagatgaaagattaactaaattaaagtttagacaatcaagaccagaaggatttctgaattgttataaattagctaacatagaattgataacagaaagttctcttttctaaactaatcatctaaatcaacatcataaaaaactccggtggcaacctgttcttttatggtttgaacatactcttctttcgtaccaaaatattcaggccaaaaacttgaagtgtaacaccacatcaattcggatacatcttctttttcaattaacaaagtgtctaagtataattcatagcgttctctacaaaagtagtcttcctctaattcctcctctattttctttttctcggttggaaaaccattaattaagtagttattctgttcgcaataagcgatgattagtttttcagctttcaactcaattaattcagcatcttcaaaagcgtctaaatcattttcatctatagattgatgcttttctgctaatagttttatattttctttgatttcatttaaggtcatactgttgcttttaaagttaaatcttttacaaagattataaattaattaaatcaccgtcttcaaatgttccatcataaaatcttttcgctccacaattttataattggcatctcttgaaaatttttctccatactttaattggccatccaaatataaggtaactataactcttttctctcttacttgaaatttataatcatgtgcccctacacaatatcggccatccaacattaatcgacctatttgaacataggagagctggtcataataaaaaaagtaacattttctatttcgcttttcaactcttaatattctgtctgaataatcaaattctccaaatagcttgctcaattcggctctgtacttttttacaagtgcggttttattcattttgtattctgattcctctaccgaacctaagtactttttttcatcggttgttaccaatatttcaacatgatttccctcgcctcttctataataatcaatatcaaaatttagtttaaaaaagtctttctccatggctaaaagtcctttttctgatttgtataaaacttcttgttttacatcattattaggtgcaaatgagaaaagcacaaaaaataatataactaatataggatatttcatattgtttgatttattctataaaattttaaatcatttactagcttggtctgttttaatcacgagtaatttcaattaagtgttcataaaacataaccatagccaatgtgtccaactcacaatatttcaaaagaccttgggtaatttgatttctttctttatccgacatgtcttgaaattgtagcttggcataagccgttaatgcagcacctccatcggctatgtcttcaatatctgaaagggtttccatcttttctaattggtcccaaccttcaaaaaccggtggtaacattttgtatggactagccactactccattgtctatcttcaaccaaatatggttatcaccaaaatttttactgctaatattaatctcaccaatagatttactatatttctcttttagaaaagtacttgtttgtaaagcagcaggtagaatggctttaatggaatttgaccccttggttaacggattgtaataataatacttaacgatctcgttcaagtcaatcatattgcgctcacctaaccaagtatccacactatctttggttgactgtgtgatgcttttaataaaagtgattaaatcctctttatccggttcagtgctattttttaattgaaccacaatggcatttaatacagaattttcatgtttggcaaatttaaaaatagttcccatatcattttccaaaacacttttaagtgctctcacaaaagagaagtttggaaactcacctggcgtattattgatatattccgacttgtgttcaattgtaccgttttcatgataaatgtgatgtgaaaactgaaaagcaacttgctcataaggtattcttccggaagtgaacggaagtgcaacagtactggtttcaaaatcaataaaatgcaatggaaattgccattgggtcatttctgcttttaaaccgtctttttcaatatagatagaatcatcgccggttttagatttttccacttgtatccatcttctttggcctgaggaaattttgtcaggaactaaagtaatattaaaatcttcttcggttaaatcttccataaataatcgattggattctaaaagccctttcccttggtagttccaaatttccatagcatttggttttttaaaatcggactccgaccattggtgttgttttttaaagcaatactcaaatcctgacaatagtccattagctttatcctcatcgctggctttgaattcgcattttttgcaagcgctaaaacttgttggccaattaaaatacttttctgctaaataatgcgatttgaaagcctcaagagcttctttgaaatctaagttagcatggtatttatatttactgcctataatgtcgtttataatagtatcaacattaatttcagacaaaactgattctacaatttcctccaaactgtcaatctttttgataatagctgttcttggattgccttctgatggcactcggaacatttgatttaagccatccactttggccgtttttgatttatcggccatcataaagtaagcttcaaattcaaactcagggtaagttgttttggccacgtgtttttgaaaagccaaatcaaacaaataaggtttccaaccgccaactaatccaccacgactccctataaaaatatttttctcattggggttgaatgatttcgctttaacttcaattaaacgtatgtgattgccttttttgaccaaaatatctgttctaataaagaagttattgataagaaaggctgcttcgtaaatcacaacattctcttgtttcaaggcttcttgtgtgagttggaatgctttttcatattcataaggttccgtatcaatgaagattccgcccggataatgcaacctggctaactcctctacttgaaaaccgcctttggccaaggctgctaaaaaagtatcttctaatttggcattggcgtagtttttattacctgtaaaaaacaatttattgggacattccaaacctaatttgaaacgtgattttgagagtactttcataacgtttaatcaaattctaacattttttttatcttatctttttcttctttctcccacctttctttatttttttggccttcataagccgtaattaaaaaaccaatgattagataacttataacaaacaaaatccattgtaatataaattgagggaaataattgggtgccaaaataaaaacaaaatcaataaccacacttgtaaaaacaaaatagcgttcaaaattaattttgtgatttaccaaattagttaataaactcaaccaacctaaagtagaaaaaaagtttaagacaactaagattaagataactagatacatatctttttgatttagagattatacattaatgttttgagtattcatctagaaaagagagttcttctggtttaattgtttggattccaaacagactaattttatccaatatagtatttaacatatcggaagcagcaatagtggtattgctgataggttttactttatctaaaaaaactaaatagcgctcgttccatcccaaaaattcaagattatcttggtttttaaaaataaacaagatcggaacttggtctttatagtaaatcctatccaagacaagtctatcttgatttttaaaggacccaaaaaaatgaattggaaggaaaaaacgtttcagtagttgctctgggcttattcttaattcattagttactttgatgaaagcatttatatatgaaaatgtaaacaattctaaattgtcattggtagttatagcattttcatataattcaaatagattggattttaaattcaatgatttgttttcaaccattgttttttcaaaatagtgaaacaacttagagtctatattggattggtaattttcctgtaatgtctcaaaaccaactaattccatttttatatgtgattgatgatgtcttttagtaccaattatgaaatcattgtcaatgtagaccaaatgaggattttcatcatctgtcaaattatcatgcaatcgattatataacattttcagataggcttcaaatcgattaacttgaaccgatgtaatgcataactttttaagttcaataggagatagatttaataaatcaacacaaacaacagaggaaacagcattagagtagttggaaaccataaaggaaatttttaatgttttgacaaatatatgactgtgattagtcaagacttggcaaagtttattaaacacacctatgtatttcaaaatcttaaaagaatataataaaacaaggtttgactctataagtcaaaccttgttttatttaagctattttttgttgcagaggctgattttttcattccttttataacattcctctaaaactttcagggacttcaatctttagaatttcagcaatatgtaaagcatattctaaatctgtaaaatcactaattttagatttaaattttttattttcattgtcaaaataattactgtgaaaagaaaatatagccctttcaacttgaactggattatctaattttttttcaatttttatactattaataagattcataaactcttcatatgaattagataccaaaagcctatttgggctcaaaaaacctaatgtaccagcaattttattatcaataataaccatattgaatgaactccaaaaagtagcgtgtttacccataaatgatgcaccaataccattaaccaatttaaaaaaatcaacagcactgaaatttactttcttagacatttctataccatttttatagaaatccaaatttggattttccattattaattctctagaactcttagtttgattttttctttttgcataaaacattcttgaagttttaccaccccattgattaattaaatcaatagcattaaaaatttcatcatcaattaaaaattctttgttgacaatatttaaaatttctgattcacattgattcaatgtaccttgaaaattagaccatggtttaatattgatgttagtatatgcatttgcattaccaacatttttattccacacatctaaccaatgattataatttaaagatggtctctccataattgtaatttaaaatttgttttttatttaattaaaattatttaaatgttgtattgaaaaaatctttatttaaatacttattgcctttttataaatacaaaataaaatcaagatactctttcaaagatattgtcggattttgaatttagtttagaaatcttatatcatcagaagtcatttaacattcaatgtaatataagaattataaaactaataaatggatgtggcaaaaaacggcaaagtttaaaatattggataaatcttcacatttttaaaaaccttctaatcaataattcactttaattcaatcgttcacatttatcgccaaatcttcccaagaaataatctatttcgttgttttcccatacagtgatttctacaatcaggaagtcgttgtttttttccttcaccacttgtgaagggtggatttttttattttctataatgccaatggcccattcagtaaattttaaccggtaggttttgagtttgttttccttccaatcataccaaacacccaaactgtgttgtagtaattcttccaatcgtgtagctttgtataaagccgaataatcataaaaaataggagtgtcttcttcttgaacttcttcggtttcttgaatagcaggatatattgctttctctacaaatttatccatagtgtaagtttgaagcaaattcgttggttggttggttttctcatcgatagcgctacctaataagtaatagcggttatcataataccgaacttgcaaaggcgcaacttgtcgcatctttacctcacctttcttgtcatagagaaattggatggcctggcctcgtttagcaaaatcaataatttgtccggcaagtaatagcaattggtcttgctggtgtaatgttggttgtacatgcacaaaatagggcaaaacgttcaaatctttttctgaataatcaaaatcatctatcaaagcggtttttaaccaatttactgaactcatcgatttctctgtgtctaataagcctaacagcagtggaaacgttaatttttcgtcttctgacagggataaattctccggagaggcttcgagtacaaaatagtttttcccattaaattttcgggaaactatttcataaccattttctaccaaactttctttagctctatcaaatgttcttctggaaatgggttctaaaccataatcattaatcaaaatttcattcagtgattgtaataactcattcatagatcttttttgatccctaagtagcttcactattatttttttgtataaacgctttttgcctatgtctaccatacaatttattaatctaaaaatcaaagatatagaactttgccaaaaaatgccaactgcactactacatttgtctccacttagcatgggtggcgaaagttggttcggtgcacagaaccagatagtagacgcgcacaaacaaggttgtgtggattataaatccgtggaggtgcaagtccttccctatgcacaaatttaaactaacgcacgatgaaaaacctccaatttgacaaactaaaattcattgagtatgtaatcgctgaatcaatttcggattcatccgataaagaaaccattttagccacacctgaagtacaaggattacttaagtttttcaatatcaattacgacgaactagttgtactagcattgctaattgaaggaggaattcgacaagaagaacaaggcgtcgattcatttatggaacattttggaggaagcattagcagcctaaaaaacataaacgatgctttgcaaggcttaatttcgaaaggatacgttattgcaaacaccaaaaaccgattaagtaaaacattaataaagcagacatttcaagcagacgagaaggtttatgaagcgcttttaactaacgataccaacatcctaaaatcaaaaccggctgaaaattttattgagttgttaaaactaattcaagagcatatagaccgcagatgtgaaggatattttgatgctgagacactaataagattggtagaaaaagaaataagtagtgcaaaaaaatgcacacaactcgaatggattaacaagtttaacttaaacattagtgagaaagtgcttttcttctgtgcctcaataaactattacatgaatgaatcgcaaatagatttagagtattacattaagcaaatcgaggataactttagaaaacagaaggcaatcagagacaaaatatttaacaaaacatcatctctcataacaaatgatttggtaattaaggaagatgatggatttgtgtttgatgagtttataggtcttactcaaaaatcaatcaaagcactatttgaaaaagagaaaaagagagaaaagaaacaatccttcactaccggaacaattataaaccctgaagaaattatagacgagcagctattttacaatgacaccgaatggaagcaaattaatactattgaaaaagtactaagtcaagacaaacaccaattagttgtgaagcaattagaagaaaacggtttaggcaaaggtattgttatactattcaatggtttttcgggaaccggtaaaactgctacagccaaacgattggctaaaacaagtaatcgctctatgttttgtgtggatgtagaaaaagtagttgagaaatggatgggagattcagagaaaaacgtgaaaaagatttttgaggaatactatgcgttttctaaagaatgtgagctcactcctatcctatttttcaacgaggacagtattttttcaaagcgtgtaacggtaagtcaatcgactgatcgctctcacaacagtatgcaaaacatcctattagaacagatggaaaattttaaaggcattgctatagtgaccagtaataatgcagacaaacttgacgccgcttttgaaagacggtttttgtacaaagttgaatttgaaaaaccaaccaaaacaacacaactcctattgctccaaaataattttccacatttaccgggtgaaatcatacaaagtgcaatagacaattactcatttacaggaggtcaaatttacaatattcgaaaaaaatacatcatgcaatgccttttggaagaaggagatttacccaccttattcttaggcttatgccaagaagaaataaaagtagctactactcctaaaatcggatttaacaacaactaacatggaaaaaacaattcgctcatacatcaatacactcattgtattattaattttctactatgctaccagaggtatagtaaaactaacttggaatcacaaagatacagcagtggtaaaagctcgaacccaatttttatttggtgtcatttttattggttcactgttttatataatccttatttatcatatagttggtggtaaatattccatagtaagcttttgctataaggtatatattgtactgggatttgcttacacaaccactgggttattttatgatgtttttagcaatgctaggtcaaatttgaaaaagcatgccaagggtgttaggtgacgtctagagcagttaaattttaataaaactaatgaaagtaaatcattacctgagtgatgtatttcaattggtatcggtatgaataaaactagatcatctcaatcgcatcagccatcttcagagtaatattgtaatagttgaaatcgtttttgttgcctttaactttttcaatgatattaataaccgtatctttttgttttattggtggaaaaaacaatgaaaagtactgccaatcttttttagactcaaaatttcgctttgccggcgcaatggttattcctaccgcatttgttaatgtataacgctctttagtaattacatcttcgataaaagtatctggagagattttaatccagccgccattaatgtatttttcactagttatatatccaaaatcaattttagtcaactctctaaataaactaattctgagcaatataggattcgactcaccatggccgattgtattataatgaaatatcaaatttttgtctttatttatcatgctacaataatgtttttgtttgttctctcaaccattgaggatttattacttccagatttctaccataagaacggaacaagcgaattaactccacacttgggactacatcaattgtaaaaaagcaagaaccagactcgtttttttcagccttttgagtcttatgaattggataggcttcgaaatagttggttatttttattgatgttaaaaacgtaattttttgtttaggttgattttctattggataaactccataaatatcattacagtagctctcaacttctttatcatcactatcaatatattttctttttaaatgtattggttcgtaaattctatctaaaccgaaagtcctaattgaattgtgtgtttctgaaaaacctacaagataccagcgattttcaaactcttttagaagtattggatgaacaataatggctttgaattctctattattataagaataatgggaaaatgaaaccggatactgatttttacaagccttaaacaaagtattaaagttttcatatcctttagcaccttcaacataatcggttagaataatttttcttttggtatcgctatccggaaattcttctttgaaagccactaatatcttttgaattgcctcactaaaacgctcatttgccctattaccacctccaagatttttaactaaatcaagtgcttcttttatgtatgaaacatcattttcagttaaaggaatcgaatttatagagtaattaggattggtataataataccctaaattaattctacaaaaggcaattggagcatcataaacatcggattgcttcatattcctgatatctttttcaagagtgtccagtgaaggtgaaattgtcaacttctccaaacatgctctttgaatatctaataatgatggataaggtttataaatgtttctaagtaaagaatcaattaccctatatcttttaaaagctgagcgtgaaattgccattgttaattttttcataaaagtagaaaaaaaaatcactccgtacaaactgtacggagtgactatatagttttgtctcataaatcaattaaacaactaattatgaaaccaaattttgaaatcaaaacagaagaagaacttctgaccattacagaaccctatgtgttcaaaaaccctatttcacagtatacttcaagcgaacatatgggtattgaaaaaatcagtctagacgatgacttcaccagaattgactttgtatatatagcaccaaagcaatacgtaaatggtggttggattcaaatggattcgggatgctttataagacctataggttctgaaactcgctatagaatggttagtgccatcaacatcccattagctccatcaaaatattactttaaaaggaaaggacaagttcatcatttttcattgctatttcctcctattccaaaaagtgtgaagcaaattgatattattgagaagctagctgaaggaacttattttaatttctttagagtttccttgcagcataatgaaccaacattaatcagaattataaacgagaattagagatgaaagccgttaaaagaaatttcttagtcgttgaagagaaaattcgtttaagcgaaataaacaattttcaagtaagtaggtatttcaatccaagccattttaatttagaggataaattaaatcttcattttgattattctgaaggacttggagctgagtacatcagagttctagcaatatacttagacacttcaaaaagcatggaagcctatgaaggaatagagtttacagaggaattcaaattgtcttttccaaaagaaggaattactaaaaagaatccattatcaatttcattgaagttaaaagaagattctaagttgctatggaaagtagccattcaaatccgacaagattttaacaccctaattcatttaagagtatcataataaatatgaaaacaaaatttaaacttgggcagatattttgttcgaaacataaaacagtaagcagcaaaggagaatactatgttgtaattcaagaagaatccgactcaaaacgtttggctttagtggttataaactctaacagctcacatgtatctggagccattatagaaccagaagaaccagaaaaagatttggaaaaagtagaaattagtgcatcagatttattagatgaggatattaccataatggaaatagatttgaatgaattggttacttccaaagccatcagaattattggcgaagacagggtaatcaaatttactagtattggagctgatttaagagctaatgttgaatatgaaataaaatctcctagttttcgattaatgggtgatttatattttgactttcaccataaggataaatttgttaaaaactagccattgaagacattaatcaaaacactaaaatattacggattaggtatagccgtatcattgctaataattggactaattcatttatacagtttgattgctgaatctactttatactacgcagaatgggacaatataattgttactgctttattaagtggattaccgtttggattagccatatgggcttttaccacatttaaaaacacaaaatgacaccataacaaaaaataatagctaaacaataggttagaaaatttgagaatttattttttaggtaccaaattgcggcagatgctagaaggatttaatttatctagatcaggctggacagctgctataaccctattacaaaattcttaagggtggcagtatgctgttaggtattgaaagacaatttatagacgatggagcaattgtgattggaattggagattggttcgctataaagccaaattgtgaaacaaatacgaatcttgtaattcggattttatagaattcctctttcaagagtttattatgattggcggcttaattgaaattagatgttcttggtaagttttaagtcctttttccaataaaaaaaccattgaaaaaattttaaactctatatatctcaacatctacaagcttgtaaagattgaagtagttgaatatcatctactaattttgggtcatcattttaaaaattaatgtcatgaaaaaccaaaaaacactatatcactttgttttggacaaaagtggttccatgagaaattgcatcgatgaaaccctacatggttttaatacccaaatggatgttatcaaatcattaaagatagaatttcctgagcaggaaataaagatgtctttaactattttcgatcatgagattgaaagtgtgttttctcaaataggcattgatgaatttaaaaatctaaccaatagtatgtatcatcctaagggttatacagcattgttagatgctatcggggtatctatcgaagatattcaaaaaaaccatgagaagtcaatcgcacagcacgaaatgagtgtggtaatgataattttaacggatggtcatgaaaatgcaagtaagcgtttcagctaccaccagattgcttcattgataaaaagcttagaagagactggacaatggacatttacttttttaggagccgatattgatgcaatgcacacttccaaaatgataaacattaaagaagtcaatgtcaggtcgtttagcaaaaaggactttcattcagtcatgaatgaaatcagtcacggactccgggattacaacactatgaagtcaagaggtagaacaaagagggattttttggattttaaaactaaggaggataatgaccaaaagccataaaccttcctattttagaaaccagaaaagatgctgtagcctcatttatctgcatattaatgatgcttttttatctaaatttggtttgctttttttttaaaactttaatattgaatcaatgagagtacatttattacgttcgccagagttgaaagaggaaacatatcgcaatgttttaaacttacttttgcagtatcgtgggccaatagtttttgtcgaaagtgaaatagaaggaatcggagatgaaaccaatcaaattaaaatgatgcgattgttcaaagaaaatagaaaaaaaactcccatagattcaaaaataaataatcgtactttatttgatgattttagtaaggaaagagaaccagaaagtgcttataaaacctgggatgaactttttgaaaaatgcaataaatacagagagtcaaataaaattcctgaacatgaattagtaattttattaaccgattatggcaatgaatcgaattggtttggtgcggggtctccatgtatgaaaaattactttgttcagacctctggtttggaatatttttttggaaatgaaattgatattcggttccccattgcttatgaggttattgtttgggtgcttcgccatcaaatgtatgatagttttgaagagatgtgtcaaaatacacataatgagtctagagggtgctttatggatttctgtcaagataaaagagaagttaccttgaaaatgagaaccgctgacgtatgcccttcatgcatgaacaaaattacagatcgcgatgtctctcctttaacgctgcaacatgtctttgatatcattgacggtattagatcgagtatgacttttaaaagtagatcaaagattcttttcaaaccatctaaaattgaaatcaaaggatacttacaaaaaatattttttacggaccttggaaatttagaattgcgtttaaatcccaaactgtaaatcgtcagcaaaaagtgtactgatttaagtcaaaactaagagagtgttttcaaaatccttaaatttgatattatgagaacacccaagaaaaaaacagcagagaatttcatcaaagacattcg

SEQ ID NO: 9 - DNA, 103079 bp, Sphaerospermopsis sp. LEGE 00249
  LEGE00249_18
tgtctttgacaatcttgggaaatgaatttataatcatgatcaaatcaatattttgatatagcttgctcaaattttaatatattttgggctatttttatcacagatttcttaacattcaacacttctggtcaaaaacaaactcgctgtcagttagctaatggtgatactttgcaaattggaccttatatgattactgtccagtttggattaaatactgttattcctacacctaataatccttcgactattcaatttaatcctaatactaatcttcctgatcctaatatatctccagttcgtccagttacgcctttaggtagtaattttccaccttcggaatttcagaatcacaaagttgatttacaagctattcatgctactggtttacctattgatgaatgtgattatttagcggttggtgctggtttgggtagttttatttgggttgatttattaagaattagtggtgttaaatctgaaaaaattattgctgtaggattagaatcaaaaccttatgcacgttatcagcgtttatgtttaaattctcaaattcctttacatgaaagattgcgttctaattctgattcttgtcctgataatatttggggatggcctagttatgctttgcgagaatcttgggatgatttaacaaaaggtcagatcaattcagcttttcaatatttatggcaagtttttaatgaaccaacttttgcagaaacttatacgccccgtgcgggtaatgtttttgattctatagatcgggaagctaaacgtattagttgggataaaatttatcgttatggtagagtgagagcaattagaaaaacggaagatggtagatattgtgttgcttattctcgtggtccgggaaattatgcttttttagtttgtcgttatttacatttagctacgggatatcccgctattcaatttttaccagatttacaagcctatcgggaaaaatatcaagattttaaatctgtagttaatgcttatgaagaccataatcatgtctatgaacagttagaaaaacaaggtggtactgttttaattagaggaaggggtattgtagcttcacgaattttacaacgtatttatgaggtgagaaaacaaaatagaaatattacagttttacatttaatgcgatcgcctaaaccccacggtaacaaatttcaaaaagcccaacgtccggttaaaaatcactacgagttgcaaccttttaactggccaaaagcttgttggggtggtgaactacgagtgatgttagaaaaagccaccccagaagaacgtcaaaggttattatctgactggggaggaactactaccgcagatcgtggagactggcaaagaatcacagaagcaggtattaaagaaggttggtatcaaattacttttggtcaagttgttagtgtagaaagagatgcccaaaaccacactattacccatattcaagaaaagggttttggggaaatgaaattaactgctgattttattattgatgctaccggacttgatgccaaagttaaaactaatcccttattaaaagatttagttgaacattacaaactacctttaaatcatttagaaagattagtagtagccaacaattttgaattagtagaaatgcgaaatactcaaggtcaaatgtatgtatctggggcaataactttaggtggacactatgcagcagttgatagttttttagggttacaatatgcggctttagttgctgtggatgggatgtatattgtccgtgcgcctggtgtgaaaaagttaaatacttttagttctttaaatcagtggataaaatgggtttttaatcaagcaccatcataggaaatagggaatagggaatagggaataatgtatttaccaattacccattaccaattacccattacccattaccaatctattctgctgctaatcgaaaagcaggatagggaaaaagttgtttaaatcctgcaagacggtctttgaatgactctgaagcattattccaaagagtttcataataaaagaaaaccacacctaatccttgtctttgggcagttctcacttgatttgtaatttgttgcattgatacggggctagttcttaaacctgccattattcccactccagttgggattagttgttgtgcttcttgcatttctggacgggaaattttagcagaaaaactgtttaaatcagaacgataaacttgtacaattagttcatctactatgtttaatcttacccaattaagccagtcttgcaattgtaatttatatgcaaaatcgtagtaattaggtgaaactgaaaaaattacttttggtttgatttgcttaattctttgattaagtctcaccatgaaatctgtaattttatctgccctccattttacccattctgggtcttgagaatctgctgggggatctttttccatttcttggcgatataaatcaactgtatattgatcgtaaccaaattcatggggtaaactggtatgatcgtcaaactggataccatcaatatcataatttgatgttagttctaccaagagatcggtaataaatttttgtacttctggatgaaagggatttaaccatgcaacttcaccagcagcactaatagaagtttcgctaccatcccgcttttgtgttaaccattccggtttatttaatgctagttctgaagtttggggagtcataaaaccaaattcaaaccaaggaactaccagtaaattttgacgatgggcttgattaattacatcggcaagaatatcatggccatctgaaccacgaaatacaaaaggttgaatttctaaatctttggctatcttactgggatacatgacataaccagaattccaaactacgggataaatagtattgaaattgagccgacgcaatttagtaacagcatcgttaactttggtgcgatctttaaagacgttaagatcattgttggtaatccatacacctctaatttcttgtcttggtatttgggcgttaacgggtgtaaaggtatttgttaataaaacagtgacaaaagaaattaaaaccaaaaagggaaacaaccttttaaaaaatttgtgatgccaactcattgtttttatatgttgccaatatgaagaaaaaaaattgaatttcactcttgggtaagaggtttgaattaaccatttatgcagctgtctaaaattgcgaagtaatttatgattcatattttctgagggtgtgcaaaatgtaagtattcagctatcagcaatcaggaaacagctaatagccaggattcagaggttttaatttcaggttaatttcaggaatgttatttatctgcatctgtgtctgttcattctttgtatttcaatatttcaggtactgacggaaaccgacggttgaatgcttacgtttttgacgtaactacttcaaattagtgcctggtttaatagtcctaatttgaaattttggattttaggttctaactttgtgcataaaagataaaaaatataccatacaatagtgtaataatgtctagaatattgtagagatatcaattacattcttgtttaagatgcaaactgtaaaaccttcctcctcaatgctgtctattacgccaaaactatgtcaacctttaaaaatagtcgccttgggagatagtttagtatatggatatggagactatgaaaaaggtggttgggtagaacaactgcgccgatggtggatgttaccggatagtgtgggtcatgtgctttataatttaggggtcaggggcgatcgcattcagcaagtttcacaacggttagaagtggaatttcgtcaccggggagaaattagaaaccgagttcctgatttaattatcctctctgttggcgttaacgactcaccccgtttaggtcgtcccactggcaaaaattatacagattttgcggaatttgaaacagcgatcgccacattattagatcaagcacaacaactttgtccagtcctctttgtcggtatggtcccggttgatgaaagcaaaatgccttttctcgattgtttatattacaatcatgctgaccaatatcgctacaaagaagctacccgtcaagcttgtgaacaacgaaagattccctatttagacatatttgatcaatggatgtcacatgatgaaacctggagaagtcaacgcatgacagcagatggacttcatccgaacactcttggttatcaagacttattagaagctgtcctcaactggtcagaactatctcaatatcattgtcaagtagattatcacttgaaattagaacacacttaatatttagattcctgacttcttaaacaagtcgggtatctattttcaatcaacaaatttatgattttatatattctgactcctgactcctgactcctgactccttgaaatattatgactcctactttatttggtcgttggcaaactcgattattattattagcaactgttggtgtattagtatctttaccttttacactggggttaataggttctggtgcaaatattgtttattttttcattcttgcttatgttgctatctttggtttaggttgggatgttgtttataattatctacaaaaatcacgctgggatagagactggccagcagcttatcaattttttgcaggtatttgggagatgatatttgtgttttgtggagtaaagatttttggttttttacctatacctataccaaaagaggaattatcaataggggcgtttttattacattattctgtagtttggttggcggtttttatgagttcgcaaagtttaatgagaattatttttccccgttggcgttttcgtggtggacagtggttataaaagatagagttttttttcacgcagaggcgcagaggagtacgcaaagtttaatggttaaatgtttatgtcgattatctcaaattttatcttctagattatgatgggaaataaattttctagtgattcatcttacaacacaacttttaaagctttctcgataatatttacatattcttctactttatacattcgataggcaattttatcaacttgatttctaatttctatttgtctcagtaaaactgtttctaaatctgctctacctacttcttgtgaaactctatttgcaatcacttctaaagtacgaagattactaaatctatcttgatcatatctcttaactttaataacgtcaaaagcaatattcactaagtttcctatttcccgtgataatttttgtttgcgacggaaagaagcatcaaattcagttaaataaattaatcttgctaacagatatctccgtaaataggaattacgaatattgacgttagctatttctatccattctctatccccttctttccaatcttcatcatcagttacttctccccatattatatatccatttgcagttggctcaatttttaatgctaataaatgtccttctgcgtttgcattagcactttcccattcaatgtcaatagcataatcaccagttaatttatgatattcatttaatgatacttctttgctgggaattttcgcagctttatcttcataagtcgtgataatttgatagcgattttgccaaattttatgcgcttcacgacttaattttactaactcttgataatcagattttgtgtcatcattatttgtttcatcattaaatgagggaattggtaaatcaccaacttgattttcaaaatattcaaacattcccttacctgtaagtttaccaattccacctaatgcacgatagcgaaactctaaaacttgggaattaagtaaagcacaaatatagtaaaggatattaacatcagtattttcacatttgatataagcagctacatcacttttaaaaccaaaaattccctgttcatcaacaaaaaacttattagaatttgcacgacggggaaagagaatttttgcatctctcattccgtaacgtggccgatgcaaatgaaaccactcataactactggttttatttctataaacatctctgctttctaattctgaacgattttcctgtaaatagattttgacagactgaggtaattcttcccattctgtttgatgagtatagtacaagatttgtgtatctggtggttcacacccataggaattaatatcagaaatcgcaactctttgtaaataatattcatgaggaaatctttgtttaaattcaccttcaaaaatagaatcacgacctgtagtaataccttctgtataacgtacccagtctatatttcttaatttaatacccgatttatcaattttttgaaaaatatgactatagggtgaaatttgccaacgatcatcatctaaatcagattgtttaatatctacctgagtgacaccatgagttaaacttaaacaaccgtcatcattgttaaaagtattttttacaatatccaaatccagaacataaaaagtagtaaaactatcttctggttgaggatttttcctttgcaattgcataatacaagtagcaattcccgcttgaaaaacttgatgtcctaaaaaatcaataatgttaattatcttcgtatttttacaaataaattctcgtaaacttctagatttatcaccttgaataaaagaacgagaaatgataaaacttaaataaccatcttcctgtaaaatatcaaaaccccgacggaagaaataaaataaaatatctgttttatcagtataaatatcagaataagcaaattttaaccattttaattccaatgcacctctaccaaaggtagcatcaacattaaaataaggaggattaccaattattgcagaaaatcctcttgctgattttggtaatctaggatcaaaaatatggggaaattccaattcccaattaaatggtttttttagtacaacttcctcaaccgcagttgataaagttattaattcagatttgactcttgctaattctcctgaagtccaattttttaaaccccaattttttaaaccattttctaaactttgttctgaatgatttttttgtataattaactttctaatttctgctatctcgttatcttcagcatctcgatttttaattaaattaactaccgaattgatactttcatcactagcaaaaaaagcagttaaaaccggattaatttcttgattaattgctgtaattctagtttctaaattactaactgcttgatttctttctatttccgtttgagtattatctctagcaattttagccaaatctgcgactattgctaattgtgtttcaaaaggttgtaaattagcaggactatgaactaaactatcaccaacacgaatatttaaagttagtgcagggagatgggaataaatagaaccattgcgtctaccatattcacctggtcgcgcacgtaataacctagtccataatgataattttgctaataaaactgcttggggatctcgatctactccatgcagcatttttactaaaatttgttcttcaggattaataattggttggggtgctacatgactaaataaatcaaaatttgcgggtattttggcattttgacaacctagattataacgtttaatttctgttaataaataatcaaatgcacctaataaaaatgaacctgaaccacaagcaggatcaagcactgtaatttctaaaaccgaagttgctactaaataagcttgttgtaattcacctgctgctagtaattcaatagcttgatcaattttcggttttactaaaggttgtaaagtttgctgaacaatgcgacgtactatataattaggagtatagaaaataccttcttttttgcgagttttttgattttctaatatttgaataatatcattttctaaaattaattgatgagccaaaaattgttcataagcagtacctaaaatatcctgagttaaagttgtaaaatcatagttataaattgaacgataattagccaatgttcctgtaatgggataaagtattccctgttggggaacagcattaatcacaataattgattctaaatattcaacatcaatgcttaattcatcaatccaggaaggttgaaataattcagtattatatcccacccatgtatgacgaaaagcacgccttaattcttcaataaaaggtaaatcaggaaaagtttgctgccagttataataaactctacccagataattaaatggcatttctcggctaaatgtttctaaaagtctaattaagagaaaccgattcagaataatttgggcagcttcacgaatttgatctaaacttaaatcagggtgagattttttaataccattagcaataataattcgccaaatttttaaatctgctagaaattttgctcctaattcttctctggatttttcactataaaaagcttctaaacgattagtagataaattttcccggactaaacaattgtataacgtactaagcaattcaggatcatttttcagatcctccattgtaaaagaccaaaaaggtttccgatcctgtaatcttaaaatatgccattctcgaaaattagataaaataatccaaagaacaggttcttgtgtaccaatatctaaactataatttctgatataatctaatacttgtttttcattagcttcccagatatttttatcccataaacttttagcttcaaacagcaattttggatgttttccgacttcattacgcagcaaataatccacccatgtcgtagtaccaattaaactacgaattgcgccttctaaagtccggtattctgaagtataaccgagagcatctaaaacagggacaatgagactatttttagtattttcttctggtttaccactacgtggtgaacctaacatagtttctgcggttgtaattaactgagtaatattttcgcggaattgtgatagtgacatttacttactcattcatgaatcatcatctatgatacctggttttttatccttttgatgaggcataaaaaaaatttacatataagtatgaaaagtaaggttgggttgaacaaattgacacacttgaagtttcttgatggtaaatcctaccgacagcttaaccaagaaacatgataatttttatgtttatcctgttctcgaatatacattaagagacaattagcgacatattctgctaacttaacaggtacagcattaccaatcatctgttctaagtctgtttttgaacctgagaaaataaaatcttccgggaaagtttgaatataacttctttcaatagtagttaaaggacgtaaatctggtgttactggtgcaacatctcccgaatgttgttgataatttttaggtattggtctatttacacccctaatagtaggactaggttcatcaatactaaaaatagcccttctttgataacttctaggatgtctataataatattgaatccctaaactatttcctaaataatctttaatagttgtcggttttttagataattttgcctctaaataaggttggatattatcatcattaccaccaagttctcctatacagaaaaatctttttctcttttggggaacaccacatagactagcatctaaaactttttctgttaaaccataaccagcatatttgagaatttgcctaaattcttgatatttttttgatttcctaaataaatctacattttctatcacaaaccattgactcccaacattagctactatttcagcaaatgtaatacttaaatctcctctacctaaatcttcattacgcttaccagcactagaaaaatcttgacatggtggaccccccataatgatatctggtgagaattttttgaaaggagaataattattatttacctggctcaaatcatagtcaataattggatgtttaaaattttgttgataaacatttattgctggtttccatttatcaaatgcagcaacaatttcaaatccactgttttggaaacctaatgataaaccaccacatccagagaataaatctataacttttaacataatctacttgatgtattcattcattatatttctataatatatcatcaaaaagatcaggattactcaagataatagcgtcaaatctacgctcaggacttaaaaagttttgccctcctcccaaaattatattcttaatttcttgtttcgtaattcttggttgaatcaaattgtcacaagtcatatatggacgagtatttgcaccacttaaagcaaaagctttatcattcttagtgttataggttaatgtatcaaccactaatttatgattgattttaccaataagagcaaattcgtataacatctttgccaaccataccacagaacgcataggtctttgtatagtttcttcagatttagtcaatcgtttagtaatatcaacaaaaagtcttgtaaatccaaagttactccaaacgaaaatatctaagcaattttcataaagtttagaagttttacccatagttttccatactggttgcatgactaatggagattgaatttcaagattttcacttaataaagtatctaaacaatttacaatttgaggtataaaaggtaatacctgacgtatacttgaccaatctttgatttgactacaaacaggttgaagataatttagtagcttatctctcgaattttcaaactcatgagcaatactgatagcaagataaataatagtatctggtctagtaacaatttcacaaccatattgatcatctggtaaacgataagttgagttatcaggtaatgctgttaacttaatttctatacttcgtaaacaagcattatttttgttaatatcgtgagttaccaaatcaactcttggaagtttacctgtaactatttttctatagggtacataatcactttcaaaggagaaaaatagattaggagaaagaggaggaataccaactatatgagttacatctatttcttgatgctgaatttttaagtttttatccaatattaaataattcagcttcatcccttgatcgtacatataacaagctaatgatgcgggaaaagaattattaaattgatttttaccccagctttctggttgagaaaaatctcgattagaatgaagtattccaaataatcccacctgtctttgctcaaaattcataaaattggaaattagtataataaaaattattgatttagcatataattgtataacataattaacacttcacaaaaaatctctctcaaaccctcttctctacccttcgggaactgcttcgcagaacttggttcattacttcgcgcctttgctcctttgtgcctaccctgcgggatctcttgacggagattgcgcgaaacaaaatcataaaaaaaccgcctattcctgtaaaaaaacaacaacaaaataagcggttttagcaaatatttaaagctaaaaattaattattagcagcagctaattctgctaaacgttcctgttgatcttgagaaatacaagattgaatcaaggtttcaatatcaccttccaaaacaggattcaaagtgaaattctgtcccaaacgatgatcagtcacccgactatctttataattgtaagtgcggattttttctgaacgagaaccagtaccaacttgcgatcgcctcatcgaagttacagcttcctgttgttcccgcaacttcatttcatagagtttcgcccgcaaaatttgcatcgcccgttccttattctgtaactgactccgttcttcagtacagaaaatgcggataccagtcggtttgtgcatcaagtcaaccgccgtttccaccttgttcacgttttgtccacccgcaccaccagaacgcgcagtagtcatttcaatatctttcgggtcaatatgcacttccacatcatccacttctggcataatagccaccgtagctgtagaagtatgcaccctaccccccgcctctgttgcgggaacacgctgcacacgatgaacaccagcttcaaacttcagcttactgtaaacactatcgccttgaatttccagaattacttccttgaaaccgcccatctcacccagagactcgctgactagcttcactctccaaccttgagtatcagcatagcgggaatacattctcagcagatcaccagcccaaatactcgcttcatcaccaccagtcccagcgcgaatttccaacatgatgtttttatcatcattcggatcacgaggtagcagcaatatcttcaacctgtcttccagatgttctatcttatcttctaattccttcacctccaaagctgccatttcttgcaactctggatcaccattagactctttaagaatttgacgcgccccaattaattcttcctgggcagttttccaagtttcgtaagtattaacaacctcttctaaagaagaacgagacttagcaattttttgatactcatcaggatttttcgctgtatccgggtcagctaaccggcgagttaattcatgaaaagtttgttcaacagatttaagtttctccagtaaatatgattctgccataacaactacacaagctcctaaaaaataacaagttggctcaagcataaaatgacaagtgaccccacaaccatgcagggtccttgtggtgcgggcatcatgccagcacaagctatagccaaccagctactttttctttttactgccttgttcgccagacataccatatttgcggaggaagcgttccacacgaccctcagcgtcaataattttctgagtaccagtgtaatagggatggtttccagaccaaacatctacgtgcaattccggttttgtagaaccaacagtcatcacaacttgaccgttacagtagaccttagcctctggataccactggggatgaatatcaggtttagccatttttccttttgtggtgtttctctatcaaaattataactaggattggcgactggggactgaggactggggactgggtaaaatttggtatacctcctgcctcctgccttctgcctcctgcctccagctttatcgtttggagtattgaggagctttgcgagctttgtgtaaaccgtattttttccgttctttagctcgtggatcacgagttaaataaccttcgattttcaaaggtgaacggttgtcaggatctaattgacacaacgcacgagctacacccaagcgaatagagtcagcttgaccggttaaaccaccgccttcagcttttactaaaatgtcatattcgctttctagtcccaaagtctctaagggtgctttgatcgatcctaagtagttggcattgaattggaagtataattctccatctttgccgttaacggtaaatttaccttcaccgggaactaaacgtacttgtgcgactgcggacttacggcggccagtaccccagtacacagcacgaccgctattagcttctgctactgtcattattaattttctccaggaattgtgttaacaattagttctttgggtttttgtgctgcgtggggatgggtaggaccagcgtaaactttcaactttgtgaataattgtttacccaagctgtttttaggtaacatccctttcacagcgtgttctacaatccgttctggtaaacgttgttgcaatttagcaaaggtttctgttttcatcccaccaggacggccagaatgacgacggtaaactttttgagtgcgttttttaccggtaactgctactttttcggcgttgatgacaactacgaaatcaccagtgtctaagtggggtgtatattcagcttttcttttgcctctgagaaccatagcaatttcgcttgctagtctacccaggcgtttatcggtggcatctactacataccactcgcgctcaagtttttcttgaggaggaaggtaagttttactactcattgttatttttcctttgtcggttttgagtggttaggagttttaggaggcaggaggcaggaggcagaaggcagaagttcaggatctcagaatttcctgttccctgttccctgttcccttactgaccaaacactaaatatggttgggtgtcgtaccaaatttcctggggaaagggaaaatcaggatatcctacccttaacaagcataagccttgaggtggtgcggcgtatttcactttttcccggttttctgtttgccagatgttggtgaaatcttcgagcgatcgcactcctgatcccacttccaccagcatccctactaataaccgcaccataccgtataaaaaaccatttgcctgaatttcaatatgcagcaatgaaccttttcgataacattctgctgcttgtacttcaacccaggaatgcgatcgcgctgatcctgcacgatgaaaagccgctaaatgatgttttcccagcagaggtttcagggcagcttgaattaaattttcgtccaagggagcataataataatgccaactgaaggagttcacaaacaagtttggtagagcttcagtatagattgtgtatctgtaccgacgatacactgcattaaagcgagcgtgccaacggtcatctacacccgccgaagccctgattaatatatctgggggtaagtaactgttcaaaactgttgcccacttgtgtgcgggtatataacctgtagcatcaaaatgcgcgacttgagcagctgcatgaactccggcatcagttcgccctgcgccgtgaagtgtcacgtgataccccagaacagtagctatagctgtttctatctcttcttggaccgttcgctgcgccttttgccgttgccagccgtgaaaattagtacctagatactgaatgaccaaggctactcgataagttggtgttggctggcggctttctaacatactgggtttggtaaaaggcaagaggcaaaaggcaaaaggcaatagctctataatgtttatatcttccctattccctgttccctattccctatttcctgttccctttgactttaaactaattcaataatcgccatttctgcattatcaccgcgacggggtacggtgtgcagaatgcgagtataaccaccttgacggttagcataccgagtaggtgcttgctcaaacaaagcatgaactagggatttatcgtagatataacccaaagcttcccgacgtgctgccaaagaaccatctttagctagggtgatcatcttttcggcttcactccgcaatactttagcacggattaaagttgtggtaatccgaccatgacggataagctcagtggtgagcgatcgcaataaagcacgacgctggtctgtgggtttaccaagttttttgactttacaacggtgacgcataataatgcacttgaaattattacaaaataaaattagtttggcttagaacctctttcctgcggtaaagtaatgcctaaacgacgctgtaaagcttccactacttcttccgccgacttttgaccaaagtttttgatttccaagaggtcttcttgggtataatccagcaaatctgccacggaattaacttgcgctcgtttgagacagttataagcacggacagacaactgcaattcttcaatgggaatttgagcagttggatcgtctgggatatctgaacccatatctgtaggttctaaggagatatcttttaacgggttaaataaatctaccaaaattcccgccgctgaagatagggcttcttgaggtgaaacgctgccattagtccaaacttctaataacagtcgatctttaagagtaccatcaccacgggcttcttcaacgctataatttacttttcgcaccggcataaataccgagtcaatttgcaaaaagtccagggaagtggcttcttctctaccccgttctacagtacgataacctttacctctttcaatgcgaaattccatttccagtttgccaccttcagccaaagtagctacatactgggtaggatcaatcacatctacttcactaggcaaatcaaaatgtgccgcagtgactgttgcaggaccattaaccaataaccgaccgatctggggttgagaagaatagcttttgaggatcacttccttcatgcgcatgagaatttctagcacatcttccctgacaccaggaactgtggcaaactcatgactaaccccagctattcttactgctgtaactgccgtcccttctaaattggacaacaaaacccgccgcaatgcgttacctacagttgttccttgaccacgttctaagggttcgaggacaaatttactgtaatggctgcgactttcctctgtattagactctacacattcaatttggaactgcgccacggagtagcctccctttcaaggtgctgctatcaggcaattaatttgcctatcaaattcactttatgctctgatctatgactgtggtggatcaaactgccaacatataaaattagtgatagtttggtttgccaattcaatctgcaggcatgttaatattctgtttttctgtttttttgaaagttgagcagccttcccattgggagggctgatatgctttttaatcaccaattgcttctgaagtttactttatatttcccagattgccttggcggtgatttccctgagcatgaactttctgcctgagcgtgtttaacagttaatgcttagtaagcattcagctatcagcggtcagcttcttaacagttacgccaaaaattactatttgatcatctactgatttgtcaaactttttgactcctgtacagacgttccggtggaacgtctctactgactcctgaattctgacagtgtttaaactcgacggcgcttaggtggacggcagccattgtgaggaataggggtaatatcacggattagggtaatttctaatcctgctccttgcaacgcccggatcgcagtttctcgaccggctccaggtccacttaccatcacctcaatttgacgcattccttggtccatagcgcgacggcctgcactttcagcggcggtttgtgctgcgaagggagttcctttttttgcccctttaaatccacttgaaccagcacttgcccaggagatgacatctccattttgatcggtaatggtgacaatgctattgttgaaagtagactgaatgtaggcaatgccgttaggtacgttccgtttctgctttttgctcccggtttttttagttggttgtcttgccatatttgtttggtgaatttaaggtaaaacttgctgccatgagcaagcctagaaagtttatttatttaccaggggctttcttcttaccagccactgtttgtcttctgccgcgtcgggttctggcgttggtgcgggttctttgtcctctgacgggtaagcccatgcgatgacgacggccacgataacagccaatatccactagacgcttgatgctcatcgcctccaaacggcgtaagtcaccttctacctgataattactttctatttcggctctcaaagccgctacatcagcatcactcaggtctttaacgcgggtgtctgggttcacaccagtagccgctaggatttcttgcgaccttgttaacccaattccataaatgtaagttagaccaatctctacgcgcttatcgcggggtaggtctactcccgaaatccttgccacaatgaatgtctccctcttttgttcttgctcgcatttagcagatcgtgataattaatcacattcttggtttttgatggtgattttttgctgcaccaaagctctggtaatcagagttttatccttgacgttgcttgtgtttggggttttcacaaatcaccataacgcgaccacggcgcttgatcacgttgcatttttcacagatttttttgactgaggctctgactttcatgcctgttctaattgactccaaatagtaaattatagcatttctagggaaattatttcagttaagcaaatgggtaaatcccaaattggctgatttatggtaagattctctacatagttttatttcttccgtagtcgataggtgattcggccttttgtcaggtcgtagggagttaactccaccttgacccgatcaccaggtaaaattttgatgtaattacggcgaattttgccagaaatgtgtgctagaacattaaaaccattgtccaagtccacacgaaacattgcattgggcaatgattcggtgacagtcccttccatttcaatcaaatcttgtttagacaaattttttcctcaactcgacaattttctgttccgttgccacaaatgcaatcggtaagaatacacaaattgcgaaatatatcaacagtttattaatatatcttagctaaaaggaattggggactggggattgaggattgggatatttgctcctccctctatttcccctgttcatcccctaaacagctatgaccttttttaattcggcggtaacttcttcttgggactgattaccgttaacagttaaaagtttatggcgatcgccataatatttaatgagtggtgcagtatctcggcgataaacatccagacgatgacgaattacatcttcagcatcatctttacgtcctcgtcccaacaaccgatctataacaatgtcatcgggtgcatccaggttaaccaccttttcctcgtccttctccatttttgccaacagttctcccaagaaaattgcttgggcaactgtgcgaggaaatccatcaagaatccaaccatgttctgcatctggtttttggagtcgttcctcaaccatatcttctacaagtttgtcaggaactaaatcacccttatccatgtattcttgggcttttttccccaaatctgtttggtctgtaatggcttggcgtaaaatgtccccagtggaaatatgaggaatatttaaaaaatcagccaaggctttagcctgagttcctttacccgcacccggtggtcccaagaagattaatcgcgtcactattgtttcaccattccttcatagcgttgagagataacgtaggtctgaatttgccttgccgtatcaattgccacgcccactaaaattaataaagaggtagcacccaaccctctaaaagttggcacgtttaaagtgctttctacagccgtgggaataatagccactaagcccaaaaagagtgcgcctaaaaaagtcaatctgttactgacacgctcaatatactcactggtagccttaccgggacgaataccgggaatactagaacccattttcttcaagttttgcgccacatctactgggttgagaatcaacgaagaatagaaatagctaaagaagataatagaaaccatgtacaccaaagcataaacccaagaaccagaaccactgggactgaggtatgtattgacgatatttgccaagtcagcgtttttagtgaagttggctattagcagtggcaaactgaggatagctgcggcaaaaataatcggcatcacaccgccttgattgaggcgtaaaggaagaaaactcctctgttctgccaaaactcgccgacctacctgacgacgtgcagaaataatgggaattcggcgcattccttcctgcacgaacacaataccgataatggtagctataaaaaccagtacgagaacaatcacacgaccgactatttcccgtccgccaacttgtaccaagtcaatggtatcgcctaaagatttaggtaaagaagcaacaatgttgacaaaaatcaacaaagatgcaccattgccaatacctctttctgtgatcagttccgatgcccacatgacaaacattgaaccagcagtgagagcgatcgccgtttctgccacaaaaactggtccaggattaacggcaaattgttgtaagaacaatgctgaaaaagccgtactttgaacaactgcccaaccaacagtcacatagcgggtaatttgcgatattttccgccgtcctgcctccccttcatttttctgtaagttttctaaagaaggtatggcggcagtcagcaattggatgataatagacgcattgataaagggcaaaatccccagagcaaatacccccagtgtagagagtccccgtcccgaaaatatatccaataaaccgaaaatggaattattgccggatatagcttctgcaaatctctcccgattaattcctggaactggtaaaaagatgcccaggcgaaccaaaattaaaataccgactgtgaccagcagccttcctctcagtccagctgcttgcgccatctgcataaaagtttcttgagccgttggggctttgtctcgactgatcatagagtgctacctttatagttaaccaggcgctggaagcgagttgactagctgggagtgctgtttcctggctcagtctaagacttcacaacttccgccagctgcctcaattttgctacgagcttggcctgtgaaagctgccgcttgcaccttgagcggaatgcccaattccccattacccaagattttcaaggggcctttaacagatgtaagaatcccagcttccttcaaagaagccaaagttacttctgaattagcaggtagggaggccaacttctctacatttatcgtagtgtaaactttacgattaacgacgggaaaccccttgagtttaggtatccgacggtacaacggctgttgaccaccttcaaaacctggtctagtgctactaccggagcgagatttttgaccccgcatacctagacctgcactagcaccttgaccagcagaaatacctctacctacacgcttacggcgtttttttgagcctttttggggcttaacatcgttgagtctcatttggatttgggattttagatttgggattgataatctcgttgtgcttatggattttatatgaaaaatccaatctcaaagcgttactaaatatagagattctctacagcaatacccctatcttcagcgacttccgcgaatgtccgcagtgtagatagagcattaacagcggctctagcattattcagaggattactagagcctaattgtttagcgagaacattacgtacccctgctaactctaatacagtccgtactgcacccccggcgattacaccagtaccgggtgcggctggacgcatgatcactttagcaccaccgccaataccatcaataggatgaggaatagagttagatttggtgataggaatttcaatcagatgttttttgccatctgccacaccttttttaactgccccgatcacatcagaagctttacctactcccacaccaacttgcccgcgttcgttaccaacgatgacaattgcccggaagctaagttttttaccacctttaaccactttgctaacgcgacggatttgaattacccgttcttgccagttggtttcttctttttttgctttacttgctttacgacgacccgttgccataattcatgctctctcaacgttagttgtcattagtcattggtcattagtcattagtcattagttttgcccaacgcctaatgtactattttcaatgactttagaaatctaaacctgcttcgcgtgctgcttcagctagtgctttgatgcgaccatgatagaggttaccaccgcgatcaaaaacgactttggtaatacctttttctaaggaacgcactgctatcaacttaccaacttgcgctgaggcatcacagttagcaccagaagctaagttagatttcaactctggttctacagttgatgctgcgacaatagtttgatgttgtgtatcatcaatgacttgagcataaatatgctcattagaccggaatacagctaatcgtgggcgttcttgggaaccgctaactttaccacgcacgcgccgatgacgacgctgttttgattctctgcgagtgagtttcatatttacttcttacctttaccaccagtcttaccagctttgcgtctgaccacttcaccggagtagcggatacctttacctttgtagggttcaggtggacggacagcacgaattttagctgctgtgttacctaccacttctttgtcatagccactgacgatgacattagtgttattttctacagcaaactgaattccgtctggtggttcaatttgtacctgatggctataaccgatattcaatacaaggttacggccttgaacttgggcgcgataaccaaccccttgaatttccaagcgccgttgaaaaccttgggatactccttcaaccatgttggcaaccagggtacggcttagaccgtgcatttgtctggaagtacgggtttcatcccgacgagttaccaacaaagtttcgccttcctgagaaactatgacattggcgggtagatcacgggaaagttctccctttggaccttttaccactacctttgtgccatctatcgccacttgtactttggcgggaacagtaattggacgtttaccaatacgagacatgacttaattttgtcctttgtcagttatgagttgtgagtacgagaatgagtcgtggttaataaccctgaaaaaattctgaactcctgaactcctgatagcgaagcgtggcgttagccatactcctgatcttcttgattaccaaacgtagcaaagcacttcaccacccaagttctgacgacgcgcttcacggtcggtcataatcccactggatgtagaaataatggcaataccgatgccacctagcactcttggtaattcttttctgttagagtaaacccgcaaaccaggtttacttacacgcttcagtgctgtaattaagggttggcgatttttacctttgtatttcagggaaattactaagttacgcttgaccccttctccggcttctgaaacttcagaaataaagccttcttgttgtagtaccttggcaatactacgagtcatttttgtcgctggcacttgtgttgtttgatgccttgccaggttagcattgcggatgcgcgtcagcatatctgcaattgtgtcgttagccgccatcgttccctctttagatgaacttattgatcgcgaaagggcattcccatttctttaagtaaggcacgaccctcttcgtcgtttttcgctgtggtaatgatagagatatctaaaccacggatttgatcgatgctgtcgtactcgacttctggaaaaattagctgttctcgtacacctagagtatagttacctcgcccatcaaagcttttggggctaacaccacgaaagtcgcggattctaggtaatgcgaggctgatcagacggtcgagaaaggcatacatccgttcgcctctgagagtcaccatgatgccaacaggcataccttgacgaattttgaagccagcaatcgccttttttgctcttgtcactactggtttttgaccagtaatcagggcaatttcgtttaaagatgcttctaatgctttagcattttgagcagcttcacccaaacccctgttaacagtgattttcaccactttaggtacttgatgtacgttagtgtactgaaactgttgggttagtttggggacaattgtctcttgatatacagttttgagtctagttgtcgccatagttatttgtcctgattatccctgggcttggtcagggaattttagattttggattttagattttggattgaatatctttaaatctactcaaatctaaaatctcaacctggttacaggcttatttatctaaaatctcacctgtttttttcaacattctcactttcttcccttcagcggtgaaagtgtagcagacacgactagcgacgttttgcttggtggagtagagcatcacattggaactatgaacaggatactcttggttaacaatctgaccagactcaccttcttgctgaggtttaacgtgcttggtcttaatgttgacacctttaacaataactttgctatcttggggtagtgctttaatcacttctcccactttgcctttatctttaccagctatcacttgtacagtgtcgccggttttgacgtgcattttatgaaagactttaggttttggctttgccattacagcacctccggcgcgagagaaactattttggtaaagtttttatcgcgtaattcccgtgccactggtccaaacacccgtgtacctctgggattgccatctttgttgatgatgactgcggcattatcatcaaaacgaatgctcataccactgtcacgattaatacttttcttggtgcgaacaattactgcttccacaacatcagactttttaacagccatgttggggttagactctttcacaacagcgataattttatcgcctacgccaccatagcgacgattacctgcgcctaatacgcggatgcacatgagttttttggcaccgctattatctgcgacattcagataagtttggggttgaatcacaacttagtctcccggttagagttgttaattttataacaaccatttatgttgtagctttagcgttaaggatttctgtaacttgccaacgcttagttttgctcaggggtcgagtttcctgaatccgcacgcgatcgcccactttgcagttattatcttcatcgtgagccttatagcgccgggtttgaactacgattttgccgtacttggggtgaggagctcggttttctacagcgacaaccacggttttttgcattttatcgctcactaccaagccaactcgttctttgactgccataatctcctactttgcttcttgagtcgattgacttgctgcccgtttccgttctccctctactgtcaacagttgagctaggcgatggcgggcgtgtctaaactggtgaggtttttctagctgtctagtggctttttgcaagcgtaattgaaatagttgtttcttaacagcgactatttcctcagctagtttttcatcacttaattctctagcttctgaaatcttgggaagagccataacctattcttgctcctgtggttgagagcgcacaataaacttagttttgatgggcaacttataagccgccaatctcatagcttcacgagctatttcttcggatacaccagcgatttcaaacaaaatccgacctggtttaactacagctacccaaaattcgggatttcctttaccggaacccatccgggtttctgcaggacgcatggtaacgggtttatctgggaaaatgcgaatccagattttaccaccccggcgaatgtaacgagtcattgcccgacgagaagcttcgatttgccgggaagtaatccaacatggctcttgggcttgcagagcaaaatccccgaagttcagggtactgccacggtgtgctagaccctccatgcgtccgcgttgttgtttgcggaatttcgttcttttaggacttaacatggtttgctaattggtaattggtaatcggtagtcggtgattggtaatcggtaattggtaatcggtaattggctttttactgtcacctgtcacctctcacctgtcacctattacgcttcatttgaacggtcttcaaattgttggcgacggcgtttttggtcacgacgacggggttcgcgctcccttcctgatggttgtggtgcttcttcttgtccagggataatctcgcccttgaatacccaaaccttgatacccaaaattccgtaaattgtttgggctgtgcagtaggaataatcaatgtcagcacgcagtgtatgtaaaggtactctaccttcacgagtccactctgtccgggcaatttccgcaccattgaggcgaccacccacttgaactttaattccttgtactccggctctttgggcgcgttgaatcgcttggcgcactacccgacggaaggaaacacggcgttctaattgttgagcgatgtattcggcaattaaataagcatcagcatcaactttttgcacttccacaacgttaatgcgaatttgccgttgaccacctaacaagtcttggagtccggtacgcagtgattctataccttgtccaccccgacctactaccacacctggtctagctgtccgtaactctaagtcgatttggtcagctttgcgctcaatacgtatttcggaaataccagcgttattttgagcggttcttcccagttttttttctatgtattgacggagtttgtggtcttcttgcagcagtgctggataacggtcaggaactgcgaaccaacgggattgatgttcttgtgtaatacccagacgaaaaccgactggatgaattttctgtcccacaaatgcttcctctaaaatttcttactgtacgcaattagttgtggctgtatgagtgcttatttggctgcttatttagcagcagtagcacctgcaccgacagcaacagtaatatgacaggtcggtttgcggatttgataagctcttccttgcgctctgggttgaaagcgttttaaaactggaccttggtcagcataagcttgagtaattaccaattctgcccgatctaaacctgcattgtgttcagcattagcggccgcacttcttaacacctttaatactggttcacaggcgcggtagggcataaattccaggatgattagtgcttcccgatatgaacgcccccggatttgatccagtacacgacgcactttgtagggagaaatgcggatataacgagcgatcgctttaacttctgtagtatcagttgccataattttctctgttttggtcagtgggaataggagttcaggagtatggcttacgccacgcttcgctatcaggagttcagaattccacgcatcaattattctttaacttccgcattttctctgtcacctgtcacctgtcaccttttaccaaggactatctccccgattttttatcactcttaccatgacctctgtaggtgcgggttggagcaaattctcccaacttatgtcctaccatttgttcgttcacaaatacggggacgtgctgtttaccgttgtgtacagcgatggtatgacccaccataacgggtatgattgttgaagctctcgaccaagttttgatgacttgcttttcgtttttctcgttcagcttttcgattttgctgagtaagtgatcagcaacgaaaggacctttttttaaagaacgacccatagttcaatttttgatttttgattttgcggaaagtcggagcggcggtttccgccgatcagaacttttcaagacggattttggattgataatttcggattttggatgattcaagctacttgtcaagacttctgttattttcataattttgcagatgcccacaagttaactgaatctaaaatccaaaatttaaaatctaaaattctaagactgacgaccgccacgaccccgtttagaggacttacggcgacgacggacaattaatttagtgctggcttttttgcgcttgcgggtcttagcacctaacgctggtttaccccaaggtgtcacaggacctgatctaccaatgggcgctctaccttcaccaccaccatgtgggtggtctactgggttcatgacgctacctctaaccttaggacggcgacctttccagcgattccgtccggctttaccagcactgaggtttctcgcgtcggtgttgcctacttgtccgatggtggcgtaacattctttacgtatcatgcgaacttcaccagaaggtaatttcaatgtcacatagttaccttctttagccacaacttgggctgttgcaccagcagcacggacaatttgaccgcctttacctgctgtcagttctacgttgtgaacgttagtacccaagggaatgttagacagaggcagggcattaccatcttcaaaaggtgcttcagatccagcaataatttttgcgcctactttcaagccattgggatgtaatatataccgcttttcgccatcttcgtactggactaaggcgattcgcgcattccggttaggatcatattcaattgctgtaactgtagctgctatattccgtttatctctcttaaagtcgataatccggtatagtttcttgtgtccgcctccccgacgacggctggttatccgcccttgattattccgtcctttggcacgatgtactgattcagttagtgatttttctggctcagttttggtgatttccgcaaagtcggagattgtaacttggcgagtactgggggtataagggcgataagaacgagtacccataaacgatttgctttgctaattggtaattggtgattggtgattggtgattggtgattggtgattggtaatcaatacctttctcaattcctgatccgccattcgccaatttttaaacatctgggaagagaacttgtctgattttgtcttcgtccccagcggcgacggtaacaatcgcttttttgtactgaggcttgaagccgataaatttacctacacggcgttttttacgtggtggtaaggtggtgttaaccttaaccactttgactgcaaataagtcttcaattgccgctttaatctgtgtcttggttgatttaggagttacttcaaatgtgtatttgttttgctccatgaggatggtcgctttctcggtgagaataggacgacgcaccaagtcgggtaggttgcgggggtcaaagttaggcactgtagacctcctgaatttttgttaaagctgaggatgtaactacaattttgtcggcgtgcagtaaatcaaatacatttaactgatcagctgcaattacttttaaattttctacattgcgggctgataaattcacgttttccgcgatctcagacaaaattaacaaggttttttgctctgggactgctccccaacgggctaatgctgctaccaattctttggtcttggggcgttgtagttcgttgctaaattcttctacaactattaaatcttctgcacgactaacaaaggctgtcctcagtgctaaacgtctttctttacggttgagtttgatgttgaaatctctgggtttaggtccaaagatcacaccaccaccacgccataatggtgaacgaatagaacctgcacgggcgcgaccggtgcctttttgtctccaaggtttgcgtcctccacctcgtacttctgaacgggttttggtgctgactgtaccttggcgagaattagtcatttgtctgacgagggcgcggtgtactatgtgcgccgctgtttcttctttggcaactcgcaactcgaagctggtctgaccaacttcttcgccttgccaatttttaactacactctcaaccatgtttgtgtcctttgttagtggtcagttgccagttaatgctgacagctaatcaactaaaactatttattaccaactttgtttgtgggtactacgttcactaagccgcctggtttgccaggaatcgcgcctttaaccaggatcaggttgcgttctgcatctactttgactacggtcagtttgcgaattgtaacgcgagttccgcctagtctgcctgccatccgttttccaggataaacacgaccaggggttgtacctgcaccgatagaaccgggcgctctatggtttttggaaccgtgtgacattggtccacgtccgaagttgttacgcttctggttgccggcaaaaccgcgaccgatgcttgtaccaattacgtctacaatttgaccttcactaaaaatatctgctttaatttcttgtcctaaagcatattcactggctgtatcagtacgatactcgttcaaatgccgcaatgctggggctgatgattttgccaagtgtcctagtttcggttgattcaatgccttgggtttaacttcgccatagccaacttgaatggcggagtaaccgtcggtctgttttgttttaacttgtgtgacagtgcatggacctgctttgattacggtgacaggaatagctactcctgcttcgtcaaagatttgggtcatgcccagcttggtgccgagaatacctacagacacagtaactggttctccttatctagttgctgacctggaaatcggatttctaagagacaagtttcttaacgtcattgtgaagattctatctccgcaaatttggactggcgtttgacagtgcaaatttttgatgacgcaacaaactttttgtctactgttaggtgaatccgtctattgtttcactttcttgtccaccagaacagtgataattaccttttttatgggaaggtattatttctggtatcaatgcaagacgctattgctttgcgtttttgtgcagcaatgctttcgtctaagccattgctctggcactctccgttggtagtaggacttaaatggatgtttccattcagtatccatttcctgaatactgctgttcaggctctactgcttttaataccttaaactattgtttgaggatttgccttgttttaggggctgcgggagtgaattcggactgaagcttggttgtggctgtgggttatgagcctctagcttcttgttttgacctaaatgctttcctagtttaccagtctcttgctcttttctaccagatattgctggaagattgtttttcagtcatcaatcactgatgctgttttggcttgaggttgctaattgagaaagttatctgattttacagtttggtcacaatctaacaatataatatattaagttgtgtttgtccagtggttgatggggaaaaatttttttcagaggggttgatggtgagtcttgataaaattctataacttaacttaacttaatctaccatccaaaggtaaataatagaaatatctaagtggaataaaacgaaaatctatggcactaattaccactggcaggggtttcatccgggatttggagaaatttggctctttaggtgtatttgttccgttggagggaggccacgaaggtcggtatcgccgtcgtttacgggctgcgggctatgttaacctccatattacagctagaggtttgggagatgtggcagcctatttgatgggagttcatggtgtgagacctccccatctaggtaaaaaaagcactggtagcggtgcagcagtgggtgatgtgtattatctaccacctttgattagttctcatttggaacaactaccacctaagtctaagggtttattgctgtggattattgagggcaatattctttctgatcaggaagtggaatatttagcgaacttgccgaagttagaaccacgggtgaaagtggtaattgaacggggtggcgatcgctatttccgttggacttcactggaaaaaactctgttagctagttagttaatggttaatggtcagtggtcagttgttttttggctgactgctgactctaaatacacttctaggagttcagtgagcgtagtcgaactggtgcaacaggaagaaaaagccaacttttgttagcattagttagcttttttgtatcggagataagaaaccactctctcctcaaaattggcgtgaaggtgatcaagcaaaaatgagacgtaaatcaactgttaggtcagctactactactaaaccctctattttccaatctcctatctttaatttcaccactattgccgttttgggaggggtgttgattttaggtattgggattggtattgcatttagttctacaactactttaactccatccaatgtggcttcccgtgaatttattgatactaaagcaccaaacccggaaatttgtgtgcagtatggagcaagtgcgatggtgatggatgcgagattatttgtcactctgaacccctttaatgtctatgttgcccagccgagtattcgtcctggatgtgtaatccgtcaaaataactgggctattttagaaaataaaagacttgtgacttctgatcaggtgagagagtgtaaaaatcgcctgaatacttttggctttactggtgacttggatagtgagaagccagatattaggtgtatatatcaaaacgaatctgctcagaatttcttcttatctcaaccgggtgctgttgcaccaacgcaggaaacagaaagattctaggagaaggagttcaaggagtcaggaggcagaataattttagattttagattttagattgaagttgacaaaaacaatccaaaatctaaaatcttttcattgtatccccagtcaccagtcaccagtcaccagttagtggttggtatgggttgaccaaattcgataataggaacgctaaaattttgatttgaataattctgtgaattaggaatatttgcagaagaattaggaattgtaatcatattggtgttttctgaagagttggcagaattggcggggatgatggttaagttggataatcgagaggggttttgagaatttaggggtggtgctgtaactaaaggttgttggttggtgggtaagttggtggttggtggtggcagagtcattaaagatgatggagatggttgattgctgttagtggtgttatgatgggagaatatcgggcgtaatacccagcgcgtgggtttttttggggaagcgggttgcagttttactttgctgacatcgacaaaagttcctggttttaagtcaatgactaggcgggtgatgtgtgggctaaattgggaaacgcgaattttctggattgttccagaatagcttttttgggtgttgacattgcctaattgggtgttaggcaaatctacaactagacgggggggttgatccaggtagaaatactctggttttgtatttgcggaaagggtaatttctagctgttgggatttggggttaagttgccatttgttgagtgttacttttgattttggtaaattggcaattgccagattaatgcaagtatttagggttattgttgtagataataacaataagctgatcttcaaaagattggatggtaaaacttgcctggttttgagtagacttttcatattttagatgttgttgatgattggtgattacgaattacgttcgcgcagcgtgccggaggcactattacgaattacgaattatgtattgtttcttggtagctagtttctagtagtagggaactcagatgagaggtaacttgactataacgacgggtgataagtagggaagaacgacattgaatagcaagttcatctgtgtatcttcctaaagtttgtctttcaataccccaagcgcgactagtaccagcaatggttaagtcaatattttctgaggctgcaagtacggctgacatgggttctggatcgctgatggttttgatttctatgcgatcgcgtacattggctggtagttgggaaatcattccgtttaattcataacttaattcatcttgggtttgatttgttgttaagacttgtaaaatctgcaacatacaggtatcacggttgatgagtagtcgcagggcaaggatcagggctaagtcatcatggatatttgcagagtagggaactagcaaattttccaggcgatcgccgcctctatctatgaatactgctacatctactggtgcggtgctgagaatttgtccaactctaccacctaagcgattattactaaaggctggacgatgccatcctacaagtattaagtcaggttgttctatttgggctatttgggctgtttctctggcgacattgctagatatgcgaacgataggatggatataagagcgaatgattggcggttctagagtatcaattaattcttctagttggtgacgacgctcggtaattaagcggttagcttctgtgggtgtattttcaaaaccgtagtcttcctctaattcgattaaactgagaggattgatcacagcaggttgtcgatagttgagggcgatcgctactgctaattgcactaaacctttttgggtgctggggttggctacaggtactaaaatccgatatggagtaacaaaagattctattgtttctattgtgtctattatttctgtgtttgtatttgtctctttttttggttctgattcaacgacatctaatttgattaactgtttgggataggtccattctaataatggtgatgtcataaatgttgttaccaaagccatcactaccaacatggtaaatagcaaaggtgatattactcctaattccaaaccaatatttaaaacaattaattctgttaaaccgcgagtattcattaaccaacccagggctgatgcttctcttttattaatcccactgacacgggcggcgaagtaagcaccaaaatactttcctgctatggctactcctaaaactaatgcacatagtaaccataattgtggactgttgagtaaacctatttgggtttttaaaccactataggcaaaaaacacagggagaagaaaaattaagacgaaatcttcagtttttacggctaattctctgactaattcggcatttttgggcatgactgcacctaataaaaatgcgccgaaaatcaggtgaataccgataaattcagtaatgagagcagatgcaactactcccatataaattaacgctagaagaagttggcttaactttcctgtgcggcgataatgagtaagaagatgtttgagaaaccaccgccctacggtgaacataaagccaatgtagatgatactttcaacaatggtgaggatagctttttgatcgatgctaccattacgagcgactgcgatcgctattgctaaaatacaccacgctgttacatcatcaacggcggcacaagttaaagctaatgttcctaattttgtcccttgtaaattattttcggtaataattctggccaatacaggaaaagctgtgattgacattgctgcacctaaaaataaggcgaaggcggtaaaagatacactagcattagaaatgagtggatacaacagcaaagataaaatcgcagctagagaaaacggcacaattatgctgatattggaaataataatcgctgattttaaattaccgctaagatatttaggatttagctctaaacctatcaaaaacatgaaaaatattagtcctacctgagataaaacattcaggaaaggtacggtttctgctggaaacagtatagctgctgcatggggagcaatgaaacccaataatgatggtcccaacatgataccggcgacaatttcaccgatgactaaaggttgtttaattgatttaaatgccaatcctactaaccttgacattccaattacaattaacacctcaaccagaacgagaataactgtgtgcatagtttcctcttgactcttcggtttccctaagatgattctttaaaggatggcaaaatgtcaaccttgttagacacaatacaggtgtattctattaattttgatgtaaattattgttaagtaagaaaaagctgtcaggagtcaggagtcagtaatgagctatcaatagttaataattaataattagtaattagtaattagtaattagtaattagtaattagtaatcagctaatagcagcattagcaagaattgaaaagttttaatttcgtgaagttttaatttcctaaagttttaattgcgtgcattttatctgcatctgtttcttttcattctttgtatttaaatatttcaggtactgacggaaaccgacgaaaaccgacggctaaatgctgacaaaaaatcaattctttctcctgactcctgactcctgtacgggcgttcgcgaagcgtgctggaagcatcagcattcgggcgaccaattatcaattttatgaaaaggctattttcctgtaagtaagggcgaagcattcaggcgataaattatcaattttatgaaaaggttattttcctgtaagtaagggcgaagcattcaggcgataaattatcaattttatgaaaaggttattttccgaatgcttcgcccctacttcgcccctacgactcctgactccttgttcgcgaagcgtggcgaagccaatctcctgactcctaaattcttgtaaatatgtcgttaaattttgttaagattgagtatggcgttagctttacccttatatcccctatctgagagatatttcatgttgcgactggaacacattagcaaaatttaccctacaggcgaagttttaaaggatatcaactgggaagtgaaaccaggcgatcgcattggtttggttggtgttaacggtgcgggaaagtctacccaactgaaaattatctctggtgaaatagaacccactgctggggaaattatccgccctgctagtttacacatagcttacctaaaccaagaatttgaagttgatccgacgcggacagttaatgaagaattttggacggttttcaaggaagctaacgcagttcagttagctttgcacgaagtacaacgggaaatggaaaccgccaccctagaggaattagataaactgattaataagttagataaattacagcgtcagtttgaagccttggatggttatggtttagatgctcgcattggtaagattttaccggaaatgggctttcaagtagaagatggcgatcgcctagtcagtgctttttctggtggttggcaaatgcggatgagtttaggtaaaattctcctgcaagaaccagatttattactactagacgaaccgacaaaccatttagatttagaaaccattgaatggttagaaaattacctgaaaaaattactgacaccaatggtaatagtttcccatgaccgggaatttttggatcgactttgtactcaaattgtggaaactgaaagaggaatttctagcacttacctgggtaattattcatcatatctgcaacaaaaagcagaaaatgaatctgcacaattgagcgcctttgaacggcaacaaaaggaattagaaaaacaacaagcatttgtggatagattccgcgctagtgcaactcgcagcacccaagcaaaaagccgagaaaagcaattagaaaaagttgaaagaattgaagcaccaaccgcaggagttagaaccttacattttcgctttccccccgcacctcgtagcggtagagaagtagtagaaatcaaagatttaactcatgtttatggagataaaattctgtttttaggtgctaatttgttgattgaaagaggtgatagaatcgcctttttaggtcccaatggtgctggaaaatctacacttttgaaaatgattatgggtgtagaaccatacacagaaggaactgtgaaactaggagatcataatgttatccctggttattttgaacaaaaccaagcggaagcattagatttaaataaaactgtcatggaaaccatacatgatgaagttcccgactggaaaaatgaagaagtccgcactttgttaggaagatttctatttgcgggtgatacagtatttaaacaagtgggtgctttaagtggaggagaaaaagctaggttagcattagcaaaaatgctattaacacctgctaatttaatcattttagatgaacctaccaaccatttagatattcctgctaaggaaatgttggaggaagcattacaaaattatgatggtactgccattgtagtatctcacgaccgttattttatctcccaagttgcaaataaaattgtggaaattcgggacggagaatttcgggtttatttgggagattatcattattatttgcggaagattgaagaggaaaaggaacaagcaaagttagctgcaatagaagcagaaaaagtagcgaagaaagcagcaaaatcagcaaaatccgcagcgaagaagaagtaggtttgtttttaaaaacaagtatttgtgagtccctgactttttgaagttggggattttttgtctgaatcagacaaaataaatcacactgcaaaaaatataacacccctaattacgtaatactgtaaagcagaaataaaataacttatgtaaatttttattgaacatggtataatgatagtataataaattaatatatcttaattttaatgggtcagcatcagaatttagaaaatagtaattgattaattgagctatattattaaaaatggtaaaatcttaataatttcatactcaaattttaattgtaaacatctatatatatatatcattatgaaagcaggaggcaaatattatgttatcaacaaacattgagcaagaatccgtgattaagagagttgagagagtagtatctattttaatggaagagaatcccatatttaaagaagaccttaattatgctgcaatagtgaatgatttagtggaaatttttgaaaaaaccttatcttttgatgaatttaatcatatctcagatgcaagtttaaaaaaacgttgtgatggtattatggctgtgagaattttggcgaaaattggtgaagattttacacccgaacaaatggcaaattttgaagatgcaattaaacgaaaatagagaatattataaaaataatcaaataaaaaatatgaattatttattagatactaatattgtttctttagccctcaaacaaaattctctaattttggaaaagattgtattagctcaagctaaagaagacaatatttttattagttgtattacctattttgaaattagaagaggttttttagcggttgattcgcctaaacaaagagccagatttaacatattctgtcaaaaatatccgataatttttctagatgatttagcgattttagaaaaagctgcggaaattcatgctgatttaagattaaaaggtttaccgattcaaagtgaagatgttttaattgcggctacagcaataattaaaggtttaactgtggtttctaatgatagtgatttaaccagagttgaaggtttaagtttagaaaattggttgtagggataaatgctaggtaataaatgctctgtctcctagtgaaagtgcgttttaacggactcttattcttatgaactcctgaactcctgaacttctgaacttctgaacttctgactcctctctttttcaacttctttcttcaatttgtggttagtagtgatatcattcggttattacaaaaagtaaagggcaattttactatgaccaaagcacctgttgctcctgtggtgctagtcattttagatggatggggctactgtgaggacaagcgaggaaacgcgatcgctgccgctaaaactcccattatggacagtttgtgggcggcctacccccataccctcattcgcacttcaggaaaagccgtagggttgccagaaggtcaaatgggcaactcggaagttggtcatttgaatattggcgctgggcgtgtcgtcccccaagaactggtacgcatctccgatgcggttgaagacggttctctgtccgctaacccagcacttgtaaacatttgccaggaagtgaaatcacgaaatggcaagttacacttgattggactttgttctgacggtggggtacattcccacattacccatctctttgggttactggacctagccaaatcacagcaaatttcagatgtatgtattcacgctatcatggacgggcgtgatactcttcccgcagatggaataaaagccatcgcacaactgcaagattatatagaccgcgtggaaatagggcagatagccactattagcggtcgttattatgcgatggaccgcgatcgccgttgggatcgagtccaacgagcttatgatgtaatgacgcaagaaggcgctggcaacggaaaaacagcgttagaagtcttgcaagcctcttatgctgaaggcgtaaccgacgagtttattgttcccgtcagaattactcctggcgcagttgcacctggcgatggggtgatctttttcaatttccgtcccgaccgcgccagagaattaactcaagcttttgttagtgttcattttcagggttttgagagacagcaaattacacctctgtcttttctgacatttacccaatatgacccagagttaactgtctctgtggcctttactccccagaacttgacgaatattctgggtgaagtgattgcaaatcatggtctaaaacagttccgcacggcagaaacggaaaaatacgctcatgtcacctatttctttaatgggggactagaggacccttatgagggagaagatcgggaactggtcagcagtccaatggtggacacctacgacacagaacccgcaatgtccgcagaggcggtgacaaaggtggcgatcgctgccattgaaaagggtatttactctttagtagtgatgaactacgctaaccccgacatggtaggccacacaggaaaaatagaagctacagtcacagcgattgaaacagttgaccgatgtttaggcagacttatagaaagtgtcggcaaagttggcggtacaatgctaattacagccgatcacggtaacgctgagtatatggcagatgaggatggtaatccttggacggcacatacaactaaccccgttcccttcattttggtagaaggggaaaaggtgaaaatacccggatatggtgcaaatgttgacttgcgacatgatggtaagttagctgatattgcacccactattttggatattttacaaattcctcaaccagaagaaatgactggtaaatctctactaagagccgcagaatatgatttacagctttctcgtactcctgtacaagtaggtttgtaatctatttctcttctttgacagttaactttttacagttaactgttttttagaggtaatgggtaatgggtaattggtaattggtaatattatcccagtcaccaatcaccaatcaccaatcaccaatcatcaaatttttaattaaccgtgttacgttaaataatattcaagatcatctttgggaatttttaattacgtatgtcgattactaacattgtgcaaggaatttgggcattttctgctttaggtttaattgtcctggttttactacatagccctaaaggtgatggtattggtgctattggtggccaagctcaactctttagcagtaccaaaagcgcagaaaatacattaaatcgtgtcacctgggcgttagtagtaatttttctcggtttaacagtggttttaagtgctaactggctacctaaataagtaaaacctagataagtaaaaatgggaaaaatatcccaaaaatcaatatccaaaacccaaaatagaaatcatcatttttttgggtggaaattattaacagttctgactttattcataatttcagggctgttagttattttgacgaattttcatactcatgcccaagaacctaacccccaaccccgttccctagcagagaaggagactataatttcccctttccttgtagcagagaggttaggggaaaagtcaatacaaaaaccccatcctttaccactaagtttagaaaaatggcaagatcaaaataacagtggtgattattttgagcaaattcaacctacaaaatatggttatttaatttggtcacatttcccgattcaagtaaatattgaaactcctacaaatatcaatcaacaacaagcgcaaacatgggtaaatcaagtttcacaagctattaaagagtggaataattttttacctttagaattagtagaaaattcagaaattgctgatattaaagctgatattaaagctgatattaaaattatgcgtcaacgtccacctttacaaataaaccccattagtaaaattccccgtgcgcgttctgcattagcgacatacgagttatataatcaaaataattttttattacaccgttttactattttattaagtcccactcaaacaggggaacatttgcaagcagcagcacgtcatgaaatgggacacgctttaggaatttggggtcatagtcccgtagaaactgacgcactttatttttctcaagttcgtaaccctgtatctatttctagcagagatgtgaatactttaaagaagatttatcaacagtctacaagtttggggtggtcaaatgtggaaaagtaatatagtaggagtcagtggttcgacttacttcgactgcgctcagtacaagtcgctcaccaaccggagtcagaagtcaggagtataagcctattttagtaagactttgatgataaattgatgtcttaactaccctgtgttgggctataagttaatatttgtgaaatatggaagatttataacttctgatagatgtataaaatttaaagttgcaaatttaaagttgcaaattacaacaatgaatgaaactgatttagcttttaccccagctttagagttagcacaattaattcgtcgtcgggaagtttcacctctggaattgacagaactatatttagatagaatttctcgcttcaatccccaattaggaagttattttactgtcacagcagatttagctattgctgacgctaaagcaaaaacagaattactcacaaccgcttcagaattaccgccattttttggtgttcccatttctattaaagatttaaacgccgtagctggtgttacttgcacttacggaaatccagctttcgttaaaaatatctctaactatgatgatggcgtagtgagcaaaattaaacaagccggttttacaattttgggaaaaactgcgacttctgaattaggttcttatccttacagtgaacctacgggttttaccccagctagaaacccttggaatttagaatatactcctgggggttctagtggtggtgctgcggcctctgtgacagcaggattatgtgcgatcgctcaaggttcagatggtggtggttcaattagaggacctgcggcttgttgtggtgtggtgggaattaaaccagcaaggggaagagtcacacaagcaccggtaggcgatcgtatgggaggaattgctgttaatggtcccatagctagaactgtatcagatgcagcagccatgttagatgtaatttctggatatattaccggagatccttattggttgacaaatccagaaccttcatttttagcagcaacccaagtaaaaaaccagaagttaaaaatagcttttagtaccagtattactcccttgggagatgctgacacaaactgcaaacaaggagtattaaaaacagttaaattattagcagaaattggacatgaaatagcagaaaaatgtcctgatatgagtggtttagtagaaccatttcaaatagtatggcaatctggagtagcagcagcaggaatacccccagaagcactgcaaccattgaatcaatttttattatcgagaacaggttctgcgggtgaatatttgcaagcattagcacaaatgcagatagtttcccggcaaatagtcgccttttttgataatattgatgtgttagtattaccggtttatttgcactcacccattaaagttggtgaatgggaaaatttaaccccagaagagatatttcaaaatattatcaaatgggttgcaccttgtccagtagcaaacgcaacaggattacctgcaatagcgattcctgtaggttttgatagtaatggtttacccctgagtgtgcaattaataggtaaacctgcggacgagtctactattattagtttagcagcacaattggaaaccgctaatccttggattcaacatcgtccaaatctctgagttagtgttaataagatggtaatgttgtctgaatcaggatatccatgattttcaggattttcatcaaaaataaatcatgtttttctggaaatcctgttaatttatgattttcactttttacagcaattatgaattacaaattacgaattacgaattacgaattattctgtcgtttatcaacaaccaaaactaaacaaagtgcagcaacagctttttcccattcctgacgaactttgacatcttccacaccatcaaataaactaactaaacgaggaacagctgcttccaaagctgctggtgaaacaggacgatgtaactcaacgaggtgatttaaactttcttgatgatggagaaaattaattacccattttgttgtatgatctggactatcaggaacacgcttaacccctaattcgttttttaaccaattataaaaaggcggtaaatgttcagctaaaacttgtcctgctgtgggtaaagtctcgcgcaatagttgaatatctaaactgtctaattcttgttttagtgcttctgatttcagtacctcatctaaaggtgtagaaagtattgcttctatttctgattgagaaaaatctaaatgctgagtaaaggtagaaattgctgttgacattttccaaacctcccaaaatgattaattaatatctgctgacttttcagaaagtgtgagcagaaatgataaattagattcagcctgtaacgcatgaggggcattagcaggcataaaaataaaaactccaggttcgagtataatttcttctcctgataaagttaataaacctctaccttccaaaacattgacagtagcattgcgtgtagaggtatgttcagaaatttccgtattagctgctagacaaaagagagtatattgacaaactgtatcttttgccagcaccttgcttaaaattccctcacggggatattcaatgtgttcctgtaatcgagtgacagtaggattcatatcaatagcgttgaacctatcaataccatctaataaatgctaacaaaatgaagttggaaatttcccacatcatcacccaaaagagcctcaactatggcaatctgataaacataacccctggcaatctgatattttagctacagaaaatctacctgttgaggctatgcaaaccctaccaccccttgaaactaacaacattacatccagtcaacccgtctttgacaccaccatcaaacgccgcaaaactcgtcctgtgaaagtgggagatgtcaccattggcggaggctaccctgtggtggtacagtcaatgattaacgaagataccctcgatattgatggttctgtagcagctattcgtcgtcttcatgaaattggctgcgaaattgtccgcgttacagttcctagtatggctcatgccaaagccttagcagaaattaaacagaaattaaagcaaacttaccgtgatgttcccattgttgccgacgtacatcacaatggcatgaaaattgccctggaagtagctaaacatatcgaaaaagtacgtatcaatccagggttgtatgtatttgaaaaacccaacaccaaccgcacagaatacacaaaagctgaatttgacgaaattggcgagaaaatccgtgaaaccttagaacccttggtagtttccctaagagatcaaggtaaagctttgcggataggagtcaatcatggttcgttagcagaaagaatgctatttacctatggtgacaccccagaaggaatggtagaatctgccttagaatttatccgcatttgtgaatctttggattttcgcaacatcgttatttcgatgaaagcctcaagagttcccgtcatggtagccgcctataggttaatggccaaacgcatggatgatttaggcatggattatcctttacatctgggtgtaaccgaagccggagatggggaatatggcagaattaaatctactgcgggaatagctacattattagccgatggtattggtgatacaattcgcgcatctttgacagaagcaccagaaaaagaaattcccgtttgttacagcattctgcaagctttaggtttgcggaaaacaatggttgagtatgtcgcttgtccttcttgcggaagaactttatttaacttagaagaagtgttacacaaagtccgggaagcaactaagcacctaacaggtttagatattgctgtcatgggttgcattgtcaatggaccgggagaaatggcggatgctgactatggttatgtaggtaaaaatcctgggtttatttctttataccgtggcagagaagaaatcaaaaaagttccagaagatcaaggtgtagaggaattgatcaatttaattaaagctgatggacgttgggtagatccttaatttggggaatggggagtcgtaggggcgaagcattcggaaaataaccttttcataaaattgagaattggtagcccgaatgcttcgcccgtagaggagtcgggagagaaatatttttcccctatcacccatcacccatcacccatcaccaatcaccaaatcctgtgttagattgggcatactgacaatagattttccctctgacatagatgtcattatggtgattacaaaaagtagacttgttttaggtgctacagcagtgacgctttctacaattgctgttactagtcttggtattaattcccgtggtcaggctttgtttaaagcaagtcccaaggaattggtagacgaagtatggcaaattgtttaccgtcaatatgtagacgggacttttaatcaagtagattggcaagctgttcgtaaagaatatttaagcaagtcctacagtaatcagcaggaagcttatacatccatccgggaaatgctgaaaaagctagaagacccttatacccggtttatggatccagaggaatttaagagtatgcaggttgatacctctggagaattaacaggtattggtatcactatcagtcaggatgaaaaaacaaaggaattagttgtaatttcccctattgaagatacaccagcctttaaagtaggaattttagctaaagatgtcatcttagaaattgatggcaaaagcactaaaggcatggatacaaaccaagctgtatctttgatccggggtgaagcgggaactcaggtcagactgaaaattctgcgaaatggtcagcaaaaaatatttgacatcaccagggcgcgaatcgaaattcatccggttaagtttgctgaaaaaccaagtccagcaggtaatattggctacatccgactgaatcaattcagtgctaatgctggcaaagaaatgagagatgcgattaataagttagaagctaaaaacgtcactggttacgttttggatctgcgtggtaatcctggtggtttattattttccagtatagaaatctcccggatgtggttagataaaggtacgattgtttccactattgatcgtcaaggtgagcaagaacgggaaatagccagaggacgtgctttaactaataaacctttagtagtgttggtggataagggttcagccagtgctagtgaaatcctgtccggtgctttgcaggataataagcgggcgacgatagtaggtacacaaacttttggtaagggtttggtacaatctgtgcgtccgttggaagatggttctggtttagcggtgactattgctaaatatcatactcctagcggtaaagatattaacaagcatggtattgaccctgatatcaaagtagatttaactgatgcccaaagacaagatttgtggttaagggaacgtgagaaattaggtactttagaagatccccaatttgctaaagctttggaaattttaggtaaacaagctgctcaaaatactacaacaactaataagaattaaattgtcaggagtcaggagtcagtaggggtttagcagtgctaaacccgtacaggagtcagggggaaaagtgggcagcttttgatggttttaatgtctattctttggattttcttccccttttgatccctgaatcccttgattcagttttgtatttatatgcttaatggcacgctgcgggaacagcagacgttacttattttgttatttatatagtataaccagttgccaaaaatacgacaagtatgttaatctacttagagtatatttaaacatattatcattactttatactgttaattcctgtactggtgatgaataacagtcatttattgatggggcggatttttgcgcgatgtcctattgtatcaatcctcactgtgccaaacctgctgatcctgcaaatgtcaataaccgctttttaagtaaatttgcggttttgttttgacacattaaaatataaactggtaatcaaaaatagtaaaagaaatcacctatgtttaaccagactaaaaaaactaatcacgtatccagccataaaaactttctaagtagtagaatagctggaaaattaatttctgcattgcttatagcttctccgattgtatttactcaatcggttgctgcttctcccagtcgaacaaaagttgttgcacaaatgacttgtactggtgttgctggtttacctgttatttacccagagtattatggtcgaactcgttctggattagatatatggatatgtgtggaaactggatcaggtcgtcaggcatttcttatggtcaatcctggtccttatgctgtaatcgtatgtaatatgctggaatgtcaagttgttgattggacatactagaatgaccaagttagattgcttgtctgaagttgatcctacaggtaaaatttgggaaaagcatcgagttaatgctgataaaattgctgatttttacgccaaagcggatgatgagacttttaatgattatgcttggcgtttaaaaagctgttctgagtggctagagtttcgcttagtaccagaagaatcagcagacactctcaaattaaaattaactaatgcgcgattttgtcgagtgcgtcactgtccggtttgtcagtggcgacgttctatgatgtggaaagcaaaagcttatcaaattctcccgcaagttgttacagattatcctaaataccgttggttgtttatcactctcacagtcagaaattgccaaattgaagaactcagagaaaccttggacgaaataaacaaagcttttaaacgtttgtcagaattgaaagcatggccagctaaaggttgggtaaagtctgtagaagtcaccaaaggtaaagatggaatatcagcacacccacatatacaccttttagcgatggttaaaccttcatatttcagtcatggctatatttctcaagctaaatgggtatcattatggcagcagtgtttaagggttaattatcagccagtagttgatgtgagagcgatcgcaaaacaccatgatccaaaggtgctaattcctgaaattctgaaatatcaggtaaaagagtctgacttattggatgatagggaatggtttctggagttaacccgtcaactacacaaaactagagcgatcgcagttgggggagtcctcagacattacatgagagaattagaggagaaaaatcaagacctcattggtgacagtgaagagatagatgaggtgacaggtgatagtttatatttcggatggaatagaagattacatcagtacataatagaggaataactaagattagtcaagatagtgactatcgggtaaatgcgggggtttcagccctctgaaaaaggtagctgattttctcagaagatagagattataagcagaaaaacggggattaggatattgagaagcaagataagaatagaaagaaacaggtgcaataaaccagatacgtttagaaccatccctatagatatgttcatcaatgacatgaagtgaaggaagccaagaaagaaaaagaggatgtgtaagaaaggcatgagaaacataaagtctgccaacaggaataccatcaaatttggaataacgggtgaaaatagaaaactcaacaatcattgaaacacctcaaataaacaaaatgatttttaaaatgaaataattttttcttcacaaacaaagaggcgttagccttgtagataaatagaagaagaaagaagatgcggaaaacaaaattgtgggtattggacataaaaaactcccaattacatagtgttgtagtaaatgagagtttaaaattaccttcacttgaaactaataaatattttccaaagaatttcatgaaccaaaaattatctcaccaaattaatggatgatctattgcatttaggaaaatggaaaggcttataatgtaaaattaaggagaagaaagtgaatattcactcacaaataaatgtatatgtaaattcctagtcaaaaaatatcgtgtttgtgttcaaaaatgtatacctaactacgacattacaacggagattttctcatgacactagcatacatcctgacagaaagtgataaagatatagaaattttacagaaattgctaccaaaaaatttaattcaagatattaaatttatagcaggtgcaagttcttacagagcgcgttctttagctagttcactacttgcgactcaaaaaatacctgtttgtcttgttatagatgcagatacaaataaccaatctaaagtatttgaaaagaaagatttaattaattatatgttaagtcaagtatcttcaggtattccttttcaaatctcccttgctactcctgaaatagaaattatatttctccaaaataaaccattaattgaaaaaatcgcccaacgtcaatttaatgacttagaatggcaacttgcccaaagtaaacccaaggaatttttagaaacagtattaggtaaagaaacatcaatcaatgataaaatatttagcaatatcaatgatcaagaaattaagatattacaacaacatccattaatacaagaaataatcaccttcttatcatcacttaccccgtctgttgtggcaattaactaacaattttgtaggttgggttgacgcaagaaaacccaacaataacagactaatttataattaatacttaactagacaataggaagaaactctattctgtcttgatactcattatctagtgatccttcagctatcagtaataattgttcaatattttcaccaacacttaattttggattaagaatgaaaattcctggaatatgatgaccttgagcgatatgatctgttaaatgaacaggcatagatttacgattattagttacgagaacaaagttattttcctcacaccaaatcaaaatttctgggtcaagagttcccttttgtggagtagtcaaatctcccactgctaggataaataaatcagggtttagacggcgtaattgaatggtataaattggattaacattttcatcaatgagataattaagcgccatgactttgcaacaacattttttcagcttttaacttacgtaatttttccacaacagggttaggattgcgacgctgttcttctctcattttatcaccccattccaaccaatcttttatgtattcatctactgattgttgattatgcaaatagtaaagaatcgtcgcataaacctgttctaatgttagtgatgtataggttttagcaatctcttcaggagttttcgcatggaaaagatagtcaaataaaatggtttcaattcccactcttgtacctttgagtctaatatcatcgggagctagaaaattaaagtattcttcaagttgcatagttagttaagtctcaattgctgttactgtatcttaattttattttagaatattatcggttatgttgagtgatactttttaaccataagggtaactatcaagatagaaaaaagaagtcgaggatctgatctttctagaattactcatctacaattataaaactggatctcaccttaaaaaccgcaagatttccgcaatagtaaagagtaaaccccttgacaccacctgaaaaccctgttatgctaatcttgatgaggaagaactatcttctgtgcataagcaattacaagtattttcaaataagtaagggcgaagcattcggaaagaaaatcaatggtttcagggataacttatcccccgaatgcttcgcccctactctgcgtgtctgcgtgagaaaaaatagaaaaaaataggggcagctttcacaaccacccctaaaacaacttgtaacttaacaactactcagcactagctaaagtgggagcagaaaagatttgagaatataaacttgtaggttgttgacgagcgatcacaggcaacacttgacgggcatgagccgcaacttctacagtttttacatcgtatgtttctgtcaccaacttaggatagaaaccaataccgatgataggcagtaacaaacaagcagtgatgaacaactcacggggtttcacatcagcaactacagtatctaaatgtaactcttcactttgcttaccgtagaacacctgacgcaacatagaaagtaaatagacaggtgttaaaatcacacccacagcagataagaaaataactacaaccttgaaactagaactataaacgtcgctagtaccaatacccaagaacaccatcaactcacccacaaaaccactcataccgggtaaagctaaagaagccattgcaccagcagtaaacagagcgaaggttctgggcattaccttagcaataccacccatttggttcatcattaaagtatgggtgcgttcataagtgacaccagacaagaagaataaactagcagcaattaaaccatgagaaaccatctgtaacaccgcaccactaataccaatttcggtataagatgcaatgcctattaacacaaaacccatgtgggcaatagaagagtaagctaaacggcgtttgaggttggtttgagcaaaagcacaacaagcaccgtaaacaatattaactacacctaaaattgctagaactggagcaaaaacagcgtgggcatcacctaacatttccatgttaaagcgaattagggcataaccacccatttttaataacacaccagctaaaatcattgaaccgggtgcagatgcttcaccgtgggcatcaggcaaccaggtatgaaaggggaaaataggtaattttacaccgtaagcaattaagaaacctgcatagagagctaattctaacagttggggatattctttaagtcccaattctgtcatgttaaaggtgaagtgatcaccataaaacgccattgttaaaccagctacgagaataaatatagatgcggctgctgtgtagagaataaatttagtagctgcgtaacggcggtttttgcctccccaaatagaaatcaataaataaactggtactaattcaatttcccacattaagaagaataataacaagtcttgagccaggaatacacctaattgggcgctatacattaccagcattaaggcataaaataaacgcggcttattggttactttccaagccgcgaatatagctaatgtgttaattaaacctgtgagtaatactaagggcattgataaaccatcaattgctaatgcccaatttaaaccaatttgaggtatccaactataggtttctgtgagttgtaaagcggaactttggaaatcgtaaccttgccaaaccgcataaatcattaatgctaaatctgcaaaagctactcctaaaccataccagcgaatggttttaccgtctttgtcgggaatgaggggaatggctaaggatgccactaacggcaaaaaaattatggctgatagccaaggaatttgtatcggattcatcactgttgacaatcaattttgcatttttcttttaattagattatattaagaaatcgttacttttgtaaacacatttcttaacataatttcaatctaggtaataaatagtaataaatagtaataaatacttactaaaattgcctagccgctattctaatcataaatttttgtaacgtcaacaaaaaagcggctaaattggccgccattttcagatataatttttctcctcataaaattttaacagcgatatagactcagcactaactttgacactgagaacaaaaatgactagaacgcccacctagtttaatacgctggatgatattactacaaactttacaaggctctccagcacggttgtaaacccatgcttcaccgccataattgccgttaacacctttaatattaaggaaattactaaaagttgtcccacctgcggcaatactggcggataaaacatcaattatcgctgttcttaaaggtgctatttgttttttatctaagtctgtacagatggtggtaggtaagatgccacttttaaataaagcctcatcagcataaatgttacctaatcctgctactattgactggtctaataaggctgttttaatcggacgacggactttttgcagtttatttgctaaatactcaactgtaaactctggggaaaatgggtctactgctagtttggctaaacctgtaataatactttctacaggtacattcccaggaacataccacatttgcccgaaggtgcgctgatctacaaagcgtaattcttgctgatctccaaaaaataatcttactcttgtatgtttgtgtaagggttcatttcgatttaaccataataattgccctgtcattcgcagatgaacgcctaaccaggaaaaaggggagagttcagctaaaagatatttaccgcgacgatgccaagatgtaatggtactggttttaattttttctataaattcttcaacaaaaaaagggtgggcgatggtgcgtggtagcaacacatcgccccccgtaatttcttgatttagggttaattgatttaaaccccgtcgtactgtttcaacttcaggcagttcaggcattttcagagtaatgattgctgggtgtttagtttagagtcatacctcaaccgtagattaagggcatggaaccagcatatttagtttactgcttttccatgtttttatactcaattctcagcactcaggactcatgactgttgtattgcttactttttagcagcaggtttagctttgggtgcttccacttctactaattcatctaaagcaaagttgttggtgttaacaccagcgtaattaacactggggaaccggacaattacagggtacttaattccgctttgatctacagtagcaacagtacctacttcttgaaaccagtaggactcagggcggagaatacgtactttggaaccacgttgaaccatgattatcttccctttgaatgttcaattgagaataaattagggctatttgatttcactctacaactagaaggtctttactagcgtatttgttaagttatttgtcataagttagggaactggggactggtgactggggactggggactggggactggtgactggggactggtgactggtgactggtgactggtgactggtgactggggaagatgaataacctaattaccaattaccaattacccgaaaaagtatcaaaccctacttgacaaagtacctataatagaataatgtcgttcgcaaacactttttgcgaataaattgcctatgccttttaagctttgcttaacacaaagacactcccctcgttacctctgccaatacgcagatcattgtctagataagtgatgtccaaccatccttgttgttggtcgctgttgatggaaaaatcaaaagcggtaaattttttgcctgattcaatttgttggataaacgttgcaggtgatttgtaggcaattaacctttgtaagccaaaaatagaacgttgaaatttgacttggactcgacgttcggaaacaggttcaaatttagcagctacgctaactaatccttccaaagacggtagtccataaatttcagcaatgttataaacacttttagtttcgactcgaatacattggtaaatttgaccaagtttacaaagagggaaacgatccaggtttaataaggccttgctggtggtgtaaagtaatcgccaatcaccttctagtaaatggctggcttgcattgggcggggtgtggggttaaagtcttctagactggcgatcgctgctaggatagcctgtttttgggtttcagttgccagtaaaccccggtttgtaccagcaattgcatctaaaagcgtattttttgttaccataactcttgacctcaaaatatagctatgaaatcaggattaacaagggttaaatgttatatgtataggctggtgtaatcgtcgaagaatagcttgctgtttggcatagggctattaaataaatttttgtgtttaattcggatagatcaatcaaagagttgaatcattaactaaattatcccgtatcaaatgatagactcttaatgtccagaacttgtacctttttctgtcttcgttgatatgttaaattctcccctaaatgagcaaccccggaaccaaagagctactgtaattcccttgaagcaaaagtcttcgatgttggactggttgcagtctagcggtcgtctcatcgctcgtgactttaacgaatcgactttttcggagcctgaagaagaaatatccgattttttggcgggagaagatggaattggcgaccttgactatgatgatgatggcgatatcagtatagatgaggactagtcttgaggactgtggggactgggtttgataaatagtttcggttttcggttttttaaaagtgtggagtgaagggaaattttttgtggacgctaaattatctccaaaccaaggattaaacatttctggaattgggctggcctctctgttagccctctcgctgactacagctgcattgattttagatgggctaggacatagagtattctggcaagctaattcgctgactatgccgttttttctatgtgctgtaggcgctggtactgctggtttttgggttgtgccgttgctacaagctttgaaaacaggacaaataattcgggaagatggaccgcaagcgcatctgaaaaaagctggtactccgactatgggggggatctttttcatacctgtagctgtaacagttgcttgtattttgtctaattttgctcaggatgtacttgctgtttctgtgttaactctcagctatggcttaataggctggatcgacgattggcaaattttgcatcgaaaatcaaataaaggtatatctccaaagatgaaattggctttgcagattgtttttgcaactggtttctgtgtctggatgatgtttaacagagattttagtataacaaatattgccttgccttgggttggtttatctttgcctctgggtttacttttctggcctgtggctggttttgtgttggttgcagaaagcaatgctactaatttaactgatggtattgatgggttggctgggggaacggtggcgatcgccatttttgctttaggcgctttaattgcacccacttcacctgatttgatgatattctgtgcagctatgagtggtagttgtgtaggctttttagcccataaccgcaacccagcccgtgtttttatgggtgatacaggttctctggctttgggtggtgcgttggctgctgtagcactgcttactaatagtttagtagccttgttcattctcagcggtattttctttgtggaaactctgtctgtgatggcacaagtcagttattacaaagctaccaagggaccagatggaaaaggtaaaaggttatttaaaatggcccctttacaccaccatttagaattatctggttggacagaattgcaagtagttggtgcgttttatatcattgctgcaattttggctactatatgcttgacaagcattaaattttgagatttttaacaaactatccataattcagcctagatccccgactttttttgagcagtcggggatcttgtttttattggttgtttattcagtttgcatttgcttgacaagatgcacgatttctggtaatatcaaagcttccattcctaaacggacagcgttactagaaccaggtagggaaaaaatcagttgatttctataaataccagcaatagcgcgagaagcgatcgctctagaaccgatttcttgataactgagaaaacggaatatttcgccaaaacctggtaaagtcttttctaataaattagcgatcgcatcataagtagtatctctaggtgctattcctgtaccaccattcaaaataattacatctacattctgatttttactgatactttctatatacgcttggattttgtctggttcatctttgattatttgataatctgcaattaaatgatgagcagataataataaatcctgtattaattttccacttttatctgtttctgatgtgcgggtatcgctgacggtaacaactgcacattttactgtgatattttctgtatctggatgtggatgtgatttgatcatatatgaatatagaaaatgcaattactattattaattttgctatagtttactcccttcctacctgaataataccgatttaataaaccacgaaggcacgaagaacacgaaggaagaaggaaggaagaaggaaggaagaaggaagaaggaaggaagaagaaatgttatattttgattatctatatctaagaacaaatacttcagttgtgtttgaattatcgggttagtgtagcttctactactgctaaagttttcattaatttctatccctgtaaaacctcacccacagttaacttaatatcagcaaataaaggtgaagaaatcaccatatcatcagtaaaaatatgctcatcataaaaaccttctacccattctaaaattgttacttttttctgcatgggatcaactatccaatattcagcaataccccgcgctgcatattctgaacgtttataacgataatcacgattttcttggttagaactgactacttcaactactaataaaggaggtggcatatccattaaaattaaagagcgtgtagcgtctttcatttcttctgctaattcttctgaaaatatcactaaatcaggaatacgcacccccaccattttactatttacagctatttctgttttcatactcaagcggtaatagggaatacctaacttagaaaaatagattaataaaaatgtggctatgcgccgatttagttcgctttcaaaaggcataacaattaattctccattttctaattcatataaattatctgtaccgtcatcaaattgtagaaactcttcaaaagtcatttttttagcagttgcaactgtcatgattattactcctagaaactgctgatatttactagatatttactattttaacaacctaattaaatcgggtgatggggtgcaggatgcggagtgcgaagtgtggagtgttgataacccaatcactaatcaccaattaccaatcaccaatcaccactaagtgatttaagatttacttaatcctaaatcattctcttcagcgtaccgattcatgaagcgcataaagcgatcccattcttctggagttttcatcaggtaaaccgcttctactgcttctggtctaccattcacaaatttacccttgacttcacgggtgataatttccccctcttcgtcaatcatatacatccctgtaatttcttctgtactattttcactgaaggcttggggatttacaaaagtaaatgttgctgttccactatcaccactacgtgatcttgttaactttacttctggaactactggttcgtcaatgcctctagaaaattggatttttgccatgatgaatgtttgtttaagttttatgatctttaggttaatattctctcatcatatagcagcgatttggctatcttgattaaatctgtttttcattttgggtgggtgtcgctaaatagcttctttttccaaaattaaagtaactggtccatcattttcaattgcaacttgcatcatcgcgccaaatttaccagtttctacccttaaaccactttcctgtaattttaatacaaagcgattatataaatctactgctaatgtgggtgtagcagaacggtcaaaggaaggacgacgacctttacgacaatcaccgtataatgtaaattgactaattactaataattccccattaatttcttgtacagatttttgccatttatcaccaccttcatcatcgggaaataaacgtaattctaaacatttacgcaccatccaatcaatttcagcagcagtatcagtattggaaatacccacaagtaaatttaaacctcgaccaattttaccaacaatttccccgtctatagttacttgggatgatttaactctttgaacaataacgcgcatattaatttaggagatcgaggagtcaggagtcaggagtcaggagttcataattttcgtcctaatgactaatgacgatacgcagatccccgacttctacgatcaatttacaatttattaaaacactcataaaagaagtcggggatctgatctacctattttccgaaacctttacctttgctaactgaaggtaaacacagacaattttctaattgctgaagtaaagtctcttgatccaaattttgacctatcaaaaccagttgatttttcttttcacctttccactgatcatcatcaatagtgaagcgtttaccgcacaggtggaaaatatgacgttgaggactttcttcaaaccacataatacccttagcgcggaagacatttgtgggtagttggttatctaagaaatattgaaattttctaatcgagaaaggtttatcactttgaaaagatatggatgtaaaaccatcattttctaagtgatcagagtggtgatgatcatggtcgtgatggtcatgtccacaggtagaatgatcatggtcgtgatgttcatgttcgcaggtagaatgatcatgatcgtgattatgatgatcatgttcatcagtttctgaatcaaaatatttatcagattcaaataacccaacactgagaattaaaggaagtggaacttgagaatttttagttctgataattcttgcaccttccttaatatcattaatctttttctctaatgaatttaaagcagcttcatcaactaaatcggttttattgagcagaattacatcaccataagtaatttgactaaatgcagcttgagagttgaataaatccaaactataatttgccgcatctactacagtgacaattgaatctaatcgggttaaatctcgcaattcagatcctaaaaatgtcattgctacaggtaaaggatctgctaaacctgtagtttcaactactagataatctagcttttgttcccgttctaaaacttggtaaacagcatcaactaagtcattattaatggtgcaacaaatacaaccattactaagttccaccatattatcatctgtagaaacaattaattcgttatcaataccaatttcgccaaattcgttaactaaaacagcagtttttacaccttgctgattagtaagaatatgatttagtaaggtagttttaccactgccaagaaaaccagtgataatggtaacaggtaatccctgtttggttgcttccattacgtgagattctgaagtaactgctgatgtcatatttatgaagtagggtttgagtcagaagtgttgaatgttagcgtgatttgcaaaaatcccagtagctgttaattgtcacttgggaagtgtttgttagctagttattttatcatttttttcaatcatttataaattgcttaaggtgatgttttcattgatgcaattctcaatagcaatagttgttgtttgaagatttgcaatatcagaaattatacctaaacctaaatataaagttaaatcattttgatcttgggttaaattacgccaactctgcaaaatttacttgtttagttctgggtaaagctagaatcataagttacctaactctgacaactatattacatgatattactggaaatcaactagagaactatatttagatatcatagatgataagagcgatcgctttttactgtatctgtaacttaatctgtctcacctatccggttactcactacatacgctatcattgctaatcgttagattgccttatcccttatattatgaccctatctatttacaatactctcacccgtcgtcaagaagaatttaaaaccgtcgaacctggtaaggtaaaaatgtattattgcggtgtgacggtttatgattattgccatttgggtcatgctagagcttgtattgtttgggatgtagtgcgtcgctatttacaatttattggttatgatgtgcggtatatccagaatttcacggatattgatgataaaattcttaaccgcgcacgggaagaaaaatcaacaatggaagcggtctcagaacgctatatccaggcatattttgaagatatgggacgtttggggataaaagaagcagatgaatatcctcgtgcaactcataccatgaatggtatccaaagattaattcatgatttagaaaccaagggttttgcttatcctgctgatggtgatgtttattatgcggtgcgaaagtttgatcagtacggtaaactttcaggacggaaattagaagatttacaagcaggtgcaagcgaaagagtaaacgtagaagatccagaatatcagaaaaagaaagatccctttgattttgccttgtggaaagctgcaaaaccttccgaacctgcgtgggagtcaccttggggaaaaggccgccccggatggcacatagaatgttctgcaatggtgcgcgatcgcttgggtgataccatagatattcatgctggtggtgctgacttaattttcccacaccatgaaaacgaaattgcccaatcagaagcagtaaccggtaaacctttagctaactattggttacacaatggcatggttaaagttgatggtgaaaaaatgtctaaatctttaggcaattttaccacaatccgcgatttattagatcgtggagttgacccaatggcattaagattatttgtgttaatggcacaatatcgtaaacccattgatttcacagatgaagcaattttagcagcaacaaacggctggcatactattaaggaaggtctgctttttggacatcaacacggtgaaaagttaggttgggaaaatctggaactaaataacgccaacattgataaatcagaaggtgaaaaatttactaatgcagtggatgatgattttaattttcctggtgggttagcggttatttttgaattagctaaagaactgagaaaagaaggaaatatcattgttcatcaaggaaaaacagaaactcccgccgatgaattatttaaacaatggcaaaccttaactacattagcagaagttttaggtttaaccgccgaaccagaagcagaaaaaacaaaaactaatggtttaagtgatgcagaaattgaggaattaattcaaaaaagacaggaagcaagaaaagccaaaaactttgccgaatctgatagaatcagagatgaactcaaagcccaaggaattgaattaattgatagcaaagaaggtacacgctggcaacggagaaattaaaaattaaaaattaacaaagcatcgtcatctgagttgtgaacatgattttttaaacgaaccgctccagacgcagaggacacagaggtaaagacaaaaaagatgattgaatcttactcatttctcattctaatattccccctattcttctcttcttccttcgtgttctttgcgtcctactctgcgggaacagcttcgctgaacgtggttcattctcttgaaaaattattcacaactaaccaatatctcagaaactcttttcctctgtgtcctctgtggtttattattctttacaccatatataacttataatgtaaaaacagatttttaactttgaattttttaattttcaatttaacctatgtggaaagaactaacaaccgccatatctaattttaacattcctgctgattggatcggtattcgtgcagtcaaagaaacaaccagaacccattttgtcagagatggtttaccccaaagcaacggtaaatcattaacaatgggagcaatgatagaagtgatggttaatggtagtttgggttatgctgctaccaactctttaacattatcatcattgcaaaatgccgcagaaatagcttataaacaagcagttgcagcaagtgaattttggatatatccctttagtaaaaatacccgtcccaaagtcgtcggtgaatataactcacccttttttaaaccattaaattctatcagtccaaaggaaataaatgatttattaatgagaatttgtcacagcttaaaaattagtgataaaattgtcaaaaccgtagccaatattaacacatctgaaaaagaaacttggtttgttagcagtaacagttcagaagtttatcaaaaaatcatttctttaggaaaccattttggtgttattgcccaagatggtaatattgtgcaacaacgtagtaataacggaatgcacgctaattgttatcaaggtggatgggaactattaaaacaagataatttatggcatcgagtccaacaaattgctgaacaaggattagaattattaacagcagcagaatgtccaaatacacgcactaatttagttttagcaccagatcaaatgatgctgcaaattcatgaaagtgtgggacatcctttagaaattgaccgcattttaggagatgagcgcaactacgctggtggtagttttgtgaaacccgaagattttggtaaattagcatacggttcacctttaatgaatattacttttgatcctaccgttgaaggtgaatttgccagttatagttttgatgatactggagcaaaagccaccagagaatatatcattaaagatggcattttacaaagaggtttaggcagtttagaaagtcaaaatcgttctggtttgccaggggtagcttgtgcgcgtgctacttcttggaatcgtccacccattgatagaatggctaacttaaatttagaaccaaatttagaaccaggaaacgcaaatttttccgaaatgatagcggatatagaacatggtgtttacatggagtctaaccgttcttggtcaattgatgatagaagacataaatttcaatttggttgtgaatatgccaaattaattgaaaacggtaaactcactaaaaccttgcgtaatcctaattatagagctactacgcccgaattttggcacagtttaattaaagttggtaatgatgcaaattggcaaatgtacggtacaccattctgtggaaaaggagaacctaatcaaactatttgggtaggacatggttcacctgtttgtgtatttgcaaatgtagaagtttttggtggtggttagagaccgattaaataagatccccgactttttatttacttaatttttacaacttataagttaatattagaagtcggggatctgcaacaacaccagatcattatattctttgtaaaatatccgcaatagttaattttaactctggaaatagtggggatacaatcaaattatctcctctaaattgattaactagatattctccatcaattaaagtatgaactgaaatcgtgggttgtttaggattaccaataaaccttctaccaccgaaagcagcataatcaacaatccaatattcaggaatacccattaattcatattcattagttttagtcgaataatctgtttgccaattactactaacaatttctattactaaaggaacagaagcagcttgagtaattgttgattcttttttccacagaggttcattaactaagttttcaggatttagtaataaaatatctggataaaaagccgattcagaacttgatgatttaatcaatgttgttttaggtatgagataaggaagatcaagtttatctaattctgctgataatttacggactaaaaaaccaataactaattcatgatctcctaatggtgggttcatatcaacaattactccattatgtaattcatagcgtaatcctgtatctggataccattcgataaattcctcaaaggttactggtttaattattgtttgaaccatgattcacctcttgaataattattattatcatattattattttatctcatttcccaaggttttgtttgtgtggatgtaatttacaatcttctcattatcttgaattgctgtttctatttcctcaatttgtttcagtgatcttggttatttattcccaagtcgttgtttacacaactttaattatctacataatatttcaaaataagtattatctttttataaaaaagacacaaaaaattaaaatttaaacctgtttcaatcttgacacaggttattactatgtataagatataaaggtatgtttaaacagtaaaaaataaaactaacagttaaaactatatgagtaatcaagtatataaggtatttgaagaaatcgagtttaaagccaaactactcgcacaatactggaataactttcatacggaaatatctcagcatttaccagagagttatcaaccggaaatacaagaactgtcagataaattagaaacagcattaactcaactcgtttacgaattacaaaatcctacccttactcttgctacaacgggaactaccagtagtggtaaaagcaccctggtaaatttattatgtggtgcagaaattgttcccgttgcagttagtgaaatgagtgcaggagcagtgacaattgaatatagtaaagaaaaatctctgatcattcatgaaacaccaggtgctttgtgggagtgtggagaatggaaaggaattagtgaagaaaaaatttatcaattgctttatcaagcgatgataagttatatcgaaaatcgagaaacacaacctaatttagcctgtccacaatctactattttttatcctttccgactattaaaagaatctcaattacaattaccacaaggaacaaaagttagaattcttgatttacctgggttagcttatgtgggtgatcaaggtaatgcgaatgtgattaaacaatgtcgagaggctttatgtatagttacttataacagtgcagaaaccgattctcaaaaagtcaaaagtttattatggggaagtagtcaagtaaaagccagattaattgaaaattcagaagactattttttatccaaattagaaaatagtttaagtgtgttatttttacgttttgcgcggccagtagcagaagcattaattcgcagaccagttaatagtgatactcgcaataaaatcatcaaaaatttgggagtagatattgaaattgtagataactattacacaggagaagaacaggcttatagtgttctcaaaagatatataaaatatggttctgatttactttttaacccagaaattcgccaacaaatattaggagtaacagaagttgtcgcgcaaatagcaatggatgttgttagtgaactgatacctgcacaacaagctgtagtttttgaagtagaaaatgatattaatgcttttgctgaatatttgcgttatgcaatttttgacgctgcgggttttgagtcttattatcgtcaagaactccagaatttagttgatagttttagagagaaagaaggaacttggactggtgtagcattaaatgaatggttacaaggaaatccacttttattagcggaaataccaaataatttaaaatctcaaacatctaatttagaagttagtgataaatgacgacaattatctattgcactaaaaagtaatcatttatggtaggaataattcatgaattgtctctaaaacggtttcagattatgcaaattgaattaccaccaaatgtataatcaatgctacaatcaaccaataactacttgatgctatatcaatatgatgattgcacaagacttagaacaaacaaaagacatctccccagaggtcacatttccccctagtgatttatatagtgatgaaccaccagtggaaacagaactgcacactagaagaaaccgcagaagaggaaactaagaaagcagtaaaatcagagaaaagagcaaaccaagaagctaaacgagcagcacaagcagacgcaagagcagaacgtttagcggcaaaattgcgagaattaaatattgatactgagaacatttaaagcgacttttaaaaaaatgaaaatgcaaattgaagaattatcaatcttagaaagtaactttaatcaactgatagaaatgctgcttgcaaaaaaagcagatagcgaacattttaccgtcagacttaacagcgaaagaagtcaatttacccgttttaatcatgctaaagttagacaaacaggactagttgctgatggttcaattaccctaactttaatggaaaatcagcgcagtagtttctgtaaatttccttttactggtaactgggatatagattggcaaacagcataccaagctttacaagatttacgagaagaattacatctattacctgttgatccctatttggttttacctacaggaaataatgttagtagagaagtacatacaggtaaattattagcaccggaaaatgtggttaattctattttagaatcggttgctaatttagattttactggtatttatgctgggggagtgattattagaggttatggtgattctaatgggcaaaaacactggttcgcaactgattcttttaatttagattattctttaattatcaaatcaggaaaagcggtaaaaggtacttttgctggtagtgcatgggatgaagctgcttatgtagataagataaatgatgggaaaaaacaattagctttattgtctcgtcaacccaaagaactacccagaggaaattataaaacctattttgctcctgctgcggtagcagaattattgggaatgctttcttggggtgctattagtgaagcttctatccaacagggaaatagtgctttagctgctttatcacgtcaggaaaaacaactttcatctaaattcgttttaaaagaaaatttcacatctggtttagttcccagatttaataatttaggagaaatatcaccagaggaattaactttaatagaaaatggtgttttggtaaatagtttagttaattctcgcacagctaaggaatataataaacctgccaatggtgctaatagttcagaaactttacgttctcctgaaataaagacaggtgatttagcttttgctgatattttacgcagtttagatactgggttgtatgtttctaatttgcattatttaaattggagcgatcgccaaactgctagaattacaggtatgactcgttatgcctgtttttgggtagaaaacggagaaatagttgcacctatagaaaacctccgttttgatgaaagtctttatcgctgttggggatcagaaaatttagttgacttaaccaactttcaagaatttattcccgaagtcggtacttatgaaagtcgtcaattaggtggtactttagttccaggaatgctggtggaagatttcacatatagttactaaaaatttagattttagattttagattagagttgacaaaaacaatccaaaatccaaaatccaaaatccaaaatcaatcactcctgactcctgactccttttatacctggttattgtgaaaaatgttgttttcttaataagctaaagtttctaaagtttctcgtaaataccgttgtacttgctgttctaggcgcaaaccctttaactgagcattactttctagttgccagcgttggaaaccggaactagcagaaatggcatacttcaggttttgccaaatgtgagcatcacgagaaagctggccggtgatagaagctgaaatttgagccatagttcctcattcctcgtttttcaattttagagtcaaacaattttagattttagacttgaaatggattattgttttgcctagaacgacaacaaagaaaccaaataagctaaatctaacattttttaaatggggcaggaggtgatccatacctaccccgaaaattttgcaatcttatttaatcttttctcaagataacggttacacagcaacaaattctgtgtgattgatcactaaaactaaggatattttcggtaaaattctgccaaataagctttttaaattaaccaaaagatttttaactaagtaagtgggcgttgaaatttatcgttgtggcaaggcaagaggcaagaggcttttagcgattttacattttgtaatatacctcagttttttttatggcaacttacttatgggttttaagctgttttatctgtgtgatagatagttatttttttcttttatctcttcgctctcacctgtcacctgtcacctgtcacctgccacctgctatatgagtgctgagatttatgtatgtgaatgttgaaataaaacctatatccattcaacactcatcaatttactcagcactcaaaagttggtactcaagactacttagttaaggtcagggtacggcgtttagttaccatttggtaagcttcgatgatatcattttcagcccagtcatggaacttatcaataccaataccacattcataaccagagttgacctcgcgcacatcttctttcatccgtttgagggaatcaagaacaccttcgtagatcaccttactgccgcgacgaactcgcactttacagttacgaaccagttttccagattgtacataacaaccagcaactgcgccacgaccgactgggaagacagcacggacttctgtttgtcctaaaggttcttccactaactctggttctagtagaccttccaaagctccttggatatcttctagtagtttgtagatgatgttgtattcccgcacatccacacctgcttcatcggcagcttgtctagcaccactagcataagtagtgttgaagccaatgatgacagcgttacttgccgcagctaagtcgatatctgtttctgtaatttctcccgcagtagccaataacatccgaatttgtacttcgttttgaggtatttgcttgagagagccgataatagcttctacagaaccttggacatcgcctttgagtatcaagttgagttctttcaactcgccttcttgagcttgagccgatagggttgtgagggtaactcttccttgtaacaaacgagattgacgttgtttgtcggctcgatcagcagcgatcgctcgtgcttgtttttcattctcgaacacttcaaactcatcacctgctgcgggtacatcgcttaagcctagtacctcaaccgcacaggagggagtagcagcttctacacgcttacctcgatcatctaccattgcccggactttaccaaatgccgatcccgcaactagcatatctcccacttggagagtaccgttttgaatcaacaaggtagcaaccgcacccttagctttatctaagtgagcttctatgactgttcccttagccacacgattggggttagcggaaagttctccaacttctgccaccaagagaaccatttctagcagtgtatccaggttttcgcccctgatcgcactcacaggaaccataattgtctcaccaccccagtcttctgcggttaaaccataattggtcagttcttgtttaacccgctctggttgtgcgccttctttgtcaatcttgttaatagcgacaacaatcggtacacctgcggcttgagcatggctaatcgcttccactgtttgcggacgtacaccgtcatctgcggctacaaccaaaatcgcaatatctgtcacccgcgcacctctagcccgcattgctgtgaaagcttcgtgaccaggagtatctaggaagacaatctgttgttgcttaccatcatgttctacatcaacatggtatgcgccgatatgctgggtaataccacctgcttcacccgccgccactttagttttgcggatggagtccagtagagtagttttaccgtggtctacgtgacccataattgtcaccacgggaggacgacgaatcagatgctccagatcctcaatgtcaatcatttctgtgactttgcgggcttctgcttctggttcagccgtttccacttctacctctagttctttagctactagggtaatggtgggaatatccagattttgggtgatacttaccgccatgcctttcataaacaggattttcacaatctctgtatcggcaatgaccaaagcatccgccaactcttgtactgtcattggtcctgtgacaaccagtttttctggacgctcacgcttaacttctacttcctgctgacggcgattttggtcgcgttgggaaccaggctttttgtttttcgtgggtgcagatgtaaccaatgttggttgctgtgcaggtcgagcagccttgggcttgggtggacgagctatagacaggctgacttggactgcggctggaatttccagaccttcttcatccagtaagtcgtcttcttcaaaatcatcatcgaggatgggtttagctcgcttgcctttaggtccaaccttggctttctctttgatttcgtcaattatttcttcttcttgccacttcttcccacctttagataggcgtggtggtgttggccgtttcaaatccagcaaagctggtgcgatcggctcatccaccaatgcctcttttttacctcctccagacattggtttgggtggagtggctacaggcatggcggctacaggttcagcaggacgtgttggcctgctgggtcgttgcacctcagttgatggtgtgggtgcagatttacttcccctgtgttctggtttcacaggtgatggagttgagcgaccctgtttttgtggtgtctgctctgctgttcctttgttgcccctgggttttgagtgttctctttcctcttcacgccgttgctgacgatcgcgtttgagaattggtttttccgcaggagatagctgttctgtggcagaagctttttcttccacaggccttgctggtggagcaaccagttgcggtttttggggtttttccggtttgggtcgatgaccagccggtttttctggtttttccgcttttattttttctggggctgcttggacattgggtttatgatctgtttctgccacaggtttctgtggtgtctcagattgattccggggtacaggtcgagttggtgccgtcggtttcatgggtgagactggtgtagcgaaaggccgtggaggtgatggagaattagctgtaacttcgccatgtacactatcagacgaagcaacttggctattggtagcaactgacgcttctgaggcgttggaggtagtgtttctcaagattttgggtttgcgaatttccaaaatttgttgtttatggggtgcagcaggtcggtttcgggagccagttttttgtgaatttggtttatggctgtttgtacctaattcctttttgggcgtgacactcgtggctgggagtttttccgcagcctgtcgaatttgttctgcctctgtttctgaaatcgtgctgctatggcttttgaccgcgatgttgagctggtcgcaaattgctaatagctctttgttatccaaattcaattcctttgataattcgtagattctaactttgccgttgttcatccactctttcccctttaatttacagttttaacggatggttgcctggtttgcgacatctccatcctttgatcactgttttttaggttgcccttggtgatgttgccggtgcctccaataattaggaaagagagatgtttcggtttaatactggcatccccaccgggaatgatggttgactggaccccataaaatttttctcaataaaaaatttttttgggcatccttgatgccgaactgcgctttaacgctaccaggttgccattttttaggtttttgttttgctgattctgagtcttccacaacacaatcgagtaaaacttgttgggagtattgcttcgtctctctccatttttagagagccacttgccttttacacccatttactattttggcactaatccgatacaaaaagctaactaatgctaacaagctttgatgcttttccttcctgcttcatcagtttcgactactctcactgaactcctagaagtgtcggcactatctagtctacaggctttcagattgggtctatctcaccctactattaagtatttaggcttggttctcacctaaaatacctatcaataatagcattttcttgtttgccctgtctgctgactctcaggctacaggatctttagtattctcaattctcaagtttttttgtcaatgagtagacataaatcttgatcaaatgtgagcatttgttagctttttttaggaaaacactaactagcttttaacctttgtctgacacagcctctctggtattttaacctttgatctggccggaaatcaggcagtagactaccttgggcaaaccagaatatttagtttaattaaatttgatttgggggattgcgttcactaagtcgctgccacaatgtttgatacagtgtttctggcactgttccatgtagcgatcgccctaatctattttttttctgtgctgcttgtaggcagtcagcttgcgggcaaatataggcagaacgccccatgccctgatctaattgtaccttcctagatggaaagacgcggacaatccgccaaaactcttgtttttgtcctacccggcgacaactaatacaacgccgatagtttggtttcatcgggtttttgttcagtcatgtgagcagtttttacttgcttgagatacttacctcagatttgtttttgttaattttcacacttgccaaatgtcttctagtttaccgtgaactgttgatagtgaacagactattgtcaaaaaacatttgagaattaatctgtctcttcctcgttagtttcaaaattatcattctctaattctaatttgtcctgatattcatcttctagttgttccatctcggtttcatcattttctgcctgatattttgctctcacagctgcaaatttcgcatcttctgcggcatagtcatatttagcttgatctttaatgtcaattttccagcctgtcagtctggcagctaatctcacgttttgtccttctttcccaatagctaaactcagttgatcttctgctactaaaacgtgggtttgccgactttcgggatccattaagcgcacttcatcaactctggccggactcaaggcattggcaatgtaagttgctggatctggagaccagcgaattacatctattttttcaccccgcaattcattgactaccacttgaatgcgtgatcccctcgcgccaatacaagctccaactgggtctacatctcgatcaagtgtatctactgctattttagtccgtggaccgacataacgggaaggaggatttgcttctctagctactgccactattcgcactacttcgtcttcaatttctgggacttcgttggcaaataaataaactactaacccagcatcagcacgagatactaataactgtggacccctttgttgtccttgggaaactttttttagatataccttaaaggtggtattggaacggtatgtatcattgggtagttgttccctttttggtaattctgcttctacttctggctgaccaaaaccgctgctaactgccaaaattactgattgtctttcaaatcttaaaactcttgcttgtaaaacggtactttctaaatcttgaaattcttcttgcaccatttgacgttgttgatcccgcaatttctgtgccagcacttgtttagtttgcatggctgccatgcgtccaaattctccttgatccggggtgacatctaagaccacagaatcacctgattgagcttctggcgcaacttgttgtacttcatctaaggaaatttgatgatctgtattagtaacttcttcgactattgttttggtagaaagaactcgaaatccttctccttcaatatcaagttctacttcaaaattatcaaaataattttcatcaaattgtcggcgctctaaattttgggcgcggcgataacgttcgtaacctttaagtaatgcttctctaatagatgattgcactgctaaacgtggtaaatttcgctcgcggctaatgctttcaattaaatcttttaatccaggtaaagtaaccattgacataagcaacatctccttaatttttaaatttttatgtcagcaaccagcaattttttgtattttaaatctgggattttagatttgtatctaaaaccctgaatctaaaaccctgcatctaaaatctcaattttagttaactgccctcatcgagttgcaccctggtaacgagggaacggggtatctgtactacacgacctttttggtttaagtaaatttttgtttcatcccggcgcatcaagttaccaatccactcttgttttccttcgtagggttcagaagtggagatcaccacgggaaatcctttaaaggaaataaactccctgtctgtgttcaattgtcgggaaattccaggactggagacttccaatacgtaagcatctggaatcatctctgtcgcgtctaaggaggcttctaaagcacggctcattcgttcgcaatcgtctaaaccagtatcctgttgagggttacggatatctacccgcaaaactggtggacgttggttggtatgaaaaactatgccaactacttccaaacccagttcttctgctactggtttcgccaattcaataatttgtggaactaaaggatgagtcatgggaaaattcaataaaaaaagtgggcttctacccacttccggcgatagggatatcttccaagaagtcttgtgacgaacctgtattggttcgcccctaacatgagtgtagcgtatttttttcgttagtcattagtgattggtgactggtaattggtgattgggttattaatttacctatacacctatatacacaacacctgtacacttttatgctataaagctattatcaataactgtgggaacagtagcttgcgatcgcatccttcttgtttgttcgataatttgctcaatatcttcttgggatagacgttgaacataattaattttcacttcttctaaaaagtcattgagcaaactttgaatttctgaaattacgtgtttttcctggatctctgcacctaaaaccgtagtaaatttttccactaactgactagaaagttgggctgccactggatctttaaaggcgctaaccaaggcaatatataggtttgtggtgatttgattggccaattgttcacttagctgattttgtgcctgtcctactcctggcagcatgagcaggttacgataaacaggtacttgcctaaaagcaagttcgatattgtgccgcaaaatggcattcatttctggttgtatttttggtaagacttgagtaacgatggtttgtattaacagtcctgaaagtgcttctacttcgttaacattattaatatcaatgtaggcacgctctttttccggttgtaataaccacctagtaatatcaccgcgctgtattgaaacctgcatttggttaattacccgcactaccacaatttctgtgatttcttcggcaaaattggctactataccttggtgaatttgccttctcactaaatgtagatcaattaacccggcttgatctagacgaactaatactggcaaaactcgcaaccaacgccaaaagggaattactaaaaataggtcataccaacgccataaaatcgcttctaaccagcttaaatggcgattttgacgttttatataaaaagtacgtaatagcaattctaagccaaatatcacgacaaacggtaaatcaattaaccaaaaatcatctataaattcgccattttcgcctatttggcgataataattagaggcaatgcctggacgaatttgctggttaaaaaaattaatttcttgtatccaaccccgtttagataaatattctacactccaaaaagtagcaaaggcgcgtttggctgattcttgaccaatgtgttcccgcatccggtttttaattttttccagagttccacttttacccgcacctgcaaaggggttactatcaatcatctcgttgctgagacggctgatttctgctaacttggtttttacttgaggggagtttaaaccggtttggctaacctgtgcttctaaagctgctactgtttctagataatttttcgtgtctcgatggggttcaatacctttaatgggatcgtaaatttgggtaatctggggaagttggcgaaaatagaaatcccgccaaggtacgtaactcaagtcaaataacactaaccctaagttaacactggctgcgatcgccattaacttttccaaccatagattagcttgttttcgaggttttaatttattcattattagttaatttctatactcgatattaagtctttctcttctttagtttaagatattgtttaattatttacctcatatctctggtttttacagcagttttcatgtctttagaccatagtaagggcgaagcattcggatgatagtcttaggtaaaaaccgataattaattgtccgaatgctgatgcttccagcacgcttcgcgaacgcccctacattgttgacgcgaaacctaaatcaaaatgtggtttatttacctgaaaatagctgtaatccgatgattagccgtgacattccaacaattgaaattaccacatttccactaaaaatcaaacaataacacataggaaaaatctgtttatatgtcaaacgtaccaaaaaatgatctgccaactttattagttacaggtggtgcaggatttataggggctacctttgttctccaagctagaaaaaatcagtgggctaatatcattaatttagataaacttacttatgctagtaatctacaaaatttagctgaattacaagatgatcccaattatgcttttattcaaggagatattggtaactttgaattagtcagttatttgttagaaaaatatcaaccagatgcagtaattaactttgcggcagaaactcatgtagatcgttctattttaacacccattaactttatccaaactaatgtattaggaacgtttcatttattagaagcaagtaaattttattggcaaaaactcaaatcagaaaaacaagaaaaattccgatttttgcatatatctaccgatgaagtttatggttctttaaatccagaagatccaggttttaaagaagatacaccttatgcaccaaatagcccttatgcagcttctaaagctagtgcagatcatttagttagatcctactatcacacctataatttacctactttaactactaattgttctaataattatggaccgttacagtttcctgaaaaactgattcctttaatgattctcaatgctgtaaatggtaaaccattacctatctatggtgacggtcaaaatattagagattggctatatgtaagtgatcattgtgatgctatttatctggttgtaaaggaaggtaaaattggcgaaagttataatgttgggggattgaatgaacaaactaacttagtagttgtgaataaaatttgtgaaattttggatacgttagcacccaaagagaattttcaatattcatctttaattacctttattaaagatcgtcctggacatgatcgccgctatgcaattgattgtagtaaaatcaccaaagaattaggatggcaacccaaggaaaattttgatagtggtttgttaaaaactgtgcaatggtatcttgataattctgcttgggtagaatctatttttacaggagaatataaaaactggattcagaaaaattacgaaagtcgttaaaggagtaggggtaattcatgaattacccctacttccgttttattttgcgtaagtcctggatttatttaggatttatttagtaataattaattcgctgtataaggatggtaaaatgaagggtattattctcgcaggtggttcgggtacaagactttatccattaacacaagttgtgagtaaacaattaatgtcggtttatgataaaccgatgatttattatcctttatcggtgttgatgttagcgggaattagagaaattttgattatttccacacccacagatttacctctttttcaaagattgctaaaagatggtagtcaatggggtttaaagtttagttatgtagaacaaccaaaaccagaaggtttagcacaagcttttattttgggaaaagattttatcaaaaatgattcagtatgtttaattttaggagataatattttttatggtcatggtttcacagaagttttaacccgtgctgctcaattgcaaaatggaggtttagtttttggttataaagtcactcaccctgaaagttatggtgtgattgaatttgatagtacaggtaaagcaattagtattgaagaaaaaccaaaaagtcctaaatcaaaatatgcagtaccgggaatttatttttatgattcccaagttacagaaatagctgttagtttgaaaccttctgcacggggtgagctagaaattactgatgtgaatttagcttatttaaagcaagatcaattaaaggtagaaattttaggaagaggatatgcttggttagatacgggtacacatgaatctttacatcaagctagtaattttatccaaactttagaacaaagacagggattgaaaatagcttgtattgaagaaattgcctattatcaaggatatattgatactcaacaacttagttatttggttgagtctatgggtaaaagtagttatggtctttatttaagacgaattttagaagatgaaattacttttaattgagaaatgatataaaaaaattatgtcctcgacttctaagatcaatttataatttttgtacacaatcaataaaagaagtcggtgatctataattaaacctagagcaaaggagaatttgatgaagattataaatatagaaattcctgatgtgctattaattgaacctaaagtttttggagatgaaaggggttttttttatgaaagttttaatgaaagagtttttttagacaaaaccggaatattacctcattttgttcaagataattattcgcgttcagtgaaaaatgtgttacgcgggttgcattatcaaattcaacaaccacaaggaaaattagtcagagttgtagttggtgaagtttttgatgttgctgttgatttgcgaaaaagttctcctacttttagtcaatgggtaggtgtgcatttatcagcagaaaataaccatcaattgtggataccaccgggttttgctcatggttttttagtgttatctgaatatgcagattttttgtataaaaccactgattattatgcaccagaatatgaccgcactattttatggaatgatcctgatttagctattgcttggccgattgaagatgaaccaattatttctgctaaggataaagtaggtaagttattttcagaagcggaggtttatcaatgaaaattctattaactggtgtttctggccaggtgggttgggaattacaacgtactttaatgactatgggtgatgttatttctgtgggaagaaatcaattagatttagcacaaccagatacaattagtgctacaattagggatataaaaccagatttaattgtcaatcctgctgcttatactgcggtggataaagcagaatcagaacccgatttagcaatgttgattaatggtgttgcacctggtattatagctgaagaagctaaacgtttgggatcagctataattcactattctactgattatgtttttgatggtaataacagtcttccttatcaagaagatgaactcaaaaatccccaaaatgtctatggtaaaactaagttagctggtgaggaagcaattacatctgtcggtgttaatcatattattttccgtactagctgggtttatggtttgcgtggcaaaaacttcttattaacgatgcaaaaattagcaaaagaaagagaagaaattaaagtagttgatgatcaaattggcgcaccgacttggagtagaatgattgcagaaatcacagcacaagttattactcaaggtcaaaataacctaactgatttttttgctaataaaggaggaatatataatttatctcctagtggaaaaactagttggtatggttttgcgaaggcaatttttaatgatgattttcccaataatgaacgtcaattaaaacggttaattcctattactactccagaatatcctacacctgcatctagaccagctttttctttgttagataatcaaaaattgtctgatacttttgggttaaaaatgccagaatgggatcaagttttaaaattagttattgattgatagttaaaaaatctgatctcccttaaaacaggaaaaaattaaaatttttagcggggatcaaaactctttgtctggagtggttcgttgaataaacatcaaacgcagatgaacgcggatatttgttattcatcctcatctttttcatctgtttctaaatcaatatcttccaaagattgatgaggaatagcagcaattatggcatctatgactttagaaacttgtaaaatttctatgtttaaatcaggaaacttttgacctttgggtattatcgctcgtttaaaacctaattttgctgcttcttttaatcttagttccatttgggaaactgatcgcacttgtccccctaaacccacttcccctattaacacggtttcgggatctactatcctatctcgaaaactggcaacaatggcgatcgcaatccctaagtctaccgcaggttcttctacattcaaaccccccgcagatgcaacgtaggaatctaattttgacatgggtatccccacccgcttttctaatactgctaaaatttgcactaagcggttataatctatccccgtgccagcgcgtcggggtgaagggtagctggtaggactaactaaagcttgcaattctacaactatcggtcttgttccttcacaagccactacaatagctgtaccgggtgcggggtcgtcgcggtttcccagaaacagttctgaaggattgggtacttcccttaatccattagataccatttcaaatataccaatttcatgggtagctccgaaacgatttttaacagttcttaataatctatgggaagcaaagcgatcgccttcaaaatacaaaaccgtatctactaaatgttctaaaaccctcggtcctgcgatagttccttctttagtaacgtgaccaacaattaacattgtaatatcttcatgttttgccaccttcattaaagcggcggtacattcccgcacctgcgctactgaaccgggtgcagatgtcaaagctgggaagaatacagtttgtatactatcaatcaccgccagattaggtttgagagaatcaatttcccgcaaaatttcctctaaatccgtttctggtaggacatataaatcagaaccaatggtatgatgttctataatttcttctgtatttttacatactttatcggtatctgtaacttcttcttcgttctccgaattttcttcagtgacaacattgatcggtttagacattcccaaacgagaagcgcgtaattttacctgttgtcctgattcctcaccagtaacgtagagaatacggtatctttgggataattcgttagaaacttgcagtaagagagtagatttaccaataccgggatcaccaccgatgagaaccatcgaaccagggacaacaccgccaccaagtacccgatctaactcgccataaccggattcccaccgagcaatttggcgatcgctaatttgatcgaaagtcagagaagcccttggtttagcgggtttactgctgctgggtttaattccccctggtgcagcgtgccagttacctactcccccccgactgggtatatctactccaaaaggtgtagcattctcttccactaaagaatcataagtgtcacaatttgcacacttgccgaaccactgggagaactcggctccgcatttgctacatataaaaatagttttaggctttgccatgggtaatttttatttaagaatcttaatttttgtttaagttttagaaaaaactcaagttaaataatagtagtagttacagctttttcagattaactgatgcaatgatatcttaatattatggtaataaaattcataatgttaaaaatttagttagggagcgtgaagaaacttggaaagtcataaagaaaaaatcctggtagtagacgacgaagcaagcattaggcggattttggaaacacgcctttccatgattggctatgatgtagtgacagcaggtgatggagaagaagccttagaaacttttcacaaatccgaaccagacctggtagttttggatgtgatgatgccaaaactagatggttacggtgtttgtcaagaactacgcaaagaatccgatgttcccatcatcatgttaacagccttgggtgatgtagctgatcggatcaccggactagaattaggtgctgatgactacgtagttaagccattttctcccaaagaactagaagcgcgtattcgctcagttttacgcagagtagataaaactggtgctagtggtattcccagttctggtgtgattcatgtaggtaacatcaggatagataccaataaacgccaagtttacaaaggggatgaacgcatccgcttaaccggcatggaatttagcttattagaactattagttagtcgttctggagaggctttttctcgttctgaaattttacaagaagtttggggttacacaccagaacgccatgtagatacccgtgtagtagatgtacatatttcccggttacgggcaaaattagaagatgaccccagcaacccagaacttatacttactgctagaggtactggttatctatttcaacgtatcctggaagcaggggaagagtaattaggtgacaggtgacaggtgacagtaagaaggcaaaaggcaagaagcaagaggcaaaagtttattcttaccaattaccaattaccaattaccaattaccaattaccaattacccattaccaattacccattaccaattacccattaccaattaccaattaccaatcaccaatgaccaaatctgatcctaatcgagttttacggcgtttacccttggtagttgggggtttaggtgctgtgcttttgtttgtaaatcggttgttaacaccggaactgacagactctcaagcacggggggatgtgctgggagtgattttgagtgcggtgttaattttaacaggtttaatttggcaacaagtacaacctaaaacccctgatacagtagaactgatcggagaagagggttttgtgttaaatcctgatttaccagaaaccgtgaaaacagaattagcttgggcatcaaggttattgttaactaatacagttacgcgatcgcttgtagtttattaccaaggtaaagttctgttacgtcgcggtattctgggtgctaaatcagaagttaccccaggtgcaatattgaaaagagtattagaaacccaaaaaccggtttatttagtagctttaaaagtctatcctggcaaaattgaatttgattatttacccgaaaatacccaaggtgtaatttgtcaacctattggtaaagaaggtgtgttaattttaggagcaaatgctccccgcagttatacaaaacaagatgaaaattggattgcgggaatagctgataaattagctgttactcttagtaatgggtgattggtgattggtgattggcaatgatgctggaattggatgctaaactacaccagcctgaaaaatctgatttgcggtaagattaaattcagtaaaagtttgagaaatgactatatcattattttgaaacttactaatttgatattctccatcaaccaaattacaaacagaaatagtcggttgtttaggattaccaataaaattacgtccacccaaagccgcataatctacaatccaatattcaggaatccccatttcctcataatcagcatattttagatggtaatcatcacgccagttagttgatacaatttcaatcaccaaaggtatagaagcaccttgactaacaatagattcttttttccataatttttcattaactaaattttcacggtttagcaccaacaaatctgggaaataaccagaatctttaccatctggtctaactatcacttggttaggaataccataaggtaatcccagacgtttgatttcaaagggaatttctacccctagaaaacttttaacttcttcgtgatctcctgttggttgtgacatttcaataatattgccattatgtaattcataacgtaccccggaattttcaggtagccaagcgacaaattcctcaaaggtgataactttagataaggtttggatcatggctcttgagcatttctgaagataagaatattataaacttttgcctttcgcctatttactgtcacctgtcacctgtcaccttctttaaaactatgcaaattatttactgtttattaatagctttaatgcttgtgggtgtgattggttctgtagttcctgcaattcctggtagtagtttaatattagccgctatcatcatctggggaattgttaatggttctgtagcagttattaaaatacccctcattgttacaggtattgtcctacttctaagtatggctgttgattttttagcaggttacataggcgcaaaacaagccggtgcaagtaaatggggacaaataggggcgtttgttggtttacttctgggatttttcggattattgccagctttacccttcggtggaccattgttgggaatgttaattggtccacttttaggggcaattattggtgagttgctgtatcaaaaagatttgggtaaagcagtgaaagcaggtataggaatcactgtaggaacagtagtagggaatttacttcagggtgttcttgctgtgggtgcggtggtagtttttatttggactacatggacacaggtttttggtgggtagtattttaactatggtttgctcttttcgcttctttagcaaccgcttctacttcatcattaaccaaagtctctaaaatagctttagcttctgcaccacctaaattacccaaagcctgaacaactctataacgcacctgccaatctgaattagtagaataggttgctaaaaggggaactgcatctgggtttcccaactctcccagggaactaatagccgcagtttgcactaaaccattatctgaagcaagtgcttgtttgaggagttcaaaactccgtggatctcccaatgctcccaaggtagcaataatactgaattgtacgagccattctggggtttgatgatagagttcctgtagatcttcaaaagctgcctgtaatttcagcgcccctaaacagtctgctgctgctgcttggacatctgcttcaggatcgttgagtagttcccgtaatatctgcaaggataaatctaaatcctgttctcccaatgtgtccatttgactaacagcagaataacgcacacgggaatttttatcacggatagcgacttgtactaattctaaaccggttttgggttcgagttcacgaatttgattgactgcacggaggcgatcgcccaagttatcagaactcagtaattcttttacagattcagcagatatactcatttaataatcctatgttattattagttttcaatttgtaggggtttagcactgctaaacccctacagtaattctctcgttcccatactctgtgtgggaatgaatgaaataaggctctgccttatattaaatcagaggtagaacctcttaatgacattcccagtctgagactgggaacgaggttagtatttctcctcctgcttttttctgtcacctgtcacctgtcacctgtcacctgtcgcctactcagccgccatagcacggataatgtcaccacgagtcagaataccaataactttactcgtaatatccagcacaggtaaacgatgtactttatgttcttggatgatttttgcagcttcttttagggacttatcaggggtaatagtgagaggatttttactcatcacttcccctacagtttgtcctaaagctttatgtaaatcccgttcataagcaccaggattttgtaaataaattacactatccaaaaacatgatgtatgcaggtggagtgacaccggtttcctgccacatcaagtctgtttcggatatgatccccactaatttccctgcatcattaattacaggtaaaccgctaatgcgtttttctgctaagatttggatagcttcttttaaaggagtttgaggattaaccataattggattatgggtcatcacttctgcaacggttttcagcattttttttacttacaccttttataaaagtctttttctgtctttattttaggtaattgggggatgataaataaacagttttaatagattgttacttttgatgattgaaaaaaatgctgaatttgctgaataatctcttgtatgataaaaatttttactttattactatattactatcatggattattgcataatattctacatcaaattcggtttattaaacattaattattgttttgatatttcctcaaagcagcaataatttctccatttgcttcaggaaaatcaaaattatctaactcatctaaacccacccaacgcacttccgcacattcaatagcttggggaatacctaataaataattacaatgatgcactgtcaaagttactcgtaaatgaggataagtatgatcaatagtaatcaaatgtttgccaacttctattttaattcctaactcttctaaaatttctctttctatacattcttctatagtttcccctggttcaattttaccccctggaaactcccataaattcgccattgttcctgtgggaagacgacgatcaattaaaatctgtttttcttcattccaaataacagcaacaccaatgattttatgtgggacagtagatatttcattcatgactataactatgacaattaaattaaaatccggttcgtagttaggactttagtcctgtaaattcttacatatagcgataaatcgcttactacaaaccaaattcttagtttacactaataaacccccaatttctcacagaaatcggggatatgaattaattattaggaaacattaacatttattacttaaaaaacaccaataatcaaaattctgctaccttcattttggatttattagagaatttatataattggtgctattttgttaaattattcagcaacatcactactgcttgcttctgttccttgtatagccatatcaaagttcattctttgttctgcattacgtataaaataaccactaatcattgcagaagctaataatctacctaaattttctctgctggttgtaatggtaacaccaaaatgttcagaaggaagatttcccaaaagtcccacaatattccgttccatcacttgaaatacttccgcagaagtaggtttagataattgtgttacggtttctggacttaaagattttacatactgccacaataagttgctattttctgcttcaccgttgaaaaattctgatactcgattaggttggttactcacttttgatctcctttatgacaactactgtttctggtaattgtgactacaatgataaataacctgttttctatttaatgacgacgaaaatttaactttgtgtctatgtcattcaatgtaacaggttatttcagtcgggggagtcggttaaaccgtaccaaaagcagcgtattattgcgaatgggtaataggtaattggtaattggtaattaaataattattcccagtccccagtccccaatcacctaactagcaagatactcattcatgctatgtttggatttacgaagttttgttaaggcttctctttcaatttgtcgcactcgttcccgactaatattaagtatttcaccaattcgggctaatgtcatagattgtccatctgataacccaaacctcagtctaatgacttctttttgttggggtgtgagttctgacatcatcctttctatgtcgcaagatagagaagattgcatcacaaaatcttcaggtgatgcacctgtatcttccaacatttcccctagttcggtgtcataattatcacctaaacgcaaatcaagagacaagggtaaacgtgctttttctagacactcccgcacctgtttaggtgttaattgtaattcttcagctagttcagaaatgctaggcgcacgtcccaatttttgggataattgcctttgggctttcttgattttgtttaatttttccgtaatatgaataggtagtctaatggtgcgggctttttccgctatagcgcgggtgatggcctgacgtatccaccaataagcataggtagaaaatctataaccttttgtggggtcaaatttttctacaccccgttgcattcctatactaccttcttggattaagtcaagtaaatcaacattacgtttaatatactttttcgctacagacactactaaacgcaaattagcttctaccattttccgtttagcaatttcaccttcggcgatcgctctatttaattcttttacttctaactcagctgcaattgcccactcttctacagttggttgacgttctaactgagtagcaagattatctctcacctcatacaacgcggtacatctttgtacctgtttcccaaagtgaatttcttcctcatgggttaaaagtggcacgcgtccaatctctcttaggtaagtccgtacgaggtcggtaggtgtctgagccgtcttcatggcgctactcttggttgatgttgggttggttggtagtgtcattagctgatgccttgagaagataatacccaggttaactagaaaactatgctctggtttgcaatttacatacccgatccgctttgtttccggtatgtcgtcaatttaggcttattaactgctagacggtacagttatttacttgtaattacaagtacctgtagttagagataccatgatctgtctaacattttccgtgtgatgtaattgttaacaattgtaacatttattaaaaaagcttgactaccgagtaactagaaaattcctggttacatcaggtgaggctatgtcgtaattgtactgaaatattataggaatagtagtttagccgtaggagcaaccccctgttgttgccctcttgaggcatgaggcaggagttcagccgtaggggcaaccccctgtggttgccctcttgaagcatgagtcaggagtcagaacgaaaaatgagaagtagatggtttcctcatatttgttaaaatatctcaatattaactataatgatttgcctataataattgcttaatgtttcgggacgaggtgacaggtgacaggtgacagtgaagaggtaataggtaataggtaataggtaataggtaataggtaataggtaataggtaataggtaataggtaataggtaatagggaacagggaacagcaagaaagcaaaaggcaaaagttgattctcaccaattaccaattaccagttaccaattacccattacccattactcattaccctatgggacagtattcttgaatgactttcacatctaaggtggtgttttgcagggaacggatagcggctactgttgcccgcgcacctgctatagtggtaattatgggaattttgtaggctaaagctgtacggcggatcagttgtccatcggtacgggcttcttcccctgaaggtgtgttaataattaactgaatttgttgatttttgatcacatcaatcacattaggacggccttcatgaagtttcagcacttgctcaacttttaaaccttgctccttcaaatattggcgtgtaccttgggtggcgataatatgaaaacccaggttgataaactctttcaccacatccacaactaaggctttatcccgatcgctcatagacacaaatacagtaccctggaggggtaatttttcccctgcgcccatttccgctttagcaaatgcccgcccaaaatcagcatcaattcccataacttccccagtggaacgcatttcaggacctaagatggtatcagtaccggggaatttattaaagggtaaaactgcttctttcacagctatatgagagggaatcacttcctgagtaaagtttaattcctctaaagtcttaccagacataattaaagatgccaacttagctaaaggtacgcctgttgctttagacacaaatggaacagtgcgagatgcacgggggttagcttctaaaatgtagacttggggagaataactatttgcaccaacaacggcaaattgaatattcatcaaacccactacagataaagcttttgctagttcaactgtccaagtcctaatttggttaaggactgcgggagagagggaaattgaagggagagaacaagccgaatctcctgagtgaatacccgcttgttcaatgtgttccataatgccaccaataaccactctacccgtatgatcggcgatcgcatctacatccacttcaatggcattttctaggaacttatcaattaaaattggatgatctggttctacctgcactgcaaaagtcatatatctttccaactctgcatcagagtagactatttccatcgctcgtccacccaaaacgtaactagggcgaaccacaacgggatagccgatccgtttagcgacaattaacgcatcttcataacttctagcgataccattaggcggttgggcaatattcaactcttgaagaatcttttcaaaccgttcccgattttctgccatgtcgatagaatcaggagaagtaccccagatttctggattttggattttggattttggattttggatttcctcattgctggctatactttgaagatagttttgcaatggaactgctaattttaggggagtttgtccaccgaactggacaataataccgacagggttttccgcttcgatgatgttgagtacgtcttctttggtaagaggttcaaaatataggcgatcgctagtatcgtaatcagtagaaacagtctccgggttagagttcaccatcatggtttcataccccgcagctttcaaagagtatgccgcatgacagcaacaataatcaaattctatcccctgaccaatacggtttggaccacctcccaaaatcattaccttgggtttatcggtgggtaaaacttccgtttcttcctcgtaggtagaataataataaggtgtgaacgcttcaaactccgcagcgcacgtatccacagttttgtaaacggggataacacctaactgtttacgatatgctctaacttcatcttccttggttttcgtacagaaagcaatttggcgatcactaaaaccattacgcttgaccccatacatttgctcttttgtcaactgctgtaaagaagtgcgttttaagaacttctcaacttccagaatttgctgtaatttatccaaaaaccagggatctatagcagttagttcgtaaatttcctcattactcatacctaacagcatcgcatgacgcaaagcaaaaactctctctgggttaggtgtacgtaactgagcgcgaatttgttccccactgggtaacttttctggtttatcagcaccccatccagcgcggccagtttccaaggaccgcatagctttttggaaagactcattaaaagttcttcctatggccattgcttcccccacagacttcatttgcgtagttaacactggatcagaaccaggaaacttttcaaacgcaaaccggggaattttcgtaactacatagtcaatagtcggttcaaaagaagcgggggttttcttagtaatatcattactaatttcatccaaagtgtaacccacagctaactttgcggccatctttgcaataggaaaaccagttgctttagaagctaacgcagaactgcgggaaacacgggggttcatttcaataactaccacatccccatttactgggttcaccgcaaactgaatattagaaccaccggtttccacccctatttcccggataattttgatcgccatatcccgcagacgttgatattctttatctgtgagagtctgggcaggggcaaccgtgatagaatcaccagtatgaatccccatcggatcgaaattttcgatagaacagataatgacaacgttatccgcaagatcccgcatcacttctagttcatattccttccaacctaataaagactgatctataagaatttgagaaacaggactagcatcaataccaacctgtgccatcacttcaaattcttctttattgtaagcaataccgccaccagtaccgcccattgtaaaagcaggacgaataatgagaggataagatcctatccgatcggcgatcgccttagcttcttctaaggttgacgctgtaccactaggacataccttcaccccgatcttatccatcgcttcgttaaacaacttgcgatcttcagctttttcaatcgctggtaatttcgcaccgattaattcgacgttatactggtctaaaaccccatttttcgctaaagcaaccgcaagatttaaagcagtttgtccccccatagttggtaaaagggcatcaggacgttctttagcaatgacctttgctacaatttccggtgttagcggttcgatataagtgtgatcggccgtttctggatcagtcataatagtagccgggttagaatttatcagcaccacctcaaaaccctcttcccgtaaagctttacaggcttgagtaccagaatagtcaaactcacaagcttggccaatgacaataggaccagaacctaacaaaagaattttgcggatatcttgacgacgaggcatagtttttactttagatcaggaaaatacaaatcttgactattttaagggtctttacccctagtccttatatttattattaagttttcttagttcttgtgattaggtagattttttaacagtgtagcctaatttttcggttatcttgagtaatttaacacagatacacgcagataaacgcagacgtaaaagaataactgaacaattccattttccagatatttatgtttcgcgcaatctccgtcaggagatcccgcagggtagacgcaaataagcgaagactcaaaggaagaaactcaagacttacccaaaatacctctcaaactctcttaccttcgtgttcttcgtgttcttcgtggttcattcttccataacttctgcgtaagtcctaaatagtttgcagctattgtgagattttttcctgaatatttgctttgaggatgaatgttgatttgatgatgatcctatttttcagattatttttgaaaatttatagcttctgagttgataaattttcctgaaatttattttcaataactgttaaatatgatttttaacaatttttagtgatgttttattcgtaggggtaattcatgaattacccctacctcctttctgttttccgtaagtcctgcttgatcagcaaatgacaaatatttgcattttatataattaataataattgcactgataaatacaaaaaatgacagataggtaactcatctgtggttttacctagctgccaattttttattttcggttttaatctactctactaaattttgcatctatataaatgcagaaatttaagatgaggttaaatttagtttgtggttctttgaacaaaacctaatgttaaactatccttggctaagaaatgtgctaaatgataagctctttcttctgtttttagcaggatttgttcatagagatatcttgtcccccgatctcctaaactctcagcctgataggctaaacggcgaattaagctaatcattgcttgttctgctactaggtcattttctatcatcttccgggaagaaaatgtaccatctgcttctggttcaaagcagcataattcagctaatttgctaaaagaagctacaggaacaccacccaaaccatttaaacgttcaccaatttcatgaatgtgatcttgaacttcctcgtagctttcgttaaagaatttatgcagtgaataaaattccgcaccttcaaccacaaaatgatgtttctgatactgtaggtaaagtgcttgaaaactagctaatgcaatattaaatccttcaattactggttcggtaacactgcgatctagtaatacagggttgtcatatacttgaccaaaattttgaatcaaagtttgagtatcagacatggttctcctcgctttgtagcagttgtttttttcaactactgctttttgttatatcttaacattaaaaaattttcatgccagtctgctaaatatgacagaatttctaatttttatcgctgcaagtattcgttttccttttatgtctggtgttaactattaatttcatctctgtttgtttgctaatatccttgactttatttacacattgtgtgtaacacctttggggtgtggtggttcaagttttatgaaaattttttgcaaatttaatgacaataatttgcacttacgctattctggttgataaggctcaagtccaataaactcccagtcacagggggttattctgttctatttactgccattttgttgcactttgagggtaattcacttgaaattctctaattcacataattcacataattcacaattaggaacacagcacgttattgatgtgagttggtcagaacgttggcaagtttatcaacgcttaaatgaattagatattccttgtcattgtcagagtaaccaaccattgcaagtagaaattactaacccacaaatagctatccaagtttggagtgtggtgagacaagttaaagcttatcgccaagacttaatttgtcatttaaaagattgtttgcgcttgcgttatcaagccttgtaatttgtaattattttctgttttccttttatctgctttgtagttagttaatcttgggtgaacgaaagatgagtatctatactggtgtagaagtatcagaattttgcctagaaggtagatttttagattttgtgattaaagatggttataagttaaaaggtttattattagcgacttctgatggtgaatgttatgtaaaattagccaagcatttacggatagcttttgacttgcgtttacctcgtggtacttggttacaggtggtaggtactaaaaagtatgacgctaaaaaagaggaagtcacgttaaaagctgaacgggtaatggctggtcgctctcaagtagaaataattgcgcctaatttaaatatggaaaaagttgctttagcaccggaaacgagtaaacccaaacgagcgaaaaagcaaactatcttaatgtgtcaaaaatctgattgcatgaaacgcggtggtaaagcgttgtgtcaggtgttggagtctgagttgagcgatcgcggtttacaggatacagttgatattaaaggtactggttgcatgaaaaattgtaaggctggacctaatttagtcatgccagataaaacccggtatactaaagttcaaccttcacaagttgctattttggtagataagcattttggtgaggatgcggaaatcaaatctccgcagtttatggaagtttgattttttgtaattgatgattttcaggatttaattatttgtctgaatcaggatatccaggatttaattattttcaggatttgcaggatttaattatttatctgaatcaggatatccaggatttaattactttcaggatgtttaattttttctcattgataatgatttttggggtttaattatttgtctcaaaaaagtaaaaattattgcaaactcatttgatattatgcctacattagttaaaatcaagaaaatacaattgaacaaaaaatgatataatcagattatctaattaaaaaataatggtaagctgatgtgcagctaaactgtataattaaaaaaacctgaagttacagtagcacaagcatcttgcttgtattaattattcaagttaaaggcataacagcttattcaaataacatcctgtaaatcctgattctgaaaaatagaaatattaacttcctaaatcatatcctgaaaatccttaaatcctggatatcctgattctgacaaataaaaatattaacctaaacaaacatactgtaaattctgtttcaaccctaatcaaacctagatgaatattgataaaaatgatgatatcaatcaaactcaacaaatagaactatatcaaaatggctgaaaagcaacgtggtgaactgcgagtaataaaaaccctgagacaagaaattttaaatcgtccagatttgatacaacatcaaaataaattaaaacaggattttcgtgatgaaggtttgagactagcgttatgtcgtcatccccatattgttgaggtagaaaatgtctttgatgaagctagtttaccttgcatggtaagctgttacacagctaaattgtataatcctaatattctgaactcttgtttaacaggcaagatgcctgttccacttatacaaattaaatgcacaacagcttagtgctgaatggaatggcaaattttatgctatataaaatttttgatattcccgaagtttttgaactacttgtgtttcacctcgcaaaaaatatgagatgatattagtatctaacatcacttttttcacaattcaatttcccttgatgagtctagtaatctttgttcttcaatctcatgttcaagctgccgtaacaatatagattcttctgaattagcaataccagcaaattgtataaaatcgatatttttatccatatatttgggttgcagtaattgttgattctgagctaatttttgaaaaattatttgagcaatttcattttgttcttgttctggtagctgtgatactacagcgaatgcttgttctaaaagctgattcatggtttttgtgtatgtgttcttaattaagagaaccctagaaataataattcaatatcttattttatcaaaaattatcactccttaattataaaataacagttttctatcttcctaaatctcatcctgatagcgaagcgtggcgttagccataaatcctcaaatcctggacatcatgattcagacaaataaatcaatcctgtacatacccaaatcccaaaaatcctcactctaacaacttactctcctttcaatttcaaagcttcagtagttgacatcccctcactttgcaaaccaaaataagatatggcagcagcagcttccccacgagttacagcttttttcggttgaaaaagagtagtatatccaaaaactctcctaatatttgattgttctgcattttgaaagtcagctaaaattgctcttaatgctttaggatcaattttttctgtatcctgaaaaccccaagtttgttttacagcttccaaattagcattcggtaaagcttgacgagtatctaaaggaactttccacattaacaaattttccctggttaaaggtgcatcaggacgaaataaaacttctgtggcatttcctgataaactactaggaattaatcccgcttctgctaatccttgaatagttggaaaatcaggatctttaggtaaaacatctctaaagactggttgtgtatttgtggatgataaacggatttttttcgcaggattattagcatacatgacattatttgcagttactaaccaacgagcaaattctctgcgagtgatgattttatcaggtgcaaattgttgagcatttgtagcattagaattgctgttattggggtttgatgcaattgataaaactcctaatctacctaaatcttcaatctgtttccgccattctggtggtactttattcaaatcagtaaattcttgagtttgtgaattttcaattgctgtaatttctgtatttgttggttgtttagaaacatcaacccctggtgaaactggtccaataaattgcgaatctcctggttgagaatttgtcccagaatttgtcccagaatttgcagttacactattattagatgtatattcaattgttaattctgtagctgtttgtggttgatttggtgctgagttggtaacggtttttgggttaattgctactttcaataataaatcattccgcttgacttcaaaagttccttctgtatcgtcttgtggttgttgtaaaatttgccaattctgatttttaaactcactgctgtaaaagttggcaattatattactaggatctgcactttgccaacgagttacaattctattttcaggtttattttctgaatttgttgaattatctgaattattatttgcagtttgaatttctgctaacttagcattaggataaataggaatttcttgaggaaagtcagcaggtaattcaactttaggtgcagttgatatttctggattcttggtttcaccaaaaaccgcagtatttgtttgcagtctaggatctgctgctaaagactgttctaaatttttggcagtaggaccattagcacaggctgttaaggtagaaagtaaaacagctatactgaaaaagataacaggatttttataaagcaccacaggaaatcacaaatagatatttattatcaatttctacattagcatttcagggaacagggaacagggaacagggaacagggaacagggaacagggaggtaaataacctaatcaccaatcaccaatcaccagtccccagtccccagtcaccaatcaccaatcacatatttttctaaatcattgatttgcggtgcgggtaactggttgagaactcgccaaagaatagtgtagctgccatcaggacggcgacgcacggcacgaaaggctatgatagtatcactactaggcacttctgttaattgttgcctgatacggctattttgacggcgtacgggttgacgttctgagatgatttctgggagttgaaattggagcgatcgcactaaataagttttatttacttccgctttagcaccactcaaataaatttgcgactgttgccaattttgacttttacctgtaataaaccgccttctatctacctgtaaggcttttaactctctcggtggttggtagttgagaaaaaagtcccgcgttgatagatcaagagtttgtagtctaccatccaatttttctaaaggtacatcacctatattaacgataaaaccataatctattccttgagggaataactggaagttatcgtcaatcattttcaatgctaaactaggagtaaaatctcccttaccctcacccacagagggaaaaggataacgctcaataacacttggttgtaatcgattttggagggtattcggccgacgacggtaggctgaatcaggtaacactcgaaaaatgcccgtgttaggcaattgcaaaaactgagcgtagatttgtttttcttgggaatcaatgtcgtaagcaaaacggtctagtgtcgctgcgtcttcctgtggattgataaatttgatgttgtcaggaaatcttttttgggctgcttgcaagatttgattggcagttctaagagtgctgatagcttcctctggtggtgcgatcgcgggctggataggcggtttatagttagctatagctgtttttgccgggctgccaaccactggtaatggggaagaagttaaatttggttctttacgaataaaaggtgttgcaggtttactaagatcaggacgctgtactggtgcaatagaaatcaccggatctgattttctttctccagaaaccaaaggtaactttctcaccaaccctaactcaccccgtcgagacaacagccgatctgtaactggggataattttaacaattcctggttggcagcatacaaagagcagtaaatttgtaattgagaatcagttaactgcacagttaaatcagactgttgagacaactctccttttgcggtacacaaagttttcggacttgggtactgacgtttgagaaaagtttctacagaatgggtataaacagttaattgccccctcacggatctcattctgttggggtctgaactgctcagtgcttgctcaagtcgagcaattaaataaatctgctgttgtactagctgcatagctttggtataaaatatattttctcctgctactgaatcaacactttgactcaggtctaactgagacttatattccagagctaaggcaaaactgggagtaaaacccagcgtcaaagacagtgaaagtcccacaaagatttttctcatgtcaaaaatgtcaatctgatgggtgtatgaaaaatctaaaatagatattaaattggaagaaaacaacgaccatcgacaaccgtcagtttattttactttctgtaaagcgtcgccaggttgttaccagtgctgaaacaagattacatgcaagtttcccaggatcagcctatctattctgaggctccactccagctgttgctttttgtcgatggacgaccaaagtcccgacaacaggtacagcgcatacgctcttatttaagagaattagaaacagagtatagttttgaactacaaattattgatgtcggccaacaaccgtatctagcggaacattttaaattagtagcaacgccggctttaattaaaattcatccagaacctcaacagactctggcgggaagcaatattataacccaattaaaaaactggtggcctcgctggcaagttgctgtagacgctttcttaaagttacaggaagacttacaagaactcaaagatgagaatgtgcgggcaacattacccacatctaccatacattctgttgctgtttctgcggagttgatcaagctttcagatgaaatttttaacttgaagcaggaaaaagagaaactgcaagaacagttacaatttaaagaccgggtaatggcaatgttagcccatgacctccgtaatcctttaactgctgctgctatagctatagaaacgcttcaaaataactacaattctgaaaagggagcattttaccgtttaaaaccagctatggctgaacatttgttaaaacaagcccgtaatcaaacacgaatcattgaccggatgatagctgacttgttacaagtgggaaggggaaatgataaagaatttaatatcataccacaaaaagtagaattaggaaaacttagttatgaagtattggaagaattacgcgatcgctatattagcaaagctcaaaaaatagaaacagatatccccaaagatttaccttatgtatatgccgatcctgagcgtatccgtcaagttttagtaaatttattagataatgctattaaatatacacccgaaggaggcatgattagtttagccggactacaccgcaccactcaaaaagtacagtttagtattggtgatacaggtcctggtattcccccagaaaaccgcgatcgcatctttgaaaatcatttccgtctgcaacgagatgaagcaactgatggttatggcattggtctggctttatgtcaacgtattattagagcgcactatggtcaaatttgggtagatgcaaatcctcatggtggtgcatggtttcattttactttaccagtttatccatcttaatttagtcaggagtcaggatttctagaagttagaatttttatttcccaattaccaattaccaattaccaattaccaattaccaattaccaattacccaaaaaaatgccacatccattaatgtatgaagaggacaattttgttgttctcgaaactaaccaagaagaacaatttttgacgaaatcagaattactagaaaagctagaaaatactttaaaacaactggcttttgatgacttaactcctgatatccagaaatttgattctgtcacagaacaagcacaatatttaattgataccagttgtgaattagatgtaggaccaggaaaatatttacagtggtatgctgtgagattagaaaagtgactggggactggggactgggtaatcattttatttttcccaat

SEQ ID NO: 10 - DNA, 99715 bp, Sphaerospermopsis sp. LEGE 00249
  LEGE00249_19
tttttttactttttacaagcgaatgacattagttttatcaactgcaatttttgatttgaaatgactgattctagcccggatggtcccgaattctcgggaggcatccttttattgtttagcaatatccatcgatgactctcaggttgaccaaacaataaaagatagagtggacagccggaatagcttcttataaaaacagcttaaaaattgtggataacccgtttgataaaatgtgtacagttttttggtaagcccgaatattacgcttacatttgcttataattcaaaaaaattccggaaaacatgtttgaatttcaacagtatctaggcttcttagctttcttgacaatcttaaccattggtttttggttgatgattttcttgattactgctattatcccttattgggtttttggtggtgtaagagagtttttgcaagagaaaaaagctaaaagagaagccgagcaagctgaataattttttcagtttgttgtaaaaaaaagcctcgatatttcgaggctttttttatgggtttatccagggaagtcaccaccgtcatcttgttgaccaccgcgatttcttcgttctttttctttttcgtttttctgtacgttgaagcggtaggtgaacgagaagttaatttgacgttctctccactgcatttctccgtaagagtcaacagccccagcaatataagtttccatcaatcgctttctggaattgagtaagtcgctcacgtttaaggaaagcgttcctttgtcttttaaaatgtctttgctgaacgccaagttcatactgaaaacgcctaagctacgtccttgcgcatttctttgtggcccgttgtaagtggcgttggtttgccaatcgattttgtatggtaaagtgatttttgaagtcagacgcgtaaaccaagcaatagtactgttgtcgaagttttgtacgatttcgttaccgttaaaatcaatgtagctgaaatcaccgtctgtttcattgtagaagaagttaaagttactgttcaatttccaccatttgtatggagaataatttaaagtgaattcgaatcctgttctgtactcggtagccaagttgataggagaactaatgataataggaataccgttttggaaatcgccactttctctgcgcacaaattggaacgcaccggtagttttgtttccgtacaatgacgtgttaaaagtgagtttgctccaacgtttgatgtaaccaatatcgactgcatcggtaaatgccggatctaaatcgggattccctacaaaaatatttacgttacttgataggttgttgaacggattcaattgacggcctctcgggcgttggatacggcgactgtaactaatagacgcgctggtttgttcacccaattcgtaagtaaaaaaggcactagggaagaagttgtcgtattttttgttgttgaagtcgctggtggccaattggttgacttcgatattggaatcttcccagcgcattcctaacaagaatgagaattttttgattttagtaccgtagctggtgtataaagcatttacgtattctttgtattccaatatgttggtgaattgcggaaacggaacaccgttggttaccacactatagtcgctgatattttttaagaattcgcctttgtaaccaaactcaatctgacttcctttggcaaacggatacacataatcggtttgaatcaaattacggttttgtttttgcaggttagtggtttcgtctaaggttacgataggcgtattggtagcagcatcggtaataaaggcgatgttttcatctgtatttttagaaaacgaaccgtcaatggtaagtttgtggccctcttttttgaagtttttagtaaagttggtggtgtattctatgtttttgctcttactgtcctctgcgttgatacgatttctttcgtattggtaggcaaagtttacatcgtagtatttttgtaatacatcgtctatgttatttccgctgtttcttctgtaatttacagtattggtccaagttaggctttcgcttaaaaaccaatcgaatccaaaatttccgttataagatttgttagctctttcattttcgcgggtttcgtacatgtaatcacgagtagaattgtcgtcgtttaaatatctcgaattggttaaggcatttccgggattttctctctggctgtaaccttgcgtagtaaacaagttgaactctttggttttgtagtttacagtgccgctcacaccattgtttttaggatatcctgtagttccgataaaggttccgttgatgccttggtttttaccttttttcaagatgatgttaagcaaaccgccaccaccttcagcgtcgtaacgtgcagatggattggtaattacttctactttttcaatagcatcggccggaattaatcgcaatgcttcggtaatgttaatggcactggaaggacgaccatcaattaaaattcgaacgttgtcattgcctcttaaactcacgtttccttctacgtcaacagaaacagaaggaatgttatctaatacatcactaaccgttccgcctttgaccattaagtcttgtccaacgttgtaaacttttttatccagtttaatctctacggtagttttttcggctctaaccacgacttcgttgagttgcgtagcatcttcctccaaggcgatagtacctaaattggtactttcgttgaggcgtttttgtttgatttcggtaggtttaaaagaaatgaattcgatgatgatatcgtagacaccggcattggcttctacattaaagtttcctttgttgtcggtaattccaccaaaaacagcttttggattttgagtattttttaaggtgattgttgcgtattctaatggaagtttactggttttttccaccacatttccggtaatgattactttggcttttccggcattgggttgggcaaaagtggcaatagaaagacaacataaaattagggcagtgataatttgaatttttttcatctaaatgtttttgattcatgcttaagagtgcaaaaatacgctttggtttaagtgacaattcccaaatctttgttaaaagtaatgcgatttttcagatgaatttttgcagcttttcaagatctcgtccaataattgcttcgttgtttttaatcacaattggtcgttcaatcagaataggatgctcgcttagtgctttaattatttcgtggtctgtaagcgatttatttttatagttttcaatccaaatcgtttctttttggcgaaccaatgccaagggttttatgtcgagtttttgtaacaactctttgatttctacttctgataaaggtttttgcaaataagggatgatttcaaaatcttggttggcttcggttaaaaaagccagacagtttctcgattttccgcagcgtggattgtgaaggacttgtagcatattttttaacgcaaagtaatagatatttgtataaatgaagtaatttaggcgaaattaaaattttaagatttatgtttttagaaagcaaagttaacattcaaaaatcaccacttaaatacttattaggttttgtcgtaatcagtttgttttacattttaggacagattccgtttggggtcgctgtagtgattaaggccatgtcgtccggtaaaggtatgccaactacagaagctgatatgatgaatgtttttagtccgaatgtaaccttggctttgatgctgcttatttttgtcagcacaatgattggaatcatcttagtggttaaatacatccacaaattgagaatgattgacattactactactcggaccaaagtcgattggcaacggatttttttcagtttcggattgtggagcgtaatgagcgcagtccttaccattgcatcctattatgccagtccggaagattttgtagtcaattttaaaccgattccgtttcttattctagtgttgatttccttcacgcttttgccgatacaaaccagtgcggaagaatatattttcaggggttatttgatgcaaggtttaggattgttggctaaaaaccgatggtttcctttggtcttcacttctgtgatgtttggtttgatgcacattatgaatcctgaagtagaaaaaatgggttacatcattatgatttattatatcggcaccggattttttctgggaattgttactctgatggatgaaggtatggagttagcgctagggtttcatgcggccaataatatcgttactgctttactggtaacttcagaatggtcggcgctgaagactgaatcggtttttaaagacatttcgacgccttctgttggctttgaagttttggtgcctgtgctgattatttttcctttggtattatttgttttcagtaaaaaatacaattggatagactggaaaggaaaacttaccggagatatccaaactcgaattgttccatcctctataaattctgatgatcatgtataatccaacttacgaaaatgttcacaaccagttcaagttgaatggctttcatttgaaccgagaagacttgtgtcgtgtggcttacagctttattaaagaaggcgaagattttgaaaaaccggtaggtgattttttattggattggttcgatgacaaaccttatatcgaaatgcaaacctccgggactacagggacgcctaagttaatatctgtcagcaagcaagccatggttgaatcggcattagcaaccggtgatttttttgaattacatcccggcgataaagctttacaatgcttgccggttaaatacgtagcgggaaaaatgatgctggttcgtgccatgattttggggttggatttagaatttgtagcgccaagttcacatccgttagaccatgttgatatggactttgattttgtggctatggtgccgttacaagcacaaaattcgttatccgaactcaaaagagtcaaaaagatgatagttggtggtgctgcagttaataaaaatttggaaaagcaattattgcaattgccaactcaagtttacgaaacctatggtatgaccgaaacaattacgcatattgctgcccgaaaattaggagaaaaggcctttatggttttacctggcgtaaccatttcttacgatgaccgaaactgtttgatgattcacgcaccgcgtatttccgatgaagtaatagttaccaatgatttagtagaattgctcaacgaaaatcagtttgtttttgtgggtagagtcgataacgtcatcaacagtggtggcattaaattgattccggaacaaatagaggagaagttgtcgcaccaattgacacaacgatttttcatcgcttctaaacccgatacagaattgggagagaaagtgatcttggttatagaaggcgaggcttttgatttggccgatgaactttacaaaagcttagacaaatacgaaaagcccaaagaagttgtttttgtgcctaagtttaaagaaacggcaaccggaaaaatcatgcgaaaagaatcgcttcaataataaaaaacgcactataccagtgcgttttttttagggttaagtttccctcttatttttgcattttgaagtaataatcagctgagtgtttgccgctgccgtaaaccgtgtaaaacatactcagtcctaaagttaaggtcgacagcaaaagattcagcgcattcatatcgcctaaaaaattaatcaatacggctccgactaaaattggcaattgcgcaagtaaagcccatcgcgtcagcaatccgatcataatcataatgccgcccatgatgtgcgccgaagctacatagtgaaacgcaaacataccgcccaaaaaattactggccggtgctatcaaatcttcaaacgctccgctgttaccaataaaggaagtccctttgtaaaataaaaagatgcctaataaaattcgcaaagcatcaaaccaaatggtagaatgagcattggcccatttgttcaaaccttttactgaagtatccataataactgtgtttaaagtttagtctaatttactaattattagttagatacgtttcggttttatcttttttttataaacgtttgtattcgataaagaattgattggttttcggagttacatcgattatgtttttcaccttcacttttgtagtattccaagaactgctggcttggattctgatagatttgtttttgtaaatcaagtcaaccggcatggtaaaattatcattcacattagtccatttagcggctaattttccttctacaatttttaattccaatttagggatagttgttttttgcaaataatgattgaaaataggtgttaggtttatgccactctctttattgaaaaatgcaatcactgttggtgtatcaatgatttggtgcttgaaggtagtggcataatcgaacagcagtttccaccatttttcatcattgttaatcacatgacgcaaagtgttcaataacaaagcgcctttcggatacatgtcgcctgaaccttcattatttactccgtaattccctattattggtctgtcgtttttaacattctttttcaatccattggcataagtcatggctttttcatagccttgttggcattccacataaacgatttcggagtattgggtaaatccttcgtgaatccacatatcggctatgtctttagaggtaatgctgttgccaaaccattcatgtcctgtttcgtggatgatgataaaatcgaaagacagtccaactccagttccggataagtcacttcctaaatagccttttacgtatttatttccgtaagctaaagcgctttgatgctccatacctagataagaagtttcgactaacttatagctgtcattggcaaaaggataggagccgaatttactttgaaaacaatccatcatcggttttacttcttcaaaatgaactttggctttggcttcattttcccgtaaaacatagtaatccaaatccaagcctttgtagttttcatgcagtaacacataatcacctacattcaccgtaacgtcataagtgttgataggattttttacttcccaatcccagcgggtgtaaccgtttttcaaatcttctgagcccaaaaatctcccgttggaaacattcatcagtccgttgggtacagcaacttttataatagcgccatagtccggttcatcggtttgggtatcttttaccggataccacaaactggctccggtgccttgaacagcaacgcctatccaatctttaccattactgtcttgtttatatacaaaaccaccatcccaaggtgcatgacgtgcgacagttggttttccggaataatagaatcgaatggttttttccgtggtctctttctgaattggcttttgaaagttgataaaaaccgcattgaattcccgtgagtatttgagttttttattttgataaatgatactgtcaacttgcatgttttcaaacaaatctacttgaatggtcgaagtgatttcaacggttttgaaagtgatgtcgttgtaacctgtaattgatttttctttcggatttatagtgatgttcaaatcgtagcgcaatacatcataagcagtgcgttcaggtcttaatccgccttgcagactgtctttacggctaaaatttgcttgccctgatatagtttggacaaagccgataaacaacgcgaaaccgagattttttttcataaatggacattttgaaatgggttgagcaaagcccaatattgtttcctactcaaaatcagccgccacagtcaccgttatggattcttttgaaacaggatgattaaaagtaatactttcggcgtgcaaatgcaaacgattggctttggttccatataaatcatcaccaacaataggcgtattcaatcccaattgatgtgcggcatgtacgcgaagttggtgcgttcgaccggtaatcgggtagaagtgaaccaaggtttgattacctcttttttctaacacttcccattcggttttggcgggttttccgtaatcaaagcaaacaatttggtttgggcgattgtctaaatctacgcgcaacggtaaatcgattacacctttgctttcgtttacattaccatcgagtagggcaacgtagcgttttttgacttttctctgtatgaattgagcttgcaggtttttgtatactgtggccgacttagcaatcagtaacaaaccggaagtcgacatgtctaaacgatgcacgactaatggaccgctcgcattgggataaagcattttaacgcgactccaaacggaatccgtaatgtcttttcccggaaccgataaaaattcggcgggtttgttcaccacagtcaagtagtcatcttcatatacaatttccaaagttttcccttccgccggattgtttttaaacggattgtcttctaacggaatatctttgagcatgtgtcttagtattggttcgcattttccggtacaagcgggataaaactgttggtgctttctaacttctgatttaggcgattgtccccaccaaaattcggccatcgcaatgggttttaagtcgttttgaaaagcgtaatgcaagagtttcggcgccgcgcattctcctgctccggcaggaggattgccattaaaaatttctcctaagcttttcagttcttggtactgattgagaaaggcgtattgttcgaaaagttgctgttggagttgcgccgattttttacggcgttcttctttgagttggtttattgtagcagtaaattcagccacagtttcttcagcagcggtgatgtgatagttccaatacagcgtcatttttttgagcaaaataccttcttcctgactttctttgttaagttgctctacatcggcttcccgattgttttgacgaagtgctgctctgcgttttttgccgattttaatcgtttctttttgcgcctgaatttctttttctgcttgggttttggtttggcttaatgcttgaattgactttaggtaagcgtaatcattttcaagtagttcaatttttttattataattgtttaagataacttcttcttgcttgaaaaaacttttttcttccaacatgtcaaacacagttggtacaaaaaacgggtggtgattgcgctctgccaatttacccgaaaacgcccaaagataacccaatcgaccttctgtattttgtactactaaaacgccgaacattttgcctatggctaaaccgtcttgtgtatcatttaagccgaagttatgtttgaaatcagtttgggttactagataatgttgtagtgctttagtcgcaattatgcttaattcatgcggttcgtaataaaagggaaaagtgaatttttccggtagggaaatacctgaaatgtcttgttgaaaagcgataaaataagcggcctttttcatcgctgcaaagctataaaggaaaagtaaattattggctgattaatgatttattccttcaacaaaagttttaaattttcaataattcgaatttcagatttataaaattgaagtgctgtcggcaacactttgtcagacgtatctcgaggcgattttttgataactcttgcggttgttccggtgaaatttaaagtgtattctttgtttatatctgctgcctcggtagtgaattttaaggttttactttctactttccaagttcctttgccgttagaacggtattcattcatgccattaaagacatagcttgtgaaaataaatgtttggtcttcatttaattggattttgtagtcaacaatctcgcctttaagtgacttattgtaaaatacataagttcccgaaaaatcttcagtttgagcaatcaggttgaaattgaaattcaataaaaatagaagcaaaagttgtttcataatacagtaggtacaaaaatttgtttatacttgaataacgcccaaattaaaaggtttttcaatcggcgcgtgattggcagcttctattcccatggaaatccaagttcgggtttccagcggatcaacaatcgcatcggtccataatcttgcagcagcataataaggggaaacttgttcgtcgtaacgcgccttgattttatcaaacaacgcttgctcggttttttcatctacggtttcgcctttggcttttaaagaagaagcttcaatttgggccaaaactttagccgcttgagtgccacccattacggctagttctgcacttggccaggcaaagattaatctggggtcgtaagccttaccacacatagcgtagtttccggcgccgtaggagttgccgactaccactgtgaacttcggtacaaccgaattggaaacagcattgaccattttggcaccatctttaatgattccgccgtgttcacttttagaacctaccataaaaccggttacgtcttgcagaaaaacgagtggaattttcttttggttacagttggctatgaaccgcgtggctttatcggctgaatctgaataaatgacacctccgaattgaatttcaccttttttggttttagaaacagttctttggttggccacgataccgacagcccaaccatcaattcgggcatagcaagtaatgatggatttaccataatccggtttgtacatgtccatttcggagttgtctaccaaacgcttgatgatttcgagcatctcgtattgttccgctctggatttgggtaaaatgccataaatatctttttcgtctaaagccggtttttgtggtttttcacggttaaaccctgctttttcataatcgcctattttcccgactatacttttgatacggtccaaagcatctttgtcgtctttggctttataatcggttaccccggagatttcacaatgtgttgtggcaccgccgagagtttcattatcaatattttctccaatagcggctttcaccaaataacttccggccaagaaaatacttcctgttttatccactatcatggcttcatcactcataataggaaggtaagcaccaccggccacacaactgcccataactgccgcaatttgagtaatacccatactgctcataattgcgttatttctgaagatgcgaccaaagtgttctttatccgggaaaatttcgtcctgcattggcaaatacactccggcagaatccaccagataaatgattggcaaacgattttctatagcgatttcttgcgctcgtaaattctttttagctgtaatcggaaaccaagcgccggctttaaccgttgcatcattggccacaacaatacattgttttcctttgatgtagcccatttttaccaccacaccaccggaaggacaaccaccgtgttctgcatacatgccgtcacccacaaaagccccgatttcgatactttttgctttgtcatccaataaataatcaatgcgctcgcgtgccgtcatttttccttctgcatgtaatttttcaatgcgcttttcgcctccgcccaattttactttagccaatcgttgttttaattcagatagtaaaagtttgttgtggtcttcgtttttattgaaggtaaggtccataaatttgtaaggtatataacggttttgtgatttggttgctaagctacgaaaacgttttcaataagtaaaataaggaatgctatatggttgaataaacaactccagaattaaattataattgttggaacaatatatatatttaatgttaacttaacattagagtggtacatttgcatcaaattttaaaatcatgtcattaaataacatttttcagtttttggttccaaaagataaaaaattctttcctcttttcgagcaagccaccgcaaatttagtaatcttagcagaaacgcttcacgaagcggtgaatgctccaaaatctgaacgcgaagactatttcagtaagattgaagagttagaggctacaattgaagagattacacataaaacacatttggaattaagcagaaattttatcacgccttttgatagagaagatatccacgctttggtaaaagccattgataacgtagctgattacatgcacggtgctgccagtagaatgcgtttgtatcaggtggaaaaaatcaccaagtccatcagaaaattaacagaaattaatttagaagcttgtcagttaatcaatgccggtgtaaagcaattgaaagacatgaaagaccacaaggctatcaaagaaacttgtaaaaaaatcaataaattagagagcaaagcggattctgtttttgataaagcggtggccgatatttttgaaaacgaaaccgatgtaaaaaacatcatcaagtataaagaggttctttctgctttagaatctgcttctgataaatgtaaaagtgtttccaacgtaatggaacaaatttcagtaaaacattcataaacagtttaatacaaatcgacttttatggattttactttattgttaatcatcatattcttagcgctggtatttgactatatcaatggttttcacgatgcggccaattccattgcaactattgttgctactaaagtattgactccgttccaagcagtattgtgggcggcttttttcaactttatggcctattgggtttttgggtttggagtagccgatacggtagccaaaacagcacataccagcagtattgacttaacggttattttagccggagtaatcgcggctattatttggaatttaattacttggtggaaaggtattccttcttcctcttcccataccttaatcggaggttttgccggagcagccattgcacacggttttcgcgatgttactgatcctgaacatgccggatttaaaattgtaaactggttaaaagaagccaaagagggagaattattaccgtcgggtgtctttattgttatcttgtttattgtattcgctccattgttgggtatgataatctcttattttatttcgctttggttgatgtactcttctaagaaaaatgtttggcctaaagtattaactgtagtgttgatgttgttggttggatggtttttatactccgttatggtgccatacgaagacatcaaaaaaccaagatttgaaagtgagttttggagtgtcgttacagagcctcataatataaaatggttcttagttgcttttattttctacagtttggccatattcaatttattattcagcagtttctctactgcaaaagctgaacgggtattgaaaaaaatgcaattactgtcttccgcagcctttagtttggggcacggtggaaatgactcccaaaaagtaatgggaattattgccgcggctgtagcggtttatattaaatccaatcctaacatcgatttatcagcgggttggttagatttgaatgtagtcttgccttccgaaaaagacggcgttaaaatagacggtgttatgccgggatggattccgcttacctgttacacagtaattgcattaggaaccttgagtggcggttggaaaattgtaaaaactatgggttccaaaatcaccaaagtaactgcttttgaaggcgtagtagccgaatcagccggagcgttgaccttgttttctacagagcactttaaaattccggtttcaaccacacatactattaccggttccattattggtgttggcgtaactaaaagggtttccgcggttcgttggggtgttacagtaaaattattgtgggcttggattttaaccattcctgtctcagcaatactggcagcagcggtctattttctccttaaagtttttatttaaacttatataaatcttaagccaactgttaggttggcttttttttatttgtttcggtaaaaaaacaattagattttatacttttaaaaaatactaagacctaggtttcttccaatattattgaaatgaaaaaaattctacaattgattattctgatgacatcattttctgtttcttctcaaattaccattgagcaaagtaaacaagacaatgacgttaagttatcggctttgccttattacagttttggaaaaggtattggaatgacttctcccgatagtatttttcaaatgaatattcgtttcagaatgcaaaatcgtgcgacttacgctaatgaagatggagaagatgctacctatgatggacaagtacgtcgtttgcgattgcgtttcgatggttatgtagggaatcctaaatttctatatgctattcaactttcttttgcaccgggcgatgtgggtgaagtgaaagaaggtgaaaacatcaacatcattcgcgatgccgtcgttttttaccgaccgaataagcactggaatatcagttttggacaaaccaaattacccggaaaccgtcaacgcgttaactcgtctggaggtttgcagttaaccgacagaaccattaataatgctaaatttactattgatcgtgactttgggtttcaagtgcacaatatgaatgagtttaaagacaaattctcttataacttcaaagcggcattatcgggtggagaaggccgaaatcaaaccggtaaagccgatgatggagtagctgtaaccggtaaaatagaactaatgccgttgggtgctttttccaaagacggtacttattttgaaggcgatattttacgcgaaaagaaacctaagttgttattatccggtgcctttcaacaaaacaatcatgcgcaacgtacgcaaggacaattggggaacgatttgttcgagagacgaactatgaaatcggtcttgctggatgctatgtttaaatacaacggttgggcggctatgatgagttatatgtctcgaaccactaatgaaaacgctatcaccgttaatccggaagatgttaccgaaagtaattatgtatttgtcggaaatggttttgattatcaagcgagttacaatacgaaatcgaactacgagttcatcgctcgttattcgatacaaaatgttggaaatgatattgctgccttagcgcccaatgtacgcgaatattctgtgggcgttaccaaatatatttgggaacacgcttttaaactgcaagccgaagtcaactacgatactctaaattattttgacggtagttccaaaaacaattggtatgtgcgttttcaggtagaaataggaatttaacataataaaattcggatattttttttttgtttagggaaagaatctatttttgcgattcaataaaataatcacaatgaaaaaaatcctattacacaccattttatttgtttcacttccaatctattctcagcaaatagggaatggaatgtcaattatcacagccaaacaacgccttgatctttctaaaggctatgaaggtgatgacaaaagcatagaaggaagtccatattttacaacaacatttttacccgctactgttaccggttatgaaggtatgtttttacttcgatataatgcttacaaagatgagatggaattccaaagcgaaggcaaaatacttcttgtgataaaatcagacagtatggaggtcaattttaccaacagcaataaaaagtacaaatacgcactatacaactctgacaaaggaaatgtcaaagggtttttggtaaagctatctaccggagaaaaagtttctttattcaagagagaaaaagtgaaactaattccaaaagtagaagctgcgaatagttatgccagtgaagttcctgctcactatgaatttcagagagaaaccttttttataaaaaaagaggacggaattgtaatttttcctaaaaacaaaaaagaactgataaaaatgtttcctgataaagagagccagattgtagattttttaaaaaacaatagtgtctctttttcaaaggagtctgatttggttacccttgtaactttcttaaattcaatttaagcttcatagttgcttgtttttctatttcaattttatctcaatccgttgagaaaaatattaaatacgatattaaattattgaaaataactaaaacctcttcggaggtttttttatttttttaacgtttgttccgatgtcgattggttaattttatctcaaaatcacattctatgaaactcaaaacaatatttctagtaacaattatgtccggtttgatgactggttatgcacaactagccccaatggattacaaagacggtgagcaaaatctcagtggcttcggtgtaaaacctcaaaacggactcaaagaaaaatcgggagttctcattttaccggcctggatgggcattgacgaacattctaaagaaagtgctgccgaactcgccaaactaggctattatgcttttgtagccgatatttatggtgttgacaagcgaccaaagaatgctgcagaagccggaaaaaatgccggttattacaaacaaaactttgccgattaccaaagacgtattcaattggcattagaccagttggtaaagcttggtgccaatccggataaaattgtagtcatgggttactgctttggtggtaccggtgctttagaagcggctagaggtaatttaaaagtgcaaggtgtcgtttcttttcacggtggtttagggaaagatacttctcgtgcggtaaacaaaatcaattccaaagtccttgtgcttcacggtgccgatgatccttatgtgcccaaagcagaaatcgatgcttttcaagcggaaatgaaaagttcaggcgccgattggcaaatggttttctatgctaatgctgttcacgctttcacccataaagatgccgggagtgacaacagcaaaggcgctgcctataatgaattagctgataaacgttcgtggattgcctttaaaaatttcttgaaagaggttttataaactaactttcttcaaaaaacgaagcccaaagcagcaattgttttgggcttcgtcatttctataaaatacaaaagccgacctggagcgatcgacttatgcggtgaggtgtaacttcctttacggaatcctcgtggcaaatataggtttaaattatgaattacgagttatgaattacgttttttatttctaattcctaattcgtaattcttaattcataattactcttctttctgtcccatcatcattaaataggctttcaaaaactcgtctaaattcccattcattacgccatcaacatcactggtttcataactggttctgacgtcttttactaatttataaggatgcattacgtaattgcggatttgcgaaccccattcgattttcatcttaccggcttctatatcactgcgcatttcctgacgctttttcaactcaatttcgtacaactgcgatttcaacatttgcatcgctcgttggcggttgtcttgttgtgaacgtgtttccgagcactgaatctgaatcccggttggtttgtgaaacaactgtactttggtttctactttgttcacattttgtccacccgcgccgctcgaacgagaggtaatgatttctatatcggcaggattaatttcaatttcaatggtatcatcggccaatggatacacataaacagaagcaaacgaagtatgacgcttggcattactgtcaaacggggaaatacgcaccaatcgatgcacgccgttttctccttttaaatacccaaaagcaaagtcgccttcaatttccaaagtcaccgttttaatgccggccacatcgccttcctgaaagttcagttctttcactttatagccttgattttcagcccacatcaaatacatgcgcatcaacatcgaagcccaatcacagctttctgtaccaccggcaccggccgtaatttgcaaaacggcactcaaactgtcaccttcatccgaaagcatgttgcggaattccaaattctcgatatgtgtattggccaactcaaactgatggtcaagttcttcctcagtcgcatcaccttctttgaagaattcgtaagaaatttgcagttcttccgtcaaactttcagccttgttaaaatcttccacccattttttcttcgagcgcaggtttttcacaataacttcagcttctttggcattgttccaaaagtcgggtgcaaaagttttttcttcttcattggtaatttcaatcagtttggcatcaatgtcaaagatacctcctcaacgcaccaaggcgttctacaataccttttatttgttcggtatttgtcataaataatgtagttttgtgttttaaattttagaagctgtttcccgctatccgttccaatctttttattgttgtcaccctgagcgcagtcgaagggcttttgccaaacaataaaaggatttccactactatcggggctaggcttaattgcaaaaatagactatctgactttcatatggaaataaatttaatcagcgataccgttaccaaaccgtcacccgaaatgctgcaagccatgttcaacgctaaagtaggcgatgacgtgttcaagcaagatcctaccgttaacgcttttgagaaaatggtagccgatttgtttgggatggaagccgcgttgtttttcccctccggaactatggccaaccaaaccgccattaaattaaacaccaatcccggtgatcaaatcatttgcgataaatggtcacacatccatttgtatgaagccggtggtgcttcttttaacagtggcgtgaatttcaatttactcgacggtcaacgaggtatgattacggctgaacaagtcgctgccgggattaatgaccccgagttttatcatgcccctttatccaaaatggtcagtatagaaaacactactaacaaaggcggtggcgcttgctatgacttagccgaattgcaaaaaatcaagcaagtttgtgttgataataatctcaaataccacttagatggtgcgcgtttgtggaatgctttggtagccaaaaagcaacatcccaaacaatacggcgttttgtttgataccatttcggtttgtttttccaaaggattgggcgcgcctataggttcagtcttagtgtctgatgccgaaaccatgcacaaagccttgcgcatccgaaaaatatttggcgggaatatgcgacaatcagggtatttagccgcggccggaatttacgctttgcaaaacaacatcaatcgattggaagacgatcaccgtagggctaaagagttgggacagctgttgcaacaattgccttgggttgccaatgtgtcgccgacagaaaccaatattgtgatttttgaagtcaaaaaaccactgaccgagaagcaagtaatcgagaccttaaaagccaaaggcatactcatcagttctatgggacaaggcaaattacgcatggtaacgcacctcgattacaagcaagtattacacgaatatgtattggaaaatttaggtaaagtgcagttctaagtcaaaaactgttttcctatagaaatcaagccaataagtaaaattaaaactagtgaaatcattctaaattttacttgtggaatgtaggctaacaattgtttgcccaaatacgaacctaccaaaccgatggcaaagagaaacggcacgtaaaccatatcgtgttggtggataaatccgttctgataatacactacggttcgggtcaaatcaatcatcatatcgatggccgccgaagtggcaataaaaacgcttttttccaaattaaaggctgccatagttaatcctctaatagcaccgccggttcctaataaaccggctgaaaaacctgaaaaaacgccacctaatgtggcattttttttattcggtagaatgattaaatcttttttgatcaggaaaaccaaactcatagccaccagaaaaatacctaaaagcatttccagccaatagctttgtaagtattttgatagtatgccaccaagaataacaaatagggcagaaggtaatccaatgtaaagcaataactttttatctaatcctcttcggaacaaggctattttactgaggttactcgacaagtgaaaaacggctgttaagcccagtaccgaatggaaatcgaaataaaaattacctatcggcacaaaaaatacagaagaaccaaagccaccaaccgtaccaataatttcagccaataaggccaagagtaaaaaagggtagctgatgttcatgcttatttaaataaatccatgcccggaatattcggcatgccttctttggcaacggcagcgagttcagcttcgttgacattagtcgctttttcgatggctttgttcaagactaaaatcaggtaatcttccaattgttctttgtcttctaacaaactttcatctatattgatggaacggattttacggttagcggtaatggttacatttagtaagttatcattgcttttttcatcaatcaatacggtgtctaaacgttgtttagtggcttcaattttttgttgggtttctttgagtttgcccatcatgttcatcatgtctccaaacataagtattcatttaaattaaagtgctaaggtaacaaatactgttaatttctaagtgcataacttccgaagttttgttaaagttatgcgggcataatacttatttttgttgattataattttacgatactaatgtcaaacgccatacaaccacctaaagcgaaaataattcccaaaatcctggaaaagcacggtcattcgagaaccgataattactattggtttaatgaaagagaaaatcctgaggtgattgattaccttaaccaagaaaacgactactaccaaaaatcgactgctcataccaaagattttcaaaacagtttgtttgaggaaatgaaagcccgagttaaggaagatgatgaatcggtgccgtatttctacaacggctattactatattacccgtttcgaaaaaggcaaagattacccaatccattctcgtaaaaaaggcagtttggaagcgcccgaagaaatcatgtttgattgcaacgcaatggccaaaggacatgcctattttaacttagccggcttgagtgtaagtgaagacaatgtttgggccagttttggtgttgatacggtttccagaagacagtacaccattcaaatcaagaacttgcaaaccggagaaattctgccggttaaaatagaaaacacgaccggtggcgcgacttgggccagtgacaataaaaccttattttattcgcgtaaagatgaacaaactttgcgtccggataaaatttacaaacacaaattagggacaagtcccgataaagacgaattggttttctttgaaaaggatgaaacttttgatgtttcggtttacaaatcgaaatcgaaaaaatatatcattatcaactccaacagtaccatgacaacggaataccgtatggttttatcggctacaccggatgcgaagttcacagttttccaaaaacgaactcgaggtttggagtattcgatgtcgcatttcggagatcatttttacatcgtaaccaataaagataaggcaaccaactttaagctgatgaaaacgccggaaaacgcgataggcaaagaaaattgggtagatgtgattccgcaccgagaagaggttttactggaagatattgatatttttaaggaatatttggtggttactgagcgttataatgggttgaatcaaattcgaatcatgccgtggaatggggaaggagactattatttgccttttgacagcgaaacctttacggcttatacgactaccaatttagattttgatacagaaatattgcgttatgcattccaatcattggccacgccttcgtcggtaatcgactttaatatgcgaacaaaaaccaaaacggttttaaaagagcaagaagttgttggcggtacttttgataaaaacaattatcaagaagaacgcgtttgggctacagcgcaagacggaacgcaagtgcctatttcgatggtgtatcgcaaaggattacaaaagaacggtaacaatccgaccttgttgtatgcttacggttcgtatggtgtaactatggattgctatttttcaacggttcgcttgagtttgttagaccgaggctttatttatgccatagcgcacattcgaggaggagaagatttagggcgaccatggtatgaaaatggcaaactcttaaaaaagaaaaatacttttacggattttatcgattgttcgaaatttttgattgaccaacaatacacgtcaaaccaacatttgtatgcagaaggcggttcggctggtggtcttttaatgggtgctattgttaatatggcaccgtctttataccacggcgtaatcgcacaagtaccgtttgtagacgtagtgaccacgatgttagacgacagtattccgcttacgaccggtgaatacgacgaatggggtaatccgaatgtgaagaagtattacaattatatgttatcatattcgccttatgacaatgttacggctcaggcgtatccgcatatgtatgtgtctacgggtttacacgattcacaagtgcaatattgggagccggccaaatgggtggccaaactcagagtcatgaaaacagacaacaatcaattgtacttggataccaatatggacgcgggacacggcggtgcttcgggaaggtttgaagccatcaaggaaatcgccaaagaatacagttttttgttagatttagaaggaataaaaaaatagtttaaaatattttattaaatttgcaacgtttgggagtctgttaaaatgacttcataactacgccttgactaatttattttatgaaagaagatataaaagcttacgataatgtattaagtttaatagggaatactccgctgattaaactcaacagaatcacagaatctttacctggaaacttctacgctaaagtggaagctttcaacccgggtcactccactaaagacagaattgcattatatattattgaagaggctgagagacaaggaattttaacgccgggtgataccatcatcgaaaccacttccggaaatactggttttagtttggctatggtaagtatcattaaaggatacaactgtattttggccgtaagttctaaatcgtctaaagataaaatagatatgttacgcagtttaggagctaaagtatatgtttgtccggctcatgtttctgccgatgatgagcgttcttactacaacgtagccaagcgtttacacgaagaaaccaaaggttcggtttatatcaatcagtattttaaccaattgaatattgatgcacattacaaaactacagggcctgaaatttgggaacaaactaacgggaaaatcacccatttagttgcttgtagcggaacgggcggaaccatttccggagcagctaagtttttaaaagaaaaaaatccgaatatccgaatattaggggttgatgcttttggttcagtattaaaaaaataccacgaaaccaaagagtttgatgccaacgaaatttatccatatcgcattgaaggtttagggaaaaatttaatccctacagcaactgattttgattcgattgatcactttatgaaagtgaccgacgaggaaagtgcacacactactcgtgagattgccaagaaagaaggtttgtttgtaggttatacttccggagcagttgtgcaagcgatcagacaatatgctgaagaaggagaatttaacgaaaacagtaatgttattgctattttcccggatcacggatctcgttatatgagcaaagtatttagtgatgattggatgaatgagcaaggtttctttgacagtgttaatgtagaagaaacacaaaaagtggaatttatcaagtagattagttactagacaatatgtatacaaagcgccgagtttatctcggcgctttttttccctaagaagtacttaagtgaatttagccccgattgtcccgatgtttcgggagaaatactttatacctgacaggttttacctgtgaggtataaagatagaacggaaagcgggaggatttgtactgggaaagatttgggagctgctctttaaacaaaaaaaacgccaagcaaaagcccggcgttttttatctaatatctgatatctaatattactcttgcatggtgtggtaaacgttcatcacgtcgtcgtcttcctcaattttttccaatagtttttcaacatcggctatttgatcttcggtcaactctttggtgatttgcggaattctgtcaaaaccggaagataaaatctctaaaccgcggttttccaattctttttggatagcaccaaagctttcgaaaggcgcatacatcacgatgccgtcttcctcatcggcaaaaatttcttctacaccgaaatcaatcatttccaattctaattcttctacatcttgtccggcagccggaatacgaaagttacaagtgtggtcgaacatgaattctaccgagccttgcgtgcccaaagtaccgttacatttgttaaagtaacttctaatattggctactgtacggttattgttgtcggtcgccgtttcgattaggacagcgattccgtgaggtgcataaccttcaaacaatacttctttatagttggctgtatctttatcagtggcttttttaatggcacgttccacgttttctttaggcatattggccgctttggcattttgcataacagctctcaaacgcgaattagcttccgggtttggtccaccttcttttaccgccatcacgatatcttttccgatacgagtaaacgctttggccatagctgcccaacgtttcatttttcttccttttctaaattcaaatgctcttcccattgctgatagaatttgttttaatttgagtgcaaaaataaggtaataatcgattaatgcaaatgatagtctttacaaattatcccaccggaacatgactggagataaaggtttctcctgtgttattccactggtctattagggtgtttttttcttgaaaattggccgagttggttttgttgtaggtgtcaatttctttattcacctgttttaccatagtgttgtaattgtcgatttcctctttggttcggtctttgtctgatttggattcaagcgattttttagctgcttcaaatttttcattgaacatcataaaagccactactttcggggcgaattgttctccttgttttttgtagaattccaaagcttttttggtaatcaaaaccatcgaattgtccgtgccgaaaggttttacagttttcagcttttccaagccttcattggcatattgtaccaaagtagttgcattttgttggattccgccgatgtcgtttttttctatcgcattagacaaatacaaatcggttacattggctttaaagaagattaggtataactcggtgtggtaggcaaaaacttcgtttgagattttgattttttgccctaattcactagtgttctccgagagtgtaatgttgtatttagcgcagaaattcttttgggctaactctgctttctcgttttcggcatcgatttttttattgaccaaatcacgtgtcatgatgtacgcttccatcgcatcataggattgctcggccacttcttgcatgtcgataattttatcgtattcttcgttgatgtttttttctgaaatacttaagtattccaaaatttggttgcggtattccacatcaccttggtagccgtcttttaaaccggcaatttttttactggccgtttggatgctttttaccaatagttttcgggtgttgtcaatgcgacgtgcacttttggaatgtgccacggccgaagtgtatttccacatgcttctggaaatattttcttgctctttgccgatataattcaaatagtctaccggtgttttaaattcctgtgcttgcaaactgatgctggcaaaaaacactaaagtgataagcagtctttttttcataagttagggtttaagggtaaggcagtcggataaaatattcaacgcttcggcgatatgataattttgttggatttctttgcttctttccaggttggtacttttaaggtattcgtcgaacttttgattgtcaacatcgattgaattttgaacgatggtaatgtcttgcgctgtttctccggtctctttaatggttttccaaagcacattcattttattgacatcttcaaaaacattcgagaattgtaatgttattggcggtaaatcaccttcatacaatggattgattttcgcgttgagtgctatgacttgcttagcataaacattattttgaatgcgaatttgactctgttcgatcacttttgattttgacccgtcttccggtaaacgattgtattttagactaacgctgagcacatcgttttttaaagccgttttattgctgtcttctcgcggcatttgtttgtcgaataacagcggaatttctaaatcaggtgtaataccaatatattgattgctctttccggtaatgcgatagaatttttctaaagtcagttttacgaactcctgattttcttcatcaataggaataatgcgctgcatcgaagctttgcctaaagatcgattgcctataatgatcgctcggttgtaatcttgcatagcattggcaaaaaattcgctggccgaagccgaaaagccgttaatcatcacaatcatcggtccgttgtaaatggtaccgcgattttgatctttgagtatttcacgcttttgcttgccatcgctcattacggctaacggaccaacatcgataaatagtccgctcaaacgaatggcttcttccatcgagccgccgccgttgttttgaatatcgattataataccgctaacaccatcttctttaagcttgtaaacctctttggctacatcattacttacgcttgattttccattttcaaacgtcgcataaaaactcggaattctgatgtatccaaaataagcttcgccttttttgagtttgaaactgtacacgttattctgatagtctttcatgacttttttccgtaaacgaacgctgtagatttctccgctcttttttctgaaggtaaaatccgcttcttggtattctttggaagtgattatttcttcgattttttttaacgaagaacaggcaatatggtattcgttgttttgatgggcaactttgagcagttgatcgcctttgtttattttttcactgaaataggccgaactgccgggaatgatttcttccaccgtcatttcgtctttgtcagacatcgccatataaaaaccgaaagtcatattgtcggaactaactgtagcatagaaagacgatttgtcactttcggaaaaataatcagtatgcggatcaaaataggagcaaaaggtgctgaaaaacagactgtaaaattcacttttcgttaaaacgtaactttttgatttacaatcgtattgctccattactttggctttactttcgttggctaacttgtcaaagtgttgggtaagcgaatctttgttagtgctcaattcggccacttcacgcagcacattgaacagcaatcgctttttgtaaagatgttgtaattctttttcgtctttggcataagggaaagccttgcgggaaaattgcacttgttcgctgctgcttagtggaaatggttcttttttaatagcttccaatagccttttgtaacgctcagttgttttggtataagccgaataaaagtcggttaaaaacgcacaattattattgtttaaataatcgtcaatttggtattgatgcttttctaaggctttgatttcaggcgcaatgaataagcgattgtcttcgtctaagcgactcaaaaaagttttaaaaacataaaccgataaactgtcgtctatcggtttaggcttgtagtgaaaatcctgtatgagcttgttgatttttgccacagtttcacatggattcttttcggtttgcccaaagagaaaaaaaggaaaaactaaagcggctactaaggatttggtcacacggttattttttgtagaaaggcattttaactactttggcctttactttattatttctgatttggataaagatttccgagtcaactgcagtaaaatccgtagccacataacccataccgatacctttgcctaaggacggcgccatagttccggaagttacaataccgatgttgtttccgttggcatccacaatttcgtaatcgtgtctcggaatacctctttcgatcaattcaaaaccgataagtttgcgcgtcacgccggcttctttttgttttttcagattttccgaattggtgaagtctttggtgaatttggtaatccaacctaaaccggcttcaataggcgaagtcgtatcattgatatcgttgccatacaagcagaatcccatttccaaacgaagtgtatcacgtgctgctaagccaattggtttgataccgaatgcggctcccgcttcaaaaactttgttccaaacttgctctacttctgaattcttgcaataaatttcgaatccgcccgaaccggtataacccgttgcagagatgattacattgtcgattccggcaaatggtccgacttcaaaatgatagtatttgatagctgctaaatcaactgaggtaagtgattgcatggcttccacagcttttggtccttggatagccaacaacgaatagtcgtcggataagttgcgcatgtcaacacctaaatcgttgtgtgatgaaatccagttccaatctttttcaatattggaagcattgacaaccaataaatattggtcttctttcatgcggtaaacgattaaatcatctacaataccaccatcattattaggtaagcaagagtattgtgcacgtccgatttctaaaaccgaagcatcattggaagtcactttttggattagtgccaaagcgttttcaccggttagtaaaaattcacccatgtgggaaacgtcgaacacaccaacaccgtttcttacggtttcgtgttcggcattcacaccttcatattgtaccggcatattgtaaccagcaaacggtaccatcttggcacctaaactctcatgaatgtgtgataaagcagtatttttcattgttatttaaattgtgttgttgtttgttttaaattttgatattgtcattgaaattgtaaactattttctaacaaacggcggtaaaagtttagtgctcacttcaccaaaaccaatgcggacagaactgttttgacaatggcctttaatggttaccgtatcgttatcgttaatgaatttgcgttctgttccatcactcatggttaatggatttttgccgccccaagtcaactccaacatcgaaccgaaactgtctggtgtcggacccgaaatggttccggaacccatcatatcacccgaatttacccgacaaccgttggaagtatgatgcgccaattgttgtgacattgaccaatacatgtatttgaaattcgatttggaaaccaatgtcggttcagcgttttcaggttcaatataaacttccaagttaatatcgaaagcatgctttcctttttgttgtaaatagggcagtggtgttggctcttgaaccgggcctttgcatcggaacggctccaaggcatccatagtaacaatccacggagaaatagaggacgcaaagtttttggctaagaatggtccgagtggcacatattcccatttttgaatgtcgcgtgcactccaatcgttgagcaataccataccgaaaatataatcttccgcttctgtaaccggaatattttctcccataatattggcatcggtagtaataaaagcagtttccaattcgaaatcgactaaacgtgacggaccgaaaacaggagaagtttcgccattcggtaaggtttgtcccattggtctgtgaatcggaatgcctgaaggaatgatggtagaacttctaccgtgataaccaacgggaatgtggagccaattcggtaacaaagcattggccggatctcggaacattttacctacattggttgcgtgctctttactggaataaaaatcggtgtaatcaccaattaaaaccggtaattgcatttctacttcatccatagtgaagatgacaatttctcggtgttccggattgtctctgagtttcggattattgctgtcgaaaatatcaccgatgcgatttcgtaccaaacgccaagtttttttaccgtcggaaataaaatcgttcaaggtgtcttgcatgaacatatcatcggttaaatcaatgccttcgaaataattcaattgttgtaaagcgcccaaatcgatagcgtaatctcctatacgggttccgatggttatcacatcatctttggttaaaaaaacaccgaacggaatattttggatagggaagtcgctgttgtcgggaacgttaagccatgattttcgattaggattgttagttgaattgggcatgatgctgttgatttagttgttgaaaaattagcaatcaaatatatcattaactattaatttaacaaacgattttcgtaattttgacctcaatttaacgaaatatattgaaatgcaacgcgacgaacaaatttttgacttaatccttgaagaacaagacagacaaattcagggaattgaactcattgcctctgagaactttgttagtgatcaagtaatggaagccgccggctcagtgcttactaataagtatgcggaaggctatcccggaaaaagatattatggtggttgtgaagtggtagatgtgattgaacaaattgccatcgacagagccaaagctttgtttggtgccgaatatgtaaatgtacaaccacattcaggttcacaagccaatactgcagtttttgcggcttgtttgaaaccgggcgacaaaattttaggattcgatttgtctcacggcggtcacttgacacacggttcgccggtaaacttttccggaaaactatacagtccggtattttacggagtagagcaggaaaccggtgttttgaactatgacaagattcaggaaattgccactaaagagcaacctaaaatgattatagccggtgcttcggcttattctcgtgacatggattttaaacgcttccgtgaaattgctgatagcgttggtgctttattgttggccgatatttcgcatcctgccggtttaattgctaaaggtttaatgaacgacccaattccacattgtcatattgtaacgactactacgcacaaaacattgcgcggtccaagaggcggaatgataatgatggggaaagatttcgaaaatccttggggattgactacgccgaaaggagaaatcagaatgatgtcgcatgttttagacatgtcggttttcccgggtaaccaaggcggacctttagaacatattattgctgccaaagcagtagcttttggtgaagccttgtcagatgaattctttacttacgctttacaagtacaaaaaaatgccaaagccatggctgaagcttttgtaaaaagaggttacaacttgatttcgggaggaacggataaccacatgatgttgatcgatttgagaaacaaaaacatcaccggtaaagatgctgaaatcgctttaggaaaagccgaaatcacggtgaacaaaaacatggtgccttttgacgataaatcaccttttgttacttccggtattcgtgttggaacgcctgccattaccactcgtggtttggtggaaagtgatatggaagcgatagtcgatttaatagaccgcgttataaacaatgcaactaacgatgaaatgttggagtctatagccgatgaagtaaatgaaatgatgagcgaaagagcaattttcgtttactaaatagagatttaaatttgatactaaaaaccttcaaaagccattttgaaggttttttatttgaccactatatcgtatttctccaataatccttttaagccatccgtactaaagacggcttttttgattttatttttttccggatcaaaagcatactcataactggttgaaaaatcggctttgttggcaatggtgtcgataaaaacagttcttctcaagttacagttgtcgaataacacttcggtcaaatcacaacccataaaatctacggctatcatactgcagttgatgaattgcattttacgaagcttcaaagcgtaaaacttagcataatccagcaaacaatccttgaagtgaaattcataaatcacttggtctgtcatggcaaaattgacattggtaaaattgcatttgtggaaccaaactccacgcagcgagacgtagttgattttagcatctttgaaattacagtcgaaaaaagtacaatcgacaaacgaaatggttttgaaagtgcaattcgtaaagtcgcagtgacggaacgtacaattctcaaattctttatattgggtattgtcgtcgtcaaaaatgtcaaactgaaattcttgatccaagatataatcggaagccataatgaaatttttagcggtaaatctactaaataaaataccaaatctcagctaaccagtgttgataaaatttaagcgatcgctttagtttttaaaccaattcagaaaagataatagtacatttggttgccgccaaaacaataaagttttctctaaaatttaatcatgacagcaggtactaacttttttaattattgtccgagttgcagctcgacaagttttgactacaacaacaatttcaaatttcattgctatgattgcgacttcgtattgtaccacaacattgcggcggctgttgccttggtttttacatttgaagataaaattttgtttacggttagaaatgtcgatccggacaaaggcaagctcgacttacccggtggttttatcgatcccggtgaaactgccgaagaagccgcttgccgtgaaacagcagaagaattaggcctagaaatagcgccgagtgatttgaaatatattactacttcgcccaatcattatttgtataaaaatgtcgcttaccgcacgatggatattttttatgaatgtcgattaagttcggctacgattgcagtgaaggctgaagatgaaattcaggaattggtttggctgcagcgcggggcaatcgatttgagttgcatcggatttgtttctgtgaaaaaagttattggcgaatacttttaataaccagccaattgcaaacgctttcattctttttttactttttaaatcatttttgatttgcaagtttgtcaaatatgcctatatttgcacccacaaaaaggcctcgtggcgcaactgaatagcgcatctgattacggctcagaaggttacaggtttgaatcctgtcgaggtcacttaaaactataaagtctacattttatgtagactttttttattagattttattttggaataggattatttcagtgcctttttagtcacataataccgccaagctaatatagccaattgccattttttagctttggccggatctaatctttgtttggtaaagctgggtaacagtactttatttagtttagctaagagtttatacatttgtttgtatttgttgcaaaaataaaaaaaaaccgccttaagcggtttttaacttctaagccttttgtgttttcaaactcgatttggtttttttgagttcttttcgggcttcttctaattcttttttggctttttccagttcttttttggaatcttctaaatccttgtcggttgactcttcattttccaacttgttgtgtttcattaatcggtcaatttgctcttgcatttttttcatttgctccgccatatcttcatttccgttgaaattaaatccgggaaattctctttttgaaaacaagtcgttttggttgtttttctgaatttcatctaattcttcttgggtatagtcttcgccgccttcaattactttaccgtcttcaattatcagtggctttttgtcatctctcaagattttgattctggatttcgcttgcccgaaaccttgtccattcggcaatttgaaatcaaatttatccaccgataaactgtcgctgtcaaagttaaattggaatggcttcatcatgtcatctcccgaaaaaccactgataaatggattgttacccaaacggttttccggttcgccaaaacctacagcatcgtcttgtttgtaaaacttgatggttggtattgggttaggtgaattgtaactcaaagtacctttactgccactttggtcttcaaaatcaacttcaatggctgtaatctcttttttgtcattgcgccttacgttgttgtatttgatggttataccatactcttttaatgctttgatatcgtctttcatttcttcctcgggcgtatttttgttccaagtcataacaacattgtctttagccgttttatcgcttaaagaaaatgattggcttttggtttgtgccaaacctgagaaggaatgtaatgcgaatattgttagcaataaaaaatactttttcatacggtaactatttattaaaggttaaacatattatgattcaaacttataaacttgtccgtttgaggaagaacagattgacaaaactttaacttttttgactggtctttttcaaatcggctttggctttttctaattctgctttagctttcatcatttcttctttggctttcagcatctccgctttagccttttccatctcggctttggctttttccatgtcgggttttgacaattccatttctctgcgtgctctttccatctccggtctggcacgaagcatttctttacgcgcaagttccctgcttttgctcatttgtagacgcatttccggtttcattctttggatttggatttgtgcgtttttcatagcattacctctgattttagcaatatcttcaccattgatgaatacttgtttgtcttcaccattaccgtcagtttcaattttgatattaaattcgcctttagcttccgcttcttcaatggctttttcaatttcactgtcatcagaaatcactttaccgttgatgatgaccaaaggtttttgggaacccttgcgaattaagatattggctttatccacatcgtgccaagcaaaaggttccggtaattcgggcatttcgggcatttccggaaattcaggatgctcaggcatttcgaaatcgaagtcaaaattaaaatcactcacctcggccaagctgtcaccgtcaaagtgaaatacaaaaggttctttatcatccgtcttcatcccgggaacattggcatatacgcgcattcctcttggcttcccaaatccgattgcttcctcgtttttataaaaatgaataggagtaatagggtcatttccggctacttgcgatgcacctttattgccctttttgtctttgaattcgactttaattcctgtaatttcaccattttcattgcgtttgattttagaatatttcaaggttacaccgtgcttttctttcaagcgttgggcttctcttttaaggtcggcatcagaggtgtttttatcgataaccaaacgaacttcatcttttggattggtttggcttaaaacggtattacctattttttcctgagcaatggttttgatttggaagagcagcacaaaaccgattaaaaccggtaagatcagtgagtacttccaggcatttctttgttgggattgattggtgtttaacataacgattcgttttttgattaatgattgataaaaattattggttattgagaggcaattttgattagaaattgctttgagtaaagccatttgatacactttaggattttccaattgctgtacagctttgtggtcggctatgtattctaagttttgaataatggcctttttgtagagccatacaaaagggctgaaccaaaaaatgatacagaacagtttagccaccataacatcaaaggaatgtttttctcgactgtgtactttttcgtgtaatagtatgctttgcaattcttcgggtgtgtacagtgaggagttgtaaacaatgtaattgaaaaatgaaaaaggggctatattttggtttaaatcaacaagggtaaaatctcctttcttagttttttgctgattgtatagcattcgaaacagtgaggtaaaattgattgcaattcgggccaataaaaacaatgcaatggccagataaccaatccaaactaatgacatccaatcgaaaggttcagcaacctgaatctctggtgttgccaccgtatttttagaagaataggctactaaatcggccaaagccattttaggcttttcaacataaaccactttggtgatattgaaccaaggcaatagaagcgcagtaaacaaaccggttaacaaaaaccaacgattgctgttaaaaaaagtctctttgcgcaccaaaaaatgataggccaaataaaaagcagctatcagtgcgctcgactttaaaaggttgatgaataaggtttccatatcatttcttttgttcgatgatggctaaaatttctctgagttcctcggccgaaattttttcttcttccgcaaaaaaggaaaccaagtttttgtacgagctgttaaaataattttcaatcgccgtattcataaatcgctttcggtactcttccatttttacgataggatagtactggtgtgtattgccaaaagcagtatggccaacaaaacctttgtcttctaagtttctgataatcgtagaaagcgtgttgtagtgcggttggtcttctgtgatttcggctaagacttctttcacgaaagcctttttcagcttccacaaaatttgcatgatttcttcttccttgttggttagcttttgcatggttatgtttttaatcgttttatcaaatggacaaaacaaacctataactatttttgtagttacacaactaaatttatagttatttaactaaattttaagttttaaagcgaatttaagtgagaaaatagttgatttacaatggtttgttttcagtttgaatgagtttatacacccaaaatccacaggcagttcccagcaatccgaatgttcccatatagagccaattcatttggtagccatcggttttatagtattctataatttccattccgactttggcactgaggatgtgagccaaactgaaactcatggtataaatggccatatagcgaccttcgtgaccctttggtgcgcgactcagtgctaccgaattagagaatggaaaggcaaacatttcaccgaaagtcataaacaacatcataatcgttaagatgccaacccaagtattaatcagcattaagaacatgctaatagccataagcaaacagcctagggttaccatctttactttgttgattttctttctttccacataacttactatcgccatttcgcaaaagaaaaccagcaagccgttcatagttagcaacaatccggtttgcaattcagataaattaaattgctctctgtggtagagtggaattgtggtaaaaacttgaaaaaataatatccctgaaaccaagcaagtaaacaaaaacagccaaaacggtttgtctttaaaaaccgaatgggttaatatttctcccggatgttctttgtcggtgaacgccgattttttcttctcttttactttgagccagaaaattgaaatggctatgatacaactgaggccgtcgacccaaaacaagcctttatacccaatactcataatgatcaaaccacctaaagccggaccggcagcgaaacctagatttatggccaaacgaactaaagttaatgcacgtgtacgattttccggtttggcataagctccaatagaaacaaacatcgccggtcggtacatatcggctaccgacatgattacgaacatacttatgcaaagtccgataaagctggtaacaaactgtatcgccaaaaacaacaaaccgctggtgagcaaactgaaaatcatgattttatagaatccaattttgtctgacagtttgccgcccagccaagaaccaagcatggaaccgataccgaaacaaaccataatccatccaacttgtccatagctaaatcctaaatcttcttttagatatttagacaagaaaggcaacaccatggttccggcacgattgataaaagtaatcaaggttagtatccaaatttctctggaaaaacctttgaagttatcgatatagcgttggaaagccgttttaagcatgaggtttggttgatgctgtaaaggtacgaagttcctgctttttggagccaacaactttctgagtttcccaacattttttgtgttatttttgttgaaaagtgtccgatgaaaaaactactttcttttttactgttaatgcatgtttctttggcgatgtcacaagaaactgctgaagaatttcaagccaatctcaacagagaatttgccaatcgcgaggaaagtccgctcaccgatgaagatttcaaaatattccaatcgctggaattttatcctattgatgagaagtttacagtagaggctaaatttgtcagaacgcctaaagaaaaggttttcaaaatgaaaacttcaaccactcgtttaccggaatacaagaagtatggagaactgttgtttcaaattgacggaaaatcgtttaagcttaatgtttaccaaaacatcgagttgagtaaaaaagaaggctatgaagattatttgtttttgccattttctgatttgacctgcggcaaagaaagctatatcggcggtcgctacattgatatgcgaattcctaaaaccaatacggtgactatcgaatttaacaaagcatataatccgtattgcgcttacaatcataaatattcttgtccgattgtgcctttggaaaacgatttgcctatagaaattttggcaggcgttaaaaaattccacgactgatgttttacaacttacatacgcatcgtttcactaataattcggaaataaccgaattggtaaaccaatatccttgggagtttgttgcaggtattccacagtattccatcggtattcatccttggtatatagtcgaaaatcgattggaaagcgatttgaaattcatggaacaaaagttacaattacccgaatgttgggcattgggtgaatgtggtttggacaagcgaatcgacatccctatgaccttgcaaactgaagtttttgaaaaacaaattaccttggccgaaaagtaccaaaaacctttagtattgcatttggtagcggcttatcaggaattgattgctattcataaaaaacgacctatcaaagtaccggttattttacatggattttctaaaaatgagcaaaccgcaaagtccttattggattgtggtttttatttgtcttttgggaaatatttgttgcggaatcccgaattggcagctgtgtttcaatcggtgcccaatgatcgcttttttttggaaacagataccatagaggaaacattaatagaagtttacgataaagcttcagtcattaaagctcttagtttaactgaattgaaaaaacaagttgcttcaaactggagcaaagtttttaagttataaatcttttttacaaagacattctactttttacactacgtatttttccttatttttgccgctttaaaatcgtatttcattaattcgcattacaatggcaaagtggcaggaaagagctgaactattatttaaagaagaaggattaaatcgtttaaaaaaagcgaatgttttggtagttggattgggtggcgttggctcgtttgcggctgagtttttggccagagccggtgtaggaaacatgaccatagtagatggcgatgtagttgatattacgaacattaaccgacagttacccgctttgcattctacggtaggattgcccaaagtaagtttgatggctgcgcgtttgttggatattaatcccgagttgaatttaattcccgtacaagaatttctctctcccgaaagagccaacgaaatagttaccgccgattttgattacgtacttgattgtatcgatagcgtaacgcctaaattaaatttaattatggcggccaaaagaaaaggcgtgaaagtcatcagtaatatgggtgccggtggcaaatatgaagcttctaaggtaaaagtgaccgatatccgtaaaaccgattattgtccgttagcgaaagtggtacgaaagcgtcttaaaaaagaaggcatttcgagtggcgtgaaagtagtttattcctatgaaagacctgatgaaagcagtgtaaaaatgacggatggaaccaacttcaaaaaatcgttttacggaaccaacagttggatgccttgtttgtttggattgcatgctgctgaaaccgtggtgaaatatttgctaaaaaaagataattagatggctcattcagaccgaccgattctaaaacttccattaacgcctttcgacctaagtgttgaagtgttgggattattagcgttgattggcttttggatatttaccattaacttttatccgttactgcccgaagttattccaacccattttggcggtggcggtaaacccgatggctttggttccaaagaagctattttaggattgcctatagtgtcaacagttttatatgtgatgttgactgtttttagtcggtttccacacaaaatgaattatacggtaaccattactgaagccaatgctgaagtacaataccgaatcatgaccagaatgattagggtattaaaagtgtttgtcttatttgtattttttacattggattacaaaacagtacaaatcgctctagcttggccggatgtattgggaagctggtttttgctcttactgtttgcaatgattttcggttcgctattttattttttaatccaattgtctaaaaactcttaatccgattatctcagctcctcagaaccttatcatgatacaaaccgtaattttcgacatggatggcgtaattgtagataccgaaccggtacatcattatgcttacaaccaacactttaaacaactaggcataaccattacacccgaaatgtatgcttcgtttaccggaaattcgactaaaaatatttttgagcgattgaaagccgaatttcaattggcagaagatgtcaatactttggtagaaaccaagcgcgaactatttaatgaagcattcgatcaaaaggaagatttgtttctattggaaggcgtagaagatttgattaaagcattacacgctaacggaatgcaattggttttagcttcttcatcagcaactgtaaccatcaatagaatttttaatcgtttcggattacatcaatatttttcccatattgtttcgggtgaagattttccgaagtcgaaaccacatccggccatattccaacatgcagcttttttagcgcaaacacctgtggaaaattgcatagtgattgaagacagtactaatggaatattagcagccaaagcagccggaatttactgtatcggttacgacagttttcactccaaaatgcaagattattctaaagccgataaagtaatcaaacactttaacgagctgagttacgacagtattaaatcgattacaaccagttagttaactttattctctatcaggcaaagtatgtttggctaaaacccttttactgtctgactttacagaggcttcttttcgcataccccaaaaaaaatcggatgatttctttctggcttcttctaagttaacaatcggtaacggatagtttttacccggtatgaactcatgaaaaacttgctcaattggagttaacttccagggttcatggacaaatggagtaggcaagtgagccaattccggaacccattttttgataaactcaccttccggatcgtgttctacagcattttttaccggattgtaaacacgtaaagtattgattcccgttacgccggcttgcatttgaatttgcggataatgaatgccgggttcaaaatctaggaactgttgggcaaggtgtggactacaattttgccaaggttgaaacaaatgatgggtgtaaaacgaaactaccaaagcgcgcatacgaaagtttaaataaccggttgtatttaggcaacgcatacaagcatctaccataggtactccggttttacccatagcccaagacacatgccaatcttcacgaacgttttgttttaagttgtggtaacctttattcactgcaacaaattccatttcgcattccatttcaaacttctgaataaaatgagcttgccatcgtaaacgagaagcaaaattggcaatttgacgtttgtttttaccgcttttggcttttaaaccggcagcttggtatacttgtcgtaccgataaatttccccaagctatgtaaggtgaaagtcgactgcaacctttgcgagctgcttcgggtttggagatgtgtcgactgtagttttcaacgcgttcttctaaaaatgaattcaaatagcgaaatccggttttagtacctcctttttgaaaaggtgcgtttttgtctgtttttaaactcggtatggtaaaataattttctatggcttctaattcgcgatatttgataaaacttcggctatcggctttgaacggaaaacaaggtttctccataaaatcgtaccaatcttctttccaatgttttcgattttgcaatccgcgaattacaccgtttgtaataaattcatgccaaggaataacatgttctttcaatatctcggccacagccaaatctcgatcataagtaactttaagaccggtttcctgatgagaataaacaccgcgaacagaaattgattcaattaattttttgaacacggtttcggcttcttcttctactataagtatttgggtatggtaaggcaaaagttcggcttgtagttcttctaaagattgtttgataaaatcgaaatggcgctgactgtaatgcgaatcgttttgcaatgatggctccaaaatataaagtaaaagaacttttccctgagcctccaaggcacggcaaagcgcttcgttatcgtgcaagcgtaaatctcttttgaaccaaactatattcattatccgacagcttctttataaacggtcaaacatttttctcgggctgttttatggtcaactacaggttgcggataggataaactattcagttccggtatccatttcttgatgtaaaccaaatctttatcaaactttttaatttgttcagtcggattgaaaattctgaagtatggcgaggcatcaacgccactaccggctgcccattgccaattgcctacgttgctggcttgttcgtaatccaatagtttttgagcaaagtaagcttcgccccagcgccaatcaataagtaaatgtttgcacaaaaagctggcagtaatcattcgaaccctgttgtgcatgtgaccggtagcgttgagttcacgcatgccggcatccacaaaaggataaccggttttgccttcacaccattgttggaataaggtttcattgttatcccactgaatttcatcgtatttgggtttgaaacttttattgactgtatgtggaaaatgccacagaatttgcatgaaaaattcacgccaaatcagttctttcaaaaaagtttcatttttgctttgcaatgctttggagaccatttgacgcaccgatacagctccgaagcgcaaataaattccaagataagatgtcttattcattgccggaaagttgcgcgtagcttcgtagttatcgataagcgattcggaaacatcaaatggagtgaccgcaatacttgatggctcaaaaccaatctcatccaaacttaaaaacggataggtgtgaagtgctattttttgtaagtaagcttccgaattgtaatgggttaagcttatttttttgaaattttccttccacttattagagtaaggtgtataaactacataaggtgttccatcgtcttttacgacttcgcttttctcaaaaattacctggtctttgctggttttgaattcgatgccgaactctttaaaaagttggaacaattctaaatcgcgcttcctggcatatggttcataatcgtggttggtataaaccgtttttatgctgttttcagacaatatactgttgtaaacttcgaacggatctccgtaaaaaaccgctaatgacttgccgattttttgaagctgactttgtattttcgatagttgatcatgtatgaatgttactctcgaatcgttcttaggcaattgcgaaagtatgttttgatcaaaaataaaaataggtaaaacttcctcatcactttgtagagcgtgaaagaatccggcgttatcctctaatcgcaagtcgcgtctaaaccagaatatgttcattagcttaatcttgttaaactttaattatttaccaacaaagtcgacataccgccatctacatggaaaatctgacctgaaatccacgaactgtcttcgcttaatagaaatcttgcggttttagccatgtcttcggcagtaccgactctctttaaagggtgacgttgggccgatttttcttttttctcctcattactcaagaatttttcagccaatggcgtatcggtcaacgaaggtgctatgacattcactctgattttcggagcatactcggctgctaaagctttggcaaaaccttcgatagctcctttggccgcggcaacactggtgtgaaaaggcattcccattccggctgccactgaactaaataaaacaacactcgattggtttgccgctgataaattaggcaatacactttgaagcactttgatcatactaataaagttgatttgcaaatcgctttcaaatgcttccggttttaatcctcgaaacgggcgtaaattgatgctgcccggacaatacacaaatccgtcaataacttcaggtaaaagtgcagtattaagaacatcagttgccgcatcaaacgggatgtgtgttacgttcatatcacttatcgcttctttagttctggaagctacgaatactttgttttcgtattgcaattctttagcaatcgctaaaccgattccgtaagaaccgcctatgagtaaaatgtttttcatcttatttttctgtgaattctccaaataattcggttagttttttgtgacggtaatcaaagatttccttcaatttaggtttcaccaaaaacggatgcaccaattgtccaataaagcccattggtactttgtaatccacgatatcttccatctctacaccacccggaatttcttttaaaaagtgtttgtgatgccacagtgcgtatggaccaaatcgttgttcatcaacaaaatattttttgtccactacatgcgtaatttcggttacccatttcataggtatacctaaaaccggtgttacaatatattggatgatttgtccgggaaacattggcctgtcatctccggacaaggttttgaaacccatataatccggtgtaatagtttttagatttttagggtcagatagaaacgcccaagcttcgtctaaagaaatgggcaagttttgtttggtatgtaaggtataaattttcatgttgatttaactttggtgtaaaaatacaaattgtttaaccataaaagataaaagttaaacaaaaataatttcatttaagttttaattaacatttgaaactcacacaatttgtaattttgaacaaactaaataaaacatcatgagaaaaattattttagcattggctgtattgatagccaattttacgattgaagcccaagtgaaaacgccacagccgagtccgaaatctactttaaaccaagtagttggattgacagatgtaaccgttgagtattccagaccaagcgctaaaggaagacctgtttttggagatttagttccatttggtcgtctttggagaactggtgccaatcagaattcaatggttagttttagtgaagatgttgtgattaaaggcaatactttaaagaaaggtaaatatgctattttcactacaccaaaggctgatatgtgggaagtggttttctacactgatactgacaattggggaactccggaaaaatgggatgaaaacaaagtagctttgagaaccaatgttgacccgattactttgggtaataacgtagaaacttttaccatcgccatcaataatttaaccaatgacagtgcaactttagatatttcatgggaaaaaacaatggtttccgttaagtttgaagtgccaacgcaaaaagctgctatggccagtattactaaagtattagccggtccaacagctggagactacttttcatcggctcaatatttataccaatcagaaggtgatttaaacaaagctttagaatatgtaaacaaagcagtatctatggctaaaccggatgatgttcctttttggcatttgcgtttgaaatcgttaatccaagctaaaatgggtaacaaatcgggcgctatcgaaaccgctaaattatcattagccggtgcggagaaagctaacaatgctgattatgttaagatgaataacgacagtattaaagaatggggtaagaaataatcgattccaaactaaaagattaaccacgaatccaatagaattcgtggtttttttatgcagttattttttgtttgctacgacttaaagtttgcaatagtaatgagagtactatggttaatgacgctccaataaagttaagccataaatatcccagtttttcctgtccggtaggataaatatgaatcgcatgatagtaaatgaaaaatatggtagtctgactgattacagcgccgtaaaaaattgcattggctttgacatatttaatgtagaaaccaaccaagaaaacgcctaataccgtaccgtagaaaatggaaccgacaatgttaaccaattgaataaggttttcaaacaaggtcccgacacaagcaaataagatggcaataacgccccagagtaaagtgaagtattttgttgcattgacaaagtgtttttccgatttttcggttttgatatttcgtttgtaaatgtctatcgccgtagtggatgccaaagccgttaagccggaagcggaagacgacatggctgctgacagaattaccgccaacaacaagccaatcaatccggaaggcaaatagtttaagataaaataaatgaagacataatctttatcgttggtttcggccttactgtcaactttcgcaatgatttctttagcttgttcgtgcaaatctctttccttggcagagagcgaaatcaatttgtttctcaaaatcggattgtcgtaattttgattcaagtgatctatgtataacaaattaaattctttcttttcctcagaaagttgagctaattgtttttctaacgaattgtattcttcggcgtaaattgacttttcaacggcatctttgtttattggattaaaatgcaacggtaccggattgaactggaaaaacacaaataccattacaccggttaacaagataaaaaactgcatcggcacttttaaaaaaccgttcatgattaatcccatctgactctctcgatctgattttccggacaaatagcgaccaacttgtgattggtcagttccgaagtatgacaacatcaaaaagaaaccaccggtaatgccactccaaaatgtatagcggttttcaggatcgacggaaaagtcaagtatgttcattttgtcatttgcaccggcaatgtgcatggcgtttgaaaaagtcatgtcgttaggcaacaaatgcagtatcaaaaaaaacgtgataaacataccgctcatgatgataaacatttgctgtttttgggtaacgttcactgctttagttccgcctgcaaaggtgtaaatgattaccaaaatcccgataatgatattgagcaaagtcagattccaacccaagatagacgataaaataatcgaaggagcatatatggttaacccggttcctaaacctctttgaattaagaaaagtatggctgtgaaggaacgtgtttttaagtcgaatcgttgttcgaggtattcataagcggtgaagactttcaagcgatggtaaatcgggataaacgtcatcgatatcaccaccatggcaatcggtaaaccgaaatagaattgcacaaaacccattccgtcatgatacgcttggccgggtgtagaaaggaaggtaatcgcgctggcttgcgtagccataaccgacaaaccaaccgtccaccacggagtttgtttgtttcctaaaatataatcttctacatttttactgcctttggttttgtagacgccgtaaataacaataaaaagcaaggttaccgataaaacaatccagtcgagtttttgcatcttaataaaacaattgcattagtaaaaagaagattaaaatgtaaatgccgtttgccactaaaacccaagtgtaactgtttttccaacggtcttttttttctgtttccatattattttcctaaagctataatgttggctagtaatctgaaagcaccgggaacaccttcgggtaattctctaaaaaagctcaagccggtgtaaacgtaatttccattcccgtatttggctaccaataacgctccgttttttggtttttcaccttggtcgttggcggaaagaataggagtgaagttggcatcccattcgctcggataatataatccttgctcttgtttccaacctttgaaatcgtcagcagtgattttattcggataattcagtacaggatgattgggtgctaagaatcggacttctgcattttcttcggttacacgatcgcgggaaattttgagcgggaaaggcgacatgtctttggtaaccaactcgtccatagtgttgtactgaacaatcattgttttgccgttatgcacaaaattcaacaacaatttttgtttgtaagccaaggcgttaactacattgtaggctcggattccggttattacgacatcaaagttttgtagtcgttcgccgctgatttcgtccggtttcagaatggtaacttcgtagcccatttgcattaagcttttcggtaattcatcaccggcgcccatgaggtaagcgattttctcgtttttggttttgattttaacgcgaatggctttggcttcggccgtttttaaaaccatttgcttgtatatgtgagaataattaatgtcgattttctctttgtcaaattcccggtcgcctactgcaattacacttttgatactaatttcagaagcttcggaagaaggcgtcactgtaaaaactacaattgtttcttggccttttttatcaatggtaaacggaatctcagtaggtgttaccttccaactttgtggtacttctaatttagcattaccgttaacattgtctttaccagcttttattttaacagaaacggttttgcttcggtcgctattgaaaatatatactttttcggttatggaagaagttactaagggcacgatgtctaaaggctgatagacttcgcctttaacatcgtcgttgtatttgtaaactatcaagcgttcgaatggtattgtgacattattgatgcctatccaaaaaccaacttttgcataacgaatcacatcgggtaatccaatattttcctgattgtcgacgcggtacatgccgttggttccgttttgattcagccaataagcattggtcaaatcgaaattattcggaagatctaaggtaatggtttcggttaatgaaacgttgttttgtaaaggtctgattttttgttcgtcttcatgtttaaaaaccggtacagcgccgattccttccaaattcatggcaatgtcactgcggttgatggcttcccatttgacttttaaaggactaccgggtgtaatttcttgtacatcggttacggcttcgagatataaaccggtacaggcggcgataattttcttaatctcttctaatttgacaaacttccagtgtttgtcttctaatttttcaatcaaactgtacgctttgactagttcggctacgctagctgctggattcttgaaatcgaattttttttctacggcatataaaatatctccaatggctttcccgcctttgatgcgattccaagtcgtgtcgatgccttcaaacaaattagttttgtctttgggcatatcgccttttaaaaactcgatatattcgtcttcttcaccacgtgttccggtggaaccaaaaccttgtgattggtgacgacttctgctcaaggctgcaatttcctgattggacttgcccaaagcagcatagtaagtgccgattttaagattgattaaattagttttatcagcggctttaaacttctcttgactaccgtaaaaccaccatgaagtattaaaaaaaacacgtttaggttgccaagtggaaacgtattgtaattgattttgaaattgattggcatcattagccaaatcgaaagcttccatactcaacatagccgaagcggtatgatgcccgtgtgtagtgccgggagaacgatggtcaaagcgattgataatgatatccggttggaattttcgaatggcccaaactacatcacttaacacctgatttttgtcccatattagcaaagtttcggtcggatttttagaaaatccaaagtcgtttgctctggaaaagaattgttcgccaccgtcaatttttcgagcctcaatgagttcctgagttctgataacacccaataattctctcagttcaggtccgatgagattttgtccgccatcgccacgggttagcgaaagataagcggtacgggctttcttatcgttggataaataagaaattaagcgcgtattctcatcatcgggatgagcagcgatgtacaatactgaacctagaaaattgagtttttggatttgatggtaaatgtcaacagcattaggttttaccggttgttgcgaccatacagattgggtaatagtgatgaataaggctaatagtagagtgtaaagcttttgcattttatatcgttatggcaatagcttcaaatataaacattatataaaatacaatgttttatttatttcgtttttaacaaatcaaaaacttagactttttcgctcgaagccgtagtattgttgggaaaccttcctttagcattgtatggaaactttttcttgtgaatggataggtaatcataaggtctgtctccatcataatcattaatgattactcgagctttattgtaaagagagtaaccaccgtagttctctggcaattcaggcgctgatctccattcaccattctctttataatggtaaaccatttctaaattatcaaaataagcttgaagattaggataataatggtaacggatataacagttggttttcttgtcaattggtaacttctcctttattgcagcagtattttgtgctaaagaattacctgccataaaaatgcatactgcgaacagtagggttttaagtgttttcatgattttgtaaatttggggttaacaaaaaacagttttcacatattaatatcgcaaatttaattaaaaaatatcttttaaaagaaaattatatcggtgaaatgctataaaacaacagttaaataagattttttttattttaaacggtctttttcaatcgttttaaaataaaaaagacgaagttacttacggcatcttttttattgattatagtctttttactgacctataccctgttccatctgagaactacacctgtctaatgatgaattttatgtgctgttgcctatagtattttgctttatgtgatttaacagaagtctgagtgactaactaaaaaaaataatagcatttacggtatattgagaatatagattgacaaaaaaacaacagtttacaatctttgtataggtctaattaatcggtgaattcttggtcttcgaacctaggctttacaatagaaatacctttttggagcagtaggttattcgggtaaaccaaacgttctccatccttggtaattaaatcggtatgaaaggcgttgatatcgataatctcgccttcaaaagggaaatctttgtcgtgtactttaatcacatctccaattttaaacggaaatgaaaaaaacagtataactccggaagtaatattgctcagaatcgaccattgtgcaaacatagccacaccaactacagtcgcaatcgaggagagcgtaatcataatatcatttttttgaacaccccaaatgacaatcaacgaaatggcggccaaaatattaatcaacaaatggatgtatttaatgactaagtttgttcttttctcaattccggtgtgcgatttggaatactttttaacggctttggtcacaataacacgcaataagatgatcgttataaaaactaatccggtcgcaaataattctttggtatacaattcaaaaaaacgcatcattcaaaaattataagttggttaaatattcaaaaaccacgtcggttggcattccgactacattagtataagagccttcaattttggcgatgccgattaacccaatccattcctgtataccataagcaccagccttgtcaaagggtttgtagttttctaaataatgatgaattacctcgtctgacaggtttttaaaagtgactttggtaacttcaaaaacggtttctgttttctgattggttttaaagcaaacagaagtaataacttcatgtgttttgcccgacatggctttcagcatggcaaaggcatcttcataatctttaggttttcccaaagctttgttttcaaaccaaacaatggtatcgctggttagtaacacttcttggtcttcaagtgtgccttcaaacgcattggctttgagttgtgctaagtagttcgtgatttctacaccttgcaaatgatcggggtaaatctcggctatttccttaagtctgatttcgaaatcaagctgtaagtctcttaaaaactgttgccttctgggcgaaccggaagccaaaatgattttatgagtgcaaaattgattacccatttaatttgatgttgtaattaatgactacgactgataatactccgaataaaataacgtatttcaatactttgcttaacaaagcaaaatcttctttgctctttgcattccaaattttaaccaagaaaaaaagcataggaccaatcacaagaaccaaactataaatcacagcaggatagagttggttattcatcaaatggtcgttgatataccaagctaaaagtcctattgcaattagcgcgagaccgaaaataactttggtggtttttgcaataccgatgattaccggtaaagtgcggatgtcttcggtttgatcgccttcaatgtcttgagcatctttaaccaattctcttatcaagttaatgataaaggcaaaaatggcataatcggttataattgataagatgattttcatattggcccaaagttccataccagcataattcatcattggcagtacatcaaaaaggcctacaacaatgacagaaaacgccaataccaaagccactatgatattacctactatggcgatttgttttaaactggtggcatacaaatacaatagcgccgaactgataataaaaatcccgaagaacgaggttttgttgacaaaatctgccaaataataccccaacaacattcccacgatgttgaatccgaaataccaattgtaagcaacttcctcagtaatgcttttgcctaccacaactttttcagctttgttgatggcatccgtttcttggtccatgatatcgttaatcacatacccgccggcagctatacaaagtgtagctaaaatcaatagcccgaattgccaatcagacaaggtaagcggaatgttttggaattgtaaaaaaccatatcttaaaacgagttgcattaaggcgatgagtactaaattttggtatcgaatgagttttaagaatttcatatgtctagataaagtttatcaaaaggttaggtttaatcgtgttgtccgttgtaatacaaatgccatttgttttgcactttcatgacttgttctataacctcgcgaacagctcctttaccgccgtttttgtgtgaaatgtatttggagatggccttgatttccggactggcatcttgcggacaagtgggcaatcctaccaattgcattacgtgataatccgggatgtcatcgcccatatacaaaacttgttccggttggatttggtataattcggtgtattctttaaaagtagccactttatcaggtgaagccaaatgaatttcagttattcctaagtttttcaagcggatgcgaacgccttcgttgttgccgcccgatatgatgcaaacattatagccgctttcgatggctgctttcatggcaaaaccatcacgaatattcataattctcaacatttcaccattaggcgccacatgaaccgaaccatcggttaaaacaccgtcaacatcaaagatgaaggtggtaatttggttcatgatttctttataacttttttccatggtcgattatagatttggtcagcaatttatagatttctttttggttttccgcggtcaaaaatgctaggtgtttgttaatggtttgggtgtctttgcgtttggccggaccggtttgtgcagcttcagggctaagtgttgctattttttgagccgtttcctgaatcaaaggttttaggatatcaaacggtagattattttcaatacaaatctcagagccaatttggtacaaatgattggtgaaattacaaacaaaaaccgccgctacatgtaacgcttgtcgctgttgtgagttgacagcataagtgtactctgaaatcgattttgctaaagtttccaaaatttggaaatcatccgctgtttctgcttctatacaaataggaacggataggtagtcgatggttttggctttggaaaaggtttgcaaaggataaaaaacgcctcgacggtttttgtccttcaaagcactaagagcaacgctgccggaagtgtgcaccaccaactgacggtttagcggaatgtgttcggaaacgtttgatatagcatcatcagataccgcaatgattataacatcaacgttttttaacaacgaccaatcctcaatcacttcgacgttcggattcgttgtttcaacggatgttttatttcgggcaaatacttgaaccacttctactttcgaagacgcaccgaaagctttcagtaaatgatgtgcaacatttcccgaaccaatgacagagacttgtatcatagggcaaaattatcgaaaataactgttacaatccgcattttaaaacaaagaaatccacaagtcttaaaaatgtattaaaaccccaattttatccatcatatatctatttatttaccctatttttgtatcgcttttttaaaaaaacaattccaactcatggaaaaaaaactatacgcttttctatcttccactcgtttaatggctttcttatttatcgcgtttgctgcggctatggctgcgggaacctttattgaaagcaattacaatacagatactgcccgaattatgatttacaacgcatggtggtttgaagccatcatgttggtttttatgatcaatttcatcggcaacatcaagagataccaattgtacaaaaaagaaaaatgggctactttattgctgcacctgtctttcatttttatcatagccggtgcttttatcacgcgttacatcagttacgaaggcatgatgcccatcagagaaggcgctacttccaaccaggtgtattcagaaaaatgctacctgactgtttttgtagatggtgattacaaaggtaaaatgatgcgaagaatttttgaagaacagctgttgctttctccggtaacggataatcattttgccatcaacgaaaagtttgcagatattccattcgagattgaataccagaattttatattagatgccaaagaagtcattaaagatgatccgaaaggcgatacttacctaaaattggtagaatccggcgacggcacacgccacgaacacatgctgaaagccggcgaagtacaaaacatccacaatgttttattcgccttagacaaaccaacaccgggcgctattaatatcgattccaaaaacaatactatttctgcacctttcgacggtcagttcatgcgaatggccgataagttccaaggtaaagtagtgaaagatgtagcccaacctttaatgtaccgttcattgtacaacttgggcggcagtcagtttgtattgcccgaattgcctaaaaaaggaattaaatcttaccaatccagcggcgatttcaaagccaagaaaggcgaggatgctttagtacttaaagtgaaaaccggaggcaaagaggaaaccattactctaatcggctcaaaaggcaaacaaggtgaacctaaagcttttaaattaggcaatttagagttcacttttacttatggttctaaagtgtatgagttacctttcagtttaaaactcaacgattttatcgctcaaaaatatccgggaacggaaaagagtttttcctcttttgaaagtcaggttaccctaatcgacggtaatgaaaagaatgaccatcgcatttatatgaaccacattttagaccacaaaggttaccgcttctttcaagcctcattcgatccggacgaaaaaggaacggtactttcggttaaccacgatttttggggaactaacatcacttacattggttactatttgctgtatttctgtatgatggctattttatttacgaaaaacactcgttttgccgacttaaagaaaaagttagccaatgtgaaaaagaagaaatctcagatagttggtcttttctttttactgttttcattgcatggttttgcccaacacggttcgcaccaacaagccttgccaactcaaaggcaaatcgattccatcatcaacaaatacaaagtgtctgaaaaacatgcggctcagtttggccgattgattattcaggacgatggcggtcgtatgaagcctatcaacactttttcatctgaattattgcgaaaagtcagcaaaagcgatacttacaaaggattgaactcggatcaagcgtttttgtcgatgacacaatttccgacggtttggtttgaaacgcctttgatttacctcaaaaaaggcaacgacagtattcgcaagattatcggtattgaagcagatgccaaatacgctacgtttcgttcgttctttgatgaaagaggaaattataaattgtcaccttatctggatgaagcctataaatcggcaacacccaatcaattcgaaaaagattttattgaaaccgataaaaaagtcaatttgttgaattcggcactcagcggaaaaatccttagaatcttcccggtaccgaatgatccgaacaacaaatgggtttcgtttttagaaatcaatcacgctaccggaacgtctttagatactatcaaaagtgctttgccggtatatttggatgcgctattgaaagcttctgacagtaaagattatactcgtgccaatacgtatttagtcggtatcgaagattaccaaaaactatacggtaaagcggtaagaccggcagaagacaaaattgattacgagattttatacaacaaatacgatgtcttcaaaaacttgttttggttgtacatgttaaccggttgcttgatgttgactttagtgattgtgaacatatttttcgacaaaaagctacttcgttatgcaatcaatattttccatatttttattggattactgtttgtttttcacaccttaggtcttatagcacgctggtatatttctggtcacgcgccttggagtgatgcttatgagagtatgatatacgtagcttgggcgaccatgttctttactttggctttcgatgttaaatctaaattaaccgtagcctcaggcacttttgtggcgtctatgattttgatgattgcgcattggaattggatggatcctgcaattgccaacttacagccggtgttaaattcgtattggttaatgatacacgtagcagttattgtggcgagttatggtccgtttactttagcaatggttttgggtatcgtttcccttattttaatgttgtttgtcaacgacaaaaacaaagcgaaaatggacctcaacattaaagaaatcacttatatcaatgaaatggcgctgacgatcggtttggtgatgttaaccatcggaaactttttaggcggtcagtgggctaatgaaagttggggaagatattggggttgggatcctaaagaaacttgggctttaatcagcattatgatttatgcttttgtaattcacgctcgttttgttccggctttgcgtgggaaatgggtttacaatgtaatggccgtttttgccttctattcaatacttatgacgtatttcggggtaaatttttaccttacaggattacactcttatgccagtggtgataaagtagttacgccttcgtttgtgtattattcggtagctattatttcagtattagcagtgttgtcttatttcaagcacaagaagtatttgagcaaataaatagattaaatgagttacctcatacattctgtattcattttatttcaatagattctattctttctatggcattcaattaagttgaagacgtcatatttataatattttaaaaagcccaacaagatatagcgttgggctttttaattaataaaactttaggaattgtataacatcaaactgcgctttaatgattaattttatgaaaatttaaacggatgaaaaactatttatttttagcctgcagcgttatgttgctggtgagttgtcaaaacaatgcgcaaacgaaaaccgttgccgttaatactaacactactactatgaatacagtaactaaacaggaatccatacatcaatttaaagtaattgatttgtacggtaaagaatttgatttttcgtctttaaaaggaaagaaaatcttaattgtaaatactgcttctgaatgtggactgacgcctcagtacaaagatttggaagccatttacagcaaatacaaggataaaaattttgtgattgtaggtttcccggccaataatttcggtggacaagaaccgggcagcaatcaggaaattgccaagttttgccaaatgaactatggcgtgtcttttccaatgatgggtaaaatatctgtaaaaggaaatgatatacatccattgtaccaatttttgacacagaagggtaaaaacggtttacaagacagtgaagtagagtggaacttccagaaatacttgttggatgaaaacggatatttggtaaaagtcctttcgcctagagtactgccaacagatgatgcaattgtatcatggattaacggaaaataaacccgattactcttttaaaacaaacaaacccggtgtagaaattcatcgggtttttatttgaaaaacatcgaccaacttcacgtgtcacgtggtttaaagattttttttcccgtttaacgattttaaaatgttagcttaacaatacttcttagttttgaaatcaatatcaaataccacagtgataatttatgaaaaataatattttcaatccaatataccgagaagactatttagaaggttatactaacggttcaaatccacacctaaagttggtggaagaaaaaagcgaagcctataacttcggttttgaacaaggaagagccgactacgaaagaatgaacggaaaaattgcttatgggattccacaattaatagtcaccaacaaagtattagaagattttttactcgccggtatgttggggatggatatcgattcggatggttataattcctttcaaattgacgtcatccaaaaatggtatcaaagcggagtcgaaaaatatgatcccagccaaagcagttatctgctctctattttagaggaaaatggcatagaactagcctgacaaatacccctgaatatttggtaaagactgatggaaacattggtctttatttttttattctaaaaccaattgcatgaattgcgaatgcagccaacggttgaatttaaatccggtttctttcaataggccaactgtctcaaatccgaattgctcgtgaaaagccacactgctttggttttctgaatcaatcacagcaatcatcgtgtgcaatttttgttgcttggctaaatcgattagcgcttgcatcagtaatttacctatgccttttccgtgataatctggggctacataaaccgaatgttctacggtaaatttataggcttcccgaaaacgaaattcactgtaatatccaaaaccaatcactttcccgtttgcttccgcaactataaccggaaattctttgtcgattttttcctgaaaaatagtctcttgttgcgctaatgttcttgggtgataatcgtacaaagtcgtcgaatgaagtatgttgtaattgataatgtcaactatggcctgacaatctgcaatttgataaggtctgattttgctttccatggcattaaagtgtcttcaaaagtaataaaactatcttaaagtgttgaaaaacctacacaagtttgtacatttgtaagacataaaaaaagacaatgctttatcctaaaatacctttggcgcaaagcatcatagaaatttgtaatgccaaaggagttcacgatattataatctcacctggttccagaaatgcaccgctaactattggttttaccaatcatccggactttacttgttatagtatagccgatgagcgttgtgccggtttttttgcgctgggtattgcccaacaaaagcaaaagccggttgcggttgtttgtacttccggttcagccttactcaattattacccggctttggcagaagctttttacagtcagattccgtttgtggtaatctctgccgaccgaccgcatgataaaattgatataggagatgggcaaaccatccgtcaagaaaatgtatttttgaaccactcgttatacaacgccaatttactggaagatgcttcggaagaaaacgatgtctttattaacgaagccatcaatgtggccattgctcacaaaggtccggttcatattaatgtgcctttcgaagaacctctataccaaaccacgaataaactagctgtcgatgttaacgtaaccggactgttcaaatcggagtcatccgttagggtagaagacatcattgcgttttctacgttgtggaattatagccagaaaatattggtattggtaggcgagtgcaagccgaacactatcgaccaacaatggatagacgaattggcttcacatccttcggtagtagtgttgaccgaaacgacgtctaacttacaccatactgattttatcaacaatatcgacacgctgattacgccgtttactgataaagagtttgccgagttgcagcctcgcattttaattacgtttggcggtatgatagtgtctaagcgaatcaaagccttcctcagaaaatataaaccgcgacaccattggcatattgatgagttaagagcttacgatacgtttggtattttgacaaaacattttacggtagctcccaatcagttttttaaacaatttttaccgcatgtcaaagtcgttgaaagtaattataaagcgtttgtccaaactattcgtagccaaagaataagcaaacaccatgaatatttggctaatattccgttttccgatttaaaagcatttgaaaatattttagccgctttgcccgagaatacacagttgcaagtcagtaatagttctgccattcgttatgcgcaattgtttgacatcgatccgtctatcgaagtattctgcaatcgtggtaccagtggtatcgatggcagtacttcaaccgctataggtgctgctgtagccagcaacaaacaaacgaccttaattacgggcgatatcggatttttatacgacagtaatgcgctttggaacaattacataccaaagcatttcaaaatcattttaattaataacggcggtggcggtatcttcagaatcttacccggtcatcaagaaaacgaaaccttccatacttatttcgaaacttcccattgtttaaccgctgaacatttggctaaaatgtatcgttttgactatttgacggccgcggatgaaaccactttaaacgcaggtttgaaacaattgtttgctaacaacgaccaacctgctatattggaagtttttacacctacgcgcgacaacaataaactgttgttggactatttcaaagctttggtgtaaatttataccttaaccaaaatcgattttactgtgagtcaaaccaataaattaaaaatattcaacgacccgatttacggatttatcaccattccgaattcgttggtctacgatttagtgcaacatccttatttccagcgattgcgacgcatttcccaaatgggattatcgtatttagtgtatccgggagcgcatcatacgcgtttccatcacgcactgggcgccatgcacatgatgcaacaagcggttgaagtacttcgttttaaaggcgtagctatttctaaagaagaagaaaatgcactttatatcgctattcttttgcacgatatcggtcacggtccgttttcccatgccatggaacacagtatagttgaagaagtgaaccacgaagccatttcgctgttattcatgaaccaattgaatcaagagtttgacggacaattaagcttggccatacaggtttttaaaggcgaataccatcgtaagtttatgttgcaattaatttcgagtcagcttgatatggatcgcatggattatttgaaacgcgatagtttttattcaggcgtagccgaagggaatatcaattctgatcgtttgattcaaatgatgaatgtagtggatgatgttttggtgatggaagaaaaagggatttattcgattgaaaaattcttaatggcacgccgattaatgtattggcaagcctatttgcacaagacgagtttggtggccgaattgaccttaactaagactttacaacgtgctaaagagttgcttcaaaaaggaattgctatcgagtgcagtcgtccgctaaaatactttatggagcacaaagtgactcttgagaatttctccactatcgatttagatacattttcgcaattagatgattttgatattattagcgctttaaaaaattggcaacaccacgacgattttattttgagcagtttgagtaaaatgattatcaatcgcgacttatcaaaagtcaaactcaacagcgaaaaatttccggtggaagctttacaggaaatgtcagctgcctttgccaaaaagcataacctgagtttacaagacactaagtattttatcttcaaaggaaaaatcaaaaatcaagcttataataaagatgcagaaccgattcgaattctgaaaaaagaccgaactattgaagatgtagtggaagcttccgaccagctgaatttgaaagccttgtcgaaaccggtgaccaagtattttatttgctatccaaaacaactttcggaaatttaacattaaatcttttttttatacttttgtcgctatgaaaccagctaatactcttttgatgcaattaccaaaaaatgactatagtgactttcatcttaagttcatacttaacaactaatacaagatgaagtttacagcagctcaaatagcaggaattttagaaggcgaagtggtgggaaatcctaacgccgaggtattcaaattatctaaaattgaagaagggacggatggttcattgacctttttggccaatcctaaatatgtcaattatatctattcgactaacgctactattaccatagtcaattcgacttttgaaccggagagtgagttaaaaaccacactgattaaagtggaagatgcttaccaatcgttttccaaattattagaatactacaaccaagtaaagttgatgaaatcaggtatcgaacaaccttcggtgatttctgaaaatgttactcacggcgaaaacctttatttaggaagtttcagttatattggtaaaaatgtagtgattggtaaaaatgtgaagatttacccgaattcgttcataggcgataatgtaacgattggtgacgattgtattttctttgccggcgtccgtatttattcggaatccgttatcggaaacaattgtgtgatccattccggaaccattatcggttcagacggatttggattcgcaccgcaagaagacggcacgtacaacaaagtaccgcaaattggtaatgttattttagaagacaatgtagaagttggttcttgtacgaccatcgacagagcaactttaggctcaaccatcatcagaaaaggtgtaaagctcgacaaccaaattcagattgcacataatgtcgaaattggtgaaaacactgtaattgctgctcaaaccggtgtagcaggttcgaccaaaatcggtaaaaattgtatgattggcggtcaagttggcatagccggacatttgactatcggaaataatgttcgtgtacaggcgcagtcaggcatcggaagaaatattccggatggcgaaaccctacaaggttctccatctttcaactacagcgattggaacaagtcgtatgtacatttcagaaacttgcctaaaattgtagcagaaatagaagaattaaagaaaaacaagcccaattcgtaatcggatttccggctgcgaatttgtaataaactaaactaaaaaaagcataccaatggttaaacaaaaaaccatccaaaacgaagtttcccttaccggtgttggtttacataccggtaaagaagtaaaaatgactttcaaaccggcaccaatcaacaatggctatacttttgtcagagttgatttagaaggcagcccaattatagaagccgatgccaattatgtggtaaacacccaaagaggtaccaatcttgaaaaactaggcgttaaaattcaaacctctgagcatgttttggcagcttttgtaggttgtgatgttgataatgtgattatcgagttgaacgagtcagaaccgcctattatggatggatcttcgaagttttttgtagaagctatcgagaaagccggtatcgtagagcaagatgctgaaagatgttactatgtggttaaagaagtaatatcttttatggatgaaactacaggaagtgaaatactcgtgatgcctgccgatgattaccaagtaactactatggttgattttggtactaaagttttaggtactcaaaacgctaccttaaaaaatatagccgatttcaaaacggaaatatccgatgccagaacgtttagtttcttacatgagcttgaaactttattagacaatggtttaattaaaggcggcgacttaaacaatgctattgtttatgttgataaagaaatctccgaaaaaaccatgaacaacttgaaagtggctttcggcaaagaaaaaatttctgtgaaacctaacggtatattagacaatttgacgttgcattatcctaacgaagcagcgcgtcataagttgttggatgtgattggtgatttggctttaatcggtactcgcattaaaggaaaagtaattgccaacaaaccgggacactacgtaaacactcagtttgccaaaaaaatgtccaaaattatcaagatagaacagcgcaaccaaattccggtgtacgacctacacaaggaacctttgatggatgtgaataaaatcatggccatgttgccacaccgtccgccatttttattggtagacaaaattttggaaatgtcagacaatcacgtagtaggtttgaaaaacgtaaccatgaacgaagactttttcattggtcactttcctggtgcaccggtgatgcctggtgttttaatcgtagaagcgatggcacaaacaggaggaatcttgattttaagttcggttccggatccggaaaactacctgacgtatttcatgaaaatcgacaatgtaaaattcaagcataaagtcttacccggcgataccttggtatttaaatgtgatttaatttcaccaatcagaagaggtatttgtcatatgcaagccaatgcttatgccaacggtaaattagttgcggaagcagaattaatggcacaaattgccaaaaaaaattaaatagttatttatgaaccaaccattagcctatgtacatcccggagcgaaaatcgcgaagaatgtcgtaatagaaccatttacaaccatacacaataatgtaattatcggagaaggaacttggataggttctaacgtaaccattatggaaggcgcgcgcatcggtaaaaactgtaacatatttccgggtgctgttattgctgcggtaccacaagatttaaaattcggaggcgaagattccttggccattatcggcgataattctaccattcgtgaatgcgttaccatcaatcgcgggactatcgcatcgggtcaaaccgtaatcggtaaaaactgtttggtgatggcgactgcacacattgcgcacgactgtcatattggtgacaatgccattattgtaaacggcgtagctttggccggacacgtaacggttggaaattatgccatcattggtggtttggcggcgatccatcaattcatacacattggagatcacgctatgatttcaggtggttcattggttcgtaaagatgttcctccttataccaaagcggcaaaagaaccgctttcctatgttgggattaactcagtaggtttgagacgtcgcggatttacttctgaaaaaatcagagaagttcaggacatttaccgaattttataccaaaaaaattacaacacttcccaagcgatggccatcattgaaggcgagatggaagcaacaccggagcgcgatgagattttagatttcatcagaaactcttcaagaggaattatgaaaggttattcagggtcttactaagaattaacagttcaccacaaatcataaacaataaacataaaaacataaattacaatggcatctacagcagatattagaaacggattatgcattaagtttaaccacgatatttataaaattatcgaatttttacacgttaaaccgggtaaaggtccggctttcgttagaaccaaattgaaaagtttaaccaacggtaaagtattggacaatactttttctgccggacacaaaattgatgtggttcgtgttgaaacgcatactttccaatatttatatgctgaagggaatgatttccactttatgaatacagaatcttacgaacaaatcacattgaacagagacgttttagatgctccggatttgttaaaagaagggactaacgtaatggtacaaatcaataccgaaacagaaatgccgttagcagtagatatgccggcttctatgattttagaagtaacttatacagaaccgggtgtaaaaggaaacaccgctaccaatgccaccaaaccggctaaagtagaaacaggagctgcggtaaacgttccgttatttatcaacgaaggtgacaaaatcaaaattgatacggctaccggtaaatacatggaaagagtgtaattaatttgaagattacatgatttgaagatttgaaaatttagttcatcttcaaattttcaaattttcaaattctcaaattctcaaatcaagtatgaagttcacaagtatacattctctcaaagaaattgctgaaatcatcgggtgtcactatgttggtgccgatgattttgcagttcatggcatgaacgaaattcacgttgttgaacccggtgatattgtttttgtcgaccatccgaaatattacgataaagccttgcaatcggcggcaactattgttttaatcaacaaagaagtagattgtccggaaggcaaagcattattgatttccgacgatccttttcgcgattttaatgtgctaacgaagcattttcgaccgtttgtagcggccaatgtcagcatttcggcttctgctcaaataggagagggaactgtcattcaacccaattgttttatcggaaacaatgtgaccatcggtaaaaactatttgttacacgccaatgtaattgtttacgataatacggtaataggtgataatgtcatcattcactccggtactgtattaggagcagatgcattttattataaaaaacgcccggaaggattcgaccaattgttgtccggtggacgagtagtgatagaagaccatgtcggaatcggagcattgtgtaccattgataaaggtgttaccggtgatacaaccatcggtgccggtaccaaaatagacaatcaagtgcatgttggccacgataccgttattggtaaaaaatgcttgattgcatctcaaaccggtattgccggttgtgtggttattgaagacgaagttaccctttggggtcaagtgggtaccaccagcggcatcactatcggagccaaagcagtggtgttgggacaaaccggagtaaccaaatctatcgaaggcggaaaaagctatttcggcacgccggtggaggaatctcgtgaaaaattaaaacaattggccaacgtaaaacgtatccctgatcttttaaataaattgaaataagttatgggcgctaaaactatcgttcaaaatttttataaatctgatgtcctgttggaatcggataaagttaatgctttattgcatcccgatgttattttggaatggcacagcactaaaggctttttaaaactcaacaaaaatcaaatgattgagttgagcgaaggactcagtaaagcctacgttcgctctaaaacccgaatttcccatatcctttcagacggcaacacggtaagtgttcgttattcgcattatgtaaaaaccattgaaaatccgagggaagaaatgttactagcccattttatggtgatttgggaagtcaaagacgataaactgtatcgcggttaccaaatgagccaactatagtaattttacaaaaaactgtaaacggagcactaaacactgaatagtatttcatacttttgcaacacataaaataaacacaaaaaaacaaacacaaacatgagcgttttagtcaataaaaattcaaaaataatagtacaaggttttaccggaagtgagggaacttttcacgcttctcaaatgattgaatacggaaccaatgtcgttggaggtgttacaccgggaaaaggtggttctacgcatttagaccgtcctgtttttaataccgttaaagacgccgttgagcaagccggagctgatacttcaattatttttgtaccgcctgcctttgctgcagatgctattatggaagctgccgatgctggaatcaaagtaatcattgctattactgaaggtattccggtggcggatatgattaaagcttacaactttgtgaaaggaaaagactgtcgtttggtaggtccaaactgtcctggtgtgattactcctgaagaagccaaagtgggtatcatgccgggctttgtattcaaaaaaggaaatgttggtattgtatctaaatcgggtactttgacttatgaagccgcagaccaagtagtaaaacaaggtatgggaattaccacagcaatcggtatcggaggagatccgattatcggaactactaccaaagaagcagttgaattgttgatgaacgatgctgaaaccgaatgcatcatcatgattggtgaaatcggaggtcagttagaagctgatgccgccaaatggattaaagccgatggtaaccgtaaaccggtaattggttttattgccggtgaaactgctcctaaaggaagaactatgggacatgccggagctattgtaggtggttcagatgatacagctgaagccaaaaaacgcatcatgagagaatgtggtatccacgtagtagattctcctgctgaaattggtaaaaaagtaaaagaagtaatgggataattgatgtccatttatatataaaaaaaagcctcgagaaatcggggcttttttatttctaaacgatggcatcgtttttgtttttacaactgcacaaaaaattgtgcacaaaataatttgtgccaaaaaaattgtaacaacctatgaataagaatttaaacaaaagaaaccagctaagaaaagcattaaatcttactcaggatgaaatggtgatgttgttgaatatttcaagacctcaatgggcgtattatgaattaggaaaaagggatttaccctcatcagcattagagcgattagcggtaattgaaactttattagcctctcccaaaatgaataacgctacccacataaagctaactgaaatacagcagaaacaaaccaataaaatgctaaacgatgcactaaaagaaaataaataccaactgcaaaaattggagagaatgataactcgtatggaatcaaaaaatgaagcttcacaaaaaatgctaaatttgatttccttattggctaatgcaaaattcaaacaacctttgcacgagagtgttttaccaactttgaaaaagagtgccaaagagacacttgaaataaataacactgttgatttgctaaaattaaaaattcaacttcattcccttcaaatacaagaagagttactgaacaagttaatagagagcaataggatagctaaacaagagttggagtagtttgctttaaaaaaaactcccgagattatcgggagtttattgttttaattcggaaacggattagaccatttcacatcggtataaacatttgttcccgatagcgttttgagaaatgccattaaagcattgacttcgggagcggttaaatggagttgttgtccaaaaccattcggacgtaatttaacatctaaattggtattgcccgccgctaaattgatggtaccataatgaccaatcgcagcttgcaaagtagttatcactccggtatgcatcatcggtccgtttggcgttccgtcagtttttactaaatctcgtaaagatggagcgcgagtgttggtaatgtctataccattgccatttatggtgcctataataccattatttccgcttagcggattaatatcaaattccggagcagcatgacaaccggcacaacctagtccaccggaagttcggtttccggtagcgtcaaataccggaggcgaaagaaaaagatttttgccctgattttcctgaggcgtgaaattaggaaaaggttgtccgtcattggctacctgcgctctgccaagatcgtacttactgtcaaacgactgtatgcttctaacaaattgtgccaaagccaattgaattttattctctgtaatttcttcagaaccgtaagcaaacataaaaagctctttgtaatattcaatgttgctgagttttgtaattaagtcgttaaagttttgatcgccattggtaccgctgaagcccatttcaccgtggtctttgataggcatagtggtttgggtttctaaatttactgcgcgttcatcccagaaaaagcgcgtctcattggcaaatcgagtgttaatcaatcgcatcgaatgtcggccagttgtgccattaacacccgtactggcaatattggtatctccaaaagcattggcttgttggtgacaactggagcatgaaatagtattgttggacgacaagtttttatcataaaacaatactctgcccaaagtggcgcctttatttgtaattgaattgccggctgtattgtctttggtaatataaccgggaatggtttgattggcgtaattgtacaaactttccggattgatgttactgccgaaagtagcggttatagcggcataaggatctatttcaacatagttggaactgtcatcgctactgcaagaataggagagtgccacaagcaacaagaggctggcttttttatacataatttggttatttggtggttagtggtggtgtcattttatttgtttacaataattttaacggtcttatcagttttattattagcgattttgataaagtaagtgccgttgtaaactgcagataaatcaaagatacaaagcgtacttccttgcactattttttgggtttgcagttgttttccgagaacatcaattaaagtaacttccaaatctttttcttgtatatcggtttggatggcgataaactcttgtgccggattaggatatactttaatatttaaatccgacaggttgaaatcggcattctctaaagtatattgagtggttgtttccgaaactgaagccaccgttgaagcagttttgttgccgtaaaatgttgggccaacagcataaggataagccgaattgtgattggcatctacagtggtaaagtaacagtaaattccgttaggatattcaggggttacgcaaaaacggccattgtgttcgtctagatagtcagcattagtatgcgctacaaattcgtagtcttctctataatagcctaaaggataagtagtattcaccggcggaccgtcagtaacattagttccgttagcataatgggttctgacagtaatatttcgcaattgataactcgatttaatcctaactattcctccggttccgtcagcgttagcatagccgtaagcaccgtaaataggaaaaccatcgtaggcaaaaccaatcagcggcgaatgttcgtttggattaataacatacaagccatctgaaggataagttgcgcaaatcgtcgacacttgcactaaatctaaattaaaagcactcggattttgatgatggtggtaattccccatagccggatgcgctttcgcacaatcaaaaccaatgcgttccgcataaaccgcgtcacgattccatacgccgtcgcctgtacatcccataattggaccgccgcaaacttgactcgtactgtttttccaagaaacgccatcgcgataatcaaacaaggcaacgccgtttttaaacaatccgatatttccgccgttggtattggtaggtgtaccggtattttgagttgggttcagcggaaatctgaatatagctccatttcgactcgtggctaaagagggatttccatctaaaaacggaccggttatgtaagccggaataccattggtagtaacataaacccaattgttggaatattgtaccgtttgtacgttggccaatacagcatcgttaataggagttggatttcctgaaacataatggcgtccggtaatgccggtagtatttcgcaaccaagaggtaatcacgggattggtttgcgaccacacaatagaggtaaaaatgagtagtgtactgaatgcgatttttttcataatgggttaggttattttaacttagacgtcatactgttttgattcttgcgtccttctcaaattattttttcggataggcgtaacgaggattaaataaaaacgctttatcagtcaaggtttgcaaaaaaacgaccaaatcaacacgatctttgtcgctcaattgcattggttttgacaacgttgcagcggtatgttggttgggctgaattgtattgtaatgcttgataacttcgtttaaagttttaaaacgaccatcatgcatgtaagggaatgtaaattggatattcctcagtgttggtactttaaaatgcatcacatctttttcaagaccggtaatttttactctgccataatcttgaagtgtggtatcgatagtaaggccgttgttttcaaacgaatcactactgaaaagcggttcgacatgacaaccggcgcaatggcgttggaatagggtataaccgtttgcttcttgctgactaaaagttgtttcattccttttgacttgatcgtatttggaatcactcgattgcaactgtacggtgaattgtgctaaggctttcaggattcgttgactgttgattttatcatctccgaaagcttttttgaataatagcttatagtcttcacgctgttgtaatttagcaataacattttccattttttcatccatttctgtcgggctttcaatcggattaagggcttgaacttctaaattgttgactccgccatcccaatgaaagtgtttgttccaagctaaattgattaatgcaggtgcatttcgggtgccgattcggccttcaatgccatgacttacatcgtggtcgacgtgtgcaaaaccggttgcttgcaaatgacaactcgaacaagagatagtattgttacgcgataaaatcggatcgtaaaacagttgtcttcccaactgaaaaccttcttcagtgagaggattttgattgaaattgtagtgtggtttcggccaaccttcgggtatagcaaaatagataggcgtggctagtttgtcggagaaagctaaaatagtccaaccaataaccccaatgctaagtatgaaaccgatttttttcattctgaatagaacattttggtactaatgtcggccaattccattgctgtttttcccggtgtcattactgttggcgtaatggacaaattgacttcagctaaaaaaaccgccaaatccattccgatatttatggtatcatctatggcaatggtaactggaataacctttctgcgcaacgcattatagggtggaaggtatccgcctaaatgaaattgaaattgcttttttctggttttacaactcggactttgaccttctatttttaaattgatataaccgctttgccacgcccaatacattcctttcgtcggatctaaatcgccactcaaagcacctgaagtattggtaaggctatcaattccaatattgaaaatcactttcgaaattgtttttgttttgatgttaggaaaacgaatttgcatcgaattcgggatttctgaatcgagtaggtggtaactgtttttttcgtggtaaacggtttggtctgcgtattgaatgacaacatcagaaacataacacttgaaagtactgatagacacggtgtctttattgaccgtaacgtaagtttggttcaatagcaaaggcttatggtcgaaaaacaatttgaaatttaccgttacagaatctttgctttgcgcttgaactgttatacaacatagccaaaggattaccgaccgcagtgtcttactcatgtcttggttggcgtggtcttggcgcaaatattttcgacaattcttcggtcagcgccttgaaatcatcctgttgctcgggtttgcagagctttttaatatcctcaaaatgtttgaaatgcgtttcttctacttgcttttggtacgcatttaaaagtgcaatcaaactgtctttggttttggtattgatgttattttcggataagcctgaatacaatttattcttggtttgccgaatggaatcgtccaattggtcaatttctcctcgatgccaacgaattagtttttcgtattcattttgttggttagcatcaaagtgcaatttttcgatgatgattgctttgggttgtcgtcttccttcgtgtggcctaccgtccggtttgggaccgtttagaaaaagaaaacctaaagttgccaggttaatcaacaatagtccaataatcgtaatcgttaataattttgttcgttccataactaataaagctgattgctttggtttaaagtgtgttctaaataactgttggtggaattgtctttcgttttagctttttgaagcagcgctacattcaaagtcaataaaaccacaatggaagcggcaatccaccaaaccgtagttggagctactttttcccgctgtttgattttgagctgaattttagccaacaaatcgtcactcggcattgctgctgacattccgtttgtgctgttcaaaacagtttgaatccattgttctttttccataatagcttagacgaaggttatttttatttcttgcggtactcggtaaatttttttgacaatttttcctgaagcgaacctttggctctgaaaatcagggattcaacagctgaaatactcatttccatgatttcggcaatttcgggattgctcaaaccgtccagtttggaaagcaagaaagccgttttttgattttcggttaagctattgatcacagcaaacaattgggctgctgcttcttggttttccattaaaacaccgggatgttcaaaagttgccgtgttcaagtattcgctttcgttttcgctttttgaaccaaagagatagaggcgtttgcgactgttcttctttttagtaaaatccaaacattggttgatggtgattcgataaatccaagtcttataagatgatttttgctgaaagtgtgctaaggaatggtaaactttaacaaaaacatcctgagtcacttcttccgcatcttcaatattttgcagataatgcaatgccatattgtacacgagcgttttgtgttcgttataaagtctttcaaaaaggatttgataatttggcattggcaattttaagatttctttaagacattgaaaaatcgaaatggtttaaatgtaaaagtatcttttttcaacctgtaaaatattcctatatttgggctttcattaaacatagaaagtcaactgttttaatcaacagtactaagttatttaattttttacaccatgaaattattagaaggaaaagtagccatcatcaccggagccagtagaggaatcggaagcggaattgctaaagtttttgcccaacacggcgctaatgtagcttttacatacagttcttctgccgaaagtgctttggcattagaaaacgaattgtcagctttaggcatcaaagccaagggatacaaatcaaatgcagccgattttaacgaagcccaacaattagtagatgatgttatggctgattttggtaatgttgacgttttgattaacaacgctggtatcaccaaagacaaccttttaatgcgtatgagtgaggaagactttgataaggtaatcgaaatcaacttgaagtcggttttcaatatgaccaaagccgttcaaaaaatcatgcttaaaaaccgcaaaggttcaatcgtaaatatgagttctgttgttggagtgaaaggtaatgccggtcaagccaactatgcagcctcaaaagccggtatgattggttttaccaaatcggttgcgttagaattaggatcgagaaatatccgttgtaacgctattgcaccgggatttattgaaacagaaatgactgccaaattaaatgacgatgtggttcaaggttggagagattctattccgctaaaacgcggcggtactcccgaagatgtagccaatgcttgtttgttcttcgcttcagacatgagtgcttatgttagcggacaagtattgaatgtttgcggaggaatgctgacttaattagaattacgaattataaattatgaattaggaattctaatcgaaataattaaatgactacaaacactgttttactgatagtactttcattaggaatagcgtttgctgtgtcattttaccaatatctatataaagccaaaagccggtcgaaagtgactttgcttttggcttttttacgtttcttttcggtttttgccttgttacttttgctgattaatccgattatttcacgtaagacgatagaaactattaaaacgcctttgcctattgttattgacaattcggcttctatggccgatttaaagtcggataaagaggctttagcattatttgaaaaactcaaagacaactcggctttaaatgagaagtttgaggttcaaacgtaccaatttgatgccgattttctactttcggatactatcgatttcaaagggaaacaatccaatatagatgcggtggctaaaaacctgaagaacatctacaaaaaccaaacgtttccaacggttttaatttcggatggtaaccaaacttcgggtgaagattatgttttcggattcaaccctgccaacaaagtttttcctttagtagtaggcgataccatgacttatttggatttgagaatagcgcaactcaacgtgaacaaatacgcttttcacaaaaacaaatatccggtagaaattttcctgaactacgccggaactaaaagcctaaatgctacttttaaaattacccaaggcaatacagttttaaatgaacaaacggttgctttttcaccttccaaaaaatcggctaccttaaatgtattattgcccgctgataaagtcggactccaacttttaaaagcgactgtttcttccaaagaatcggaaaaaaacagttacaacaatacgaagaattttgccgttgaagtgattgatcaaaaaacagccattgctttaattgccgacatggcacatcctgatttaggagcgataaagcgcagtattgaaactaatgcacaacgaaaagtaacgattgttaaaccgaatcaaatcaacagtttagaagattataatgttttaattctataccagccgacggttacttttaaatcggtttttgagaagaatgccaatgcgaaagtcaacacttggatcatcaccggaaacgatacagattttaattttctgaatcaaaatcaatcgcaatttgcgttcaaaatgagttcgcaaaaagaagattatttggcttcttttgaaacccaatttaatttgtttgcactcgacaatatcggttttgaacagtttccgcctttggaaaatccttttggaactattacagctaatggcaatagcaatgtgttattgtcatcaaccattcgtaacattccaaccaatcagcctttattggcttttagcgaaacccgaggccaacgctcggcgtatttattcggagaaaacatctggaaatggcgcgccgattattatgtgaacaaaaaagattttgttgatttcgatattttcttagacaaaaccatacagtttttggcttctgataacgcgcgaaagtctttagtagttaaccatgagcgtttttacaattcgggagaagctattgaaattactgcccagtattttaacaaaaactacgaattagatgaaaaagctcgcttaaccatagcagtaaccaataccaaaaccaaacaagttaagaatttcgatttgttgcgcacttccaatgcttttcaggttaatttagacggattgacagccggaaattacaagtttacagtgaaagaactcaattcgaatgcctcgtattccggaggttttgaagtattggattttgacattgaaaaacaatttgtcaaccccgattggaacaagttgaatcaattggcaacccaaacgcaagggaaagcttatttggctgatcaaacagatgccttagtaaaacaattgcttgatgatgaaagctacaaagccgttcaaaaaaccatagttaaaaaatcacctttgatcgattggatttggttgttggtattgttagccgcttctttggcgaccgaatggtttgtgcgcaagtacaatggtttattgtaaatgtttcggtttgccaaagcgattttctacagcaattactattaatatgccggcgaggtaagccaatatatcttcccaactaaatgaagttccgataactgttttagccacagtattgtgttgtagcttcagtttttctacgatactgatatattgcaaaatttctatgcagaaagcgaaaagtaaaacccctacagctgccttgtgtaccgagattttgaccaacgatttgacaaagcagtaaatcagaattaccactaaaacatctcccaaatacggacgaataaatcgatctttgatgaaaagcgcaatggctacttcaatcaaaaataaaatgacggataatctgaaataaatcttattgaaatgccacatgaaccttagtgtgttttacgagtaatggaaaaaaactttaagcgaaggtaatcgtaaaataaggctataatcaatacaaaggaagcaattaataaggttttgattttaagatagccataagcaaatccacccaaaacacagcccgaaaagaaaaacgagataatggataggcgcaggtaaatattcgactttaacttgatttgttgttccggttttttgtagaaaaacaattgagagagttcgatgcctagatcggtaaacaaaccggtcaaatgggtagttcgtaccgtagattgcgataccttggtcaccaaagaattttgcatccccatggcaaacaacaataaaaaagcttccgttttcccatgccaagcataaatatcagagttgccgaaaaacaaggaaacaccaactaatatcagtacttctatggcaataggaaccacgtgcgccagtctcggacgcttctgcaatacaatttcaaccacagtatttgcagtaaacgatcccaaaagaaaacacaaagtaaaaaccaagaaagtaactgcaatagcataatctttcctcattatttcttcggcaaagtaggcaaaatgaccggtaacattggtagtaagtgttttcaaagccaaaacgcccgtaatgtttacaatcccggctactaaagacaataaagctgctaatcgcaggttgcgtaaaaaagttcttgcttttccttggcgtctaaacataccttaaaagtaaggattattactatagctaaccattcgtaatttttttttttgcaatcaaaaaaactttataaaatccgttaaacaaacagtatatcatagggttaattcggctatatttggcgaaaaataactaaccatgaaaaaaatactcctagcatcttttttgcttatcggattagcggcttcagcacagtcaaccgacttagatccgtttgacattaattattcttatgtcaacttaccttctaaaccaattgtagacaaaaaaaaccgtacttattcttttgtgaccaacattgatcgcaatttgcagtacaacaaaccccaatattttattgaaaaccaagttaccattaacggttttgaaaaaaaacaaaaaaatggatatttgagtgttgaagtagtattacaaaatcctgccatcaccaaaaaagaaatcaccaatcgcgtgagctcttctaaagacaaaaacggcagagtaaccaacaagtactattacacagtagtgtattcgtacacgcaagacggtaatgctaaagtagtgagtagtgatggtaaagtcagcaaaataatcaattttaccgcgcaacgcagtgctaagagtcaggaatacgaaaactattcccaagcggaaagctttcaatacggtatccaaaatttaatcagaaacaattttactactgaggtaatcaacactttgaacaacgagttgaatgatgaatttggttatccggttaagtcaggtgccgataaattatggattttagccaacaaaaaacacccggaacaaatggcagaatacaacgcttatttgaccgtgaaaaatgcttttgacaaaatgaactttgccgagcctacgactgatattgccaatgaaattaaagacgcaatagcttacttcgaatcgttgccgacaaaatacaatgaagatgaaaaagcacatcgaaaaatcagatacagtgcttattttaacttggctaaaatttattatttgttagataatccggccaagtctaacgaatattgccagaaattaatcgccaacgattatgataaatcagatggcgaaactatgtttaaagccaacaatgaattacagttgcttttaaaagcgaatcaacttaccaatcgccattttgcggtggaaaccaagaatttcatttttgaagaaaagcagccggtttattccggatctactacgagtacgcctgccaccaatgcaccttacagcatagaaacggaccaaaactatattttggcttatatgttgactgtaaaaaaagatactgttgccggatacatgcacaaaagcagagcgatgaatttaagcgatgccgtaacggttaccgtcaaagattttcagggtaaattttcagaaagaaattttaaggccaatgaggtttctcgattgattttgagtaatggtgaagaatatgccactgtttctttcaaattgtcagttgacaacggcggtatgactattgctgctgccagcaaaaaatttgtcaaagaaatgtttgtaggcaaaaagattggcatttatcaatattttaacggcgaagttattttgaaaatggctaatgagtctgaaggaaaatctaacgcctcagccagttggatgttaggtccgaaaaaacgctttgaagaaatggccaaaggttgtccttcgttattggaaagggtcgagaagaaggaatttaaaaacaatctcgaaagcatactttcctttgctgaagcactggaagcttgtaaataaaaaaaagtctctcattcgagagacttttttttatcctttatttattgagttttttggcttttaataaatgagccgcagtttggtaataggcaatggtttcgtttaccaaaacggtattcagttttgtcatcggctgttctttgtaatggatttcaaattcaggtttcaaaccgtttttcttttcctgaatcagttggtattgtttgactttctttaccggagaaattagggtcagcacattatcttttatcaaacctaaatcttgataagtagccacaaaagctcttggttcgtaatcagggctgaacacatcctgaccgtaaaacttactttcataggaaaaatgcaacattcccataattgttggcattaaatcgatttgcgacattaaggtcggaacatgttttggagcaataaatccgggagcataaaccatagcaggaatgcggtatttttccaaaggcaattctgttttacccgagctggaagcacaatgatctgcgacaattacaaaaacagtattgttaaaccacgattgctttttggccatagcaaagaattgtttcaaagcataatcggtatactttacgccaccacttctggactttgaatttcctgaaatatcaattttcccttcgggataagtaaaaggacgatggttgctcaccgtcataatgtgattgaaaaaaggacgattttgagaggcttcagcattcatttcctgaatggccttgcgatacatatcttcatcacaaacaccccagatattttgaaaggttatttcgtctttattaaaagcttttttatctacaatgtcatagccgtttccaccaaaaaaatcttccatattgtcaaaaaaagcatcaccaccataaaagtattttacggcatagcctttctttttgaaaacagaacccgtagaaaatttattcttgttgtcttttcgttttaccacactttcagcagcacttggcggtaaacacaaggttacagcttctaaacctcttacggttcggtttcctacagcataaagattggtaaattgtaaacttttatcagccaaagaatctaagaatggtgtgatgtgtttttgatttccatactcagtcataaaatcgccactcaaactttctacggtaatcaatactacatttttggttagggcagtagagtcaccggttatttttcgtgttgtactttgacctttagttccagaaaatttactgtttaggatggcaaaagctttgtcttcgggtaaggttttgtaataggtatcaaaatccaattcgctgctttcaaacgctactgcaaatttataaatgccattcgcctgcaactcgttagcaaatacattatcactattggctttttgcgccaaatagggaatcccgaaaagtgaaataagaacggcaaaggcataaataccggtactttttagtttttcattgaaatcgggtagtttgtctaaataggatttggtttgttttacaatccaataagtaatacttacggttataataccaacgcctaaaaataaaggtattacgggataggattccataatgttaccgataacagtattggtatataccaagtagtctacagcgataaagttgtagcgcacaccaaactcattccaaaagaaaaattcgctcattgcattttgcaccataatcaatacaaacaagaagaccgtgaaggaatataaacccaatcgaatttgctttcggtgttgtggtaaaaacaataacaaaccaaaacaaagtgttttaaaggctataaaggcgatgccaatctcaggcaaagaaccgccgtattcatccaaaatagtattgaaaaaggaaacataaatcaggagtaaaaccaatacagcaaagacaatgtatccgttaggtgtttggtattttttatcagataagaacaaaagatacagccatagaaaagcgctgccaaccacatatatcattatgtcagacaaaccgcccagcgcatacattttgataatctctgcaatgttgaattccgattgtgtaataggatggaacagtaaaactgttcgtaaaacggcattgatgacaataaataataaaaggagttgaagaaacggggaattctttttaaacaatttcataaattaaaattagtatttttataacagattattcctgaaataccctaattgcttataaagttaagatttccttaagaaaaaaaaacaagtaaaaaggaatctttaaaacaataattttacaaaggcgtagggtacacttccgtttaattgttttatcagaaaaaaatacatgaaaaaatccatcttaatagctttcttattcctgtcctcattaggatttgcacagaattggtcgactagtattgaagaagccaaggacaaagctacggctgaaaacaaaaccatagtgttggttttttcaggttcggattggtgtgctccgtgtattaaattggataaaaatgtttggcaatcagaagaattcaaagcttatgcagctgaaaaattagttttggtacgtgccgatttcccaaaaaagaaagccaacgttttaccggaagctcttcaaaatgctaacaaagctttagctgaaaaatacaatcaggaaggctatttcccattggtggtagtgttgaatgcacaaggaaaagtaatcgccaaaaaaggctacgaaaaccagaatgcggccaaatacgtagctgaattacaagctttaatcaagtaaaatgaaatcattcctttgtttgttggtgttaattcttggtttgtcggctaacgcccaaatcattcacaaacgcaagttgagtttgttgggcagcccttttgaaataacagtggtagccaaagacagtctcgaagccaatggttatgaagatttagctgtggccgaagtgaagcgaatagaaaacttaatttcggattggataccaaccactcctttgtctgaaatcaacaaaaacgccggaataaagccggtaaaagtacctcaggaattgattgatttgattgaacgttctattaaaatatcgaaactaaccgacggtgcttttgatatcagctatgcgtcgatggacaagatttggaaattcgacggcagtatgaaagaaatgccatcgcctgaagccatcaagaaatcggtagctaaagttgggtatcaaaatatcattattgataaagaacagcaaactgtttttctgaaattggacggtatgaagttgggcatgggaggcattggtcaaggctatatagccgacaaaatcaaagcgcttttactttcaaaaggatgtgttgcaggtttggtcaacgtttccggtgacataagtacatggggccaacaacccgacggtaaaccttggaaagttgggattaaaaatccgatgaacaaaaataaaattttcgccacttttccacttgaggatactgcggtagaaacctcagggagttacgaaaaatacgttacctttaacggtataagatactctcatattattgataccagaaccggttatcccgctacaggtttaattagcgtgagcgtttttgccaaaacaactgaactggcagatgccttggctaccggtgtttttgtattgggtaaagaagtcggaatggacttggtaaaccaattacccggtataggttgcatcatggtagatgaagaaggaaaagtaattacctcaaaaaatatagacattaaaaattatcaaaatgaataaagtttttagccttattgcggtgttgttcgttttgtcttcttgcacagccgtgaaagaatacgaaaaagaatacatcaacgatcccgaaatgaaattatctgccaagacagccgaacgctatgaagtaaccttccaagtgtatcgtgaagcggcagccggcgctaacggcggaaaaaccggtggtggctgcggatgtaattaaaaaatcaaatgaaaaagtacctatttatatttgccttactcagtgcttaccaatcttttgctcaacagaaagattcaacggcgacctttaaaaagagagttttagaagctacagaagtcgattttttaatcagttattacaaacaagacggaatacattctgcggtttccggcggtatgggttcggaaaagttaaccgaccttgcctccaatatcgtggtgagtatgcctatgagtgccgatgccattttaaccgtggatgccggactttcagcttacacttcagcttcttcgagtaacattaatccattcaatagcagtggtgcttcaggtggcgatgacgacgatgacaaggcaggaactgaaccttacggaacgccttggttggcttcctcaggagcttcagcgcaagatgccttagctagtgtggtaatcaactacagtcacagttccgatgatcgaaattttatttggaatgctgatgtggctttttctaacgaatacgattatacttccatcggttttggaggcggtgttgcgaaattgttcaatcaaaagaatactgaattgagcttaaaagccaacgtttatttagaccaatggcgtccgatattgccaactgaattgcatgagtacgataaatacggaagctcattcctgaataacggctactttagtggtataacagtttatgaccaaaacggattagcttctaacgcgtacttgccgtcgcagtttaaagctatccaatcggtgaacaggaattcctattccttatcgttttcgttttcacagattttaaccaagaagttacaactgtccttattttttgatgtgttacagcaggaagggttgttgtctacgccttatcaccgaatttactttgccgacaaagctaactattacataggtcaaacccaatacattccggtatatgaaaccactgaaaatgttggtgtttaccgattggcagacgacatcgagcgcttgccgaaatcgcgtttcaaattaccgataggggtgaggttgaattattacatcaatgaaactttcaagttacgcacctattaccgttattatactgacaattggggaatttcggcgcataccgctaatattgaggtgcctatcaagttaaacgataactttacagtctatccgatgtatcgttattacacacaaacggaatctaagtattttgcaccgttcgaaacccatgtgtcaactgaaaaatattatacctctgattatgatttgtctaccttcagtgctaatcagtatggaattggagcaacgtatgtagatatttttaccaaagcacgtatatggaaattcggcttgaaaaatattgatttccgttacaatcattacgaccgtagtgatactttgagtgccgatattgtttcattggccttcaagtttgtcatggacaaataaccgaaaatctgaatagtaaaaaagcaatcttaacggattgcttttttattttctaagaatcttttctaaggcttttcctttggccaattcgtctacaagcttgtcgaggtagcgaatcttttgcatcagcggatcttcaatttcttctacacgataaccgcaaatgactccggtgattttggaaacattaggattaagttgtgttgcctgttcaaaaaaatcctcgaaactggttttgttgtccaacagtttttgtaaagcaacaacgtcataaccggttaaccaaaaaaatacggcttcaagttcttgttggcttcgcccttttgattccacttttttcacataatgtggatatacactggccaagggcatggcgaatatcttttcttttttcattttgaatgtccggtttaaaatggattctatattttctttttacttcaaaagaaccaattatcttataaaactaagcaaattaattttcacttaaaaccctatctcgttcgagaacttaaaacggaaaaagtagtaccttagctatcgttaattacaaagttatgaaacatcttttaattgttgaagacgaagaaggcattgttcaatttttgaaacaaggattggaagaagaaggctataaaataaccgcagccactaacggtaaagcgggtttagaggcttttaacgacggaaaatttgatttattattgctcgattggatgttacccaaaatgaccggtttagagttatgcaaagccatccgacaaatgaataccaaagtcccgattttattcttaactgccaaagataccgtccaggaaacggtggaaggtttaaaagccggcgctaacgattatattaaaaagccttttagctttgacgaattggtagaacgcatcaaagtgcaattgagagaccaacctaaagatgaaatcttacagttaggcccaattgaaatcaaccttcagaaacaccaagttacggtcgacaaaaaagaagtttcctttacccaaaaagagtttgatttattgcattatttggtcaaaaataaaggaaaagtatgttcaagaacccaaatcattcaagacgtttgggatattcattttgaatacgatacaggagtgattgatgtatttatgaatgccatccgaaaaaaacttaatttaaaagtcgaagaagattttatcaaaaccattcgtggcgtaggttatatagccaacgatgaatcctgattatgcaacaactttcgtttaaaaacagaatagcttctaactatatcatcaccacagctttattgatttttgtggtattttttgctatttactctattgtaaaattcagtatttacattagggtaaacaacgaaattaaaaaagaagttaccgagcacttacaagagattgaagtcattgaaaattgtgtactcctaatcgaagaagaagagtggaaactgagtcagtttaataaagtagaagttagcccggcctttatacagtttgttgacgaattgggaacgatggtcgaaaaatctcccaatttgaagcaaaaacaactggttttcaaacccgatgcgccggttaatgaattgttcgataccaaattagaaaacatctcagtcagacaaatacaagtacctttataccaaggcaccaaaattatcggctacttaattgtagcgatgtctttggaagattccgtgatggtattgaacaacttgttcaaaattatgttgttggcctatcctttaattttgttggtattgtttttcattgcccgtttcatagccggaagaagtataaaacccatcagcgctattatcgaaacttccaatgttatcacaaaagacaatttaaaatcgaggattccgctaccgcagaacagagatgaattgttcatcttgtctaaaaccatcaataatttattggatagggtagaaaatgccatcgaaagagagaaacaatttacttccgatgcttcacacgaactacgaacaccattagctgttattaaaggaactttagaagtgcttatacgtaaacctcgtgatcttgaagaatataaagaaaaaattgctttttgtgtgagtgaagtcaatcgactgaatcatttggtagatgagttgttgttgttggcgagatttgaaaatcaaaaacaaaccttaaaactagagagtgtctcgctaaataccgtgtttttagatgttatctcgagaaattcaactataatagcagaaaagaaattgaaatgtcaggctcattttgccaaagattattacgtcactaccgatacttatttgctgggaattatcgtcaacaatattctgactaatgctataaagtattccaaatccaacgataccattgtttttgaaattgccgaaacgccgtcgggaacaatctgttccattgcggataacggcattggaatcgcacaagaagatttgcaaaaaatatttgatcagttctatcgttcaaaatctaaccaacatcctgaaataaaaggaacaggattaggattatctatcgtaaaaagattatctttattactccaaatagagcttcaaattgaaagcgaagagcacaaaggaactaaagtaattttaaaattttctaactaaacccaataacatatgaatgatgcacatttacacatggtagtgaatcattttcctatcatcggaaccattttaggagccggaattttattagcaggaatcttattcaagaacaatacagttaaaaacgttgcctatgttctttttgtagtggtcgctgtttttgcagccgttagtatggcaaccggagaaggtgctgaagaaatggtggaagatatgccaaccgttgggcacgacattattcatgaacacgaagagatagccgaaaaattagccttatcactttatgttttaggagtagtttcgcttttcgggttgtatgccaatatcaaaaaactcagtcaggctaaaatagcggctattttaaccttagttattagtgtaatagctatttattttgcgcaattaaccggaacaaccggaggagaaatccgtcacactgaaatcagagacaatgcatccggagctgaagcaacaaccaatgcggcttcagaaactgaaacagagcaagaagattaaaaacaccatacttaaataggtaaagcccgatagtatttatcgggctttttctttttaaatctattaaagctattgatttccgattacttatagactatctttaccaatcatataattaatcttatctaaatcctattagattttagttcaataatatgggtaaaaagacttatgcacgccacaactttcattcccatactttttgtatttggaaagaagtgcctttttcagcgattagtgaattgaaagtaaattacaccagtcaatccggaagccaatatatttttaccgcagcgggtttgtatcgcatatccaatcattggggaagagtagccaattgccattggcgtttggttccgttatccgagttcaaaaaccaacatacgacggttgcttatgcaaattggaccgatttttattccaatgacgataccgcaaaactcttttttattaaagttgattggttgaagcgagaagtcaacttttatcacaaacaaacagctgattccagcgaaaaggtaatttttcgcaatgctaaagaaatcgccaaaaccattagtacaataaaagaagtactcaatcaagaggattgggccaagtatttgaaatatgacgatttggaaactttaagagaaaaagtgatagcagaactagttggtacttctaaaacatttttagaagttaaaaaggcctatttgttataagttaatcgttcactactatcagttgcagctgacttttcaggcgttcaatcaacatattcatcattcgcttgtttaaattggaggaattctgaatgtattcggcgtattcttctaaagtaaaaaaagcaatcaccatgcctttgagcgagtttctgaatttgatatctctttgaataacattttcaatataaaccaatttcttttcaggtgtcaacgaaaaaaatactcttttttgcttgatggcatagttgatgaaaacctgaacaaacaaatcattttgcaactttagaatagggcgcagtgtacggttttgaaaaatttcttccgaggaagactgactgctaattgttcctaaagtttcgcctctcatttcaagaacgttattgtctctggtttccatgtggttgtgattaaagattttgcctaaaaacagtagtgaatcgcagtcagaaaaacagcttctctgacttactttaaatgtataaaaaaacctctgtcgttaaacagaggtcattttatagttattaataatctaatgttaattagtcaatttgaaaacaactttacgtactaaacgtttagcgtactcagaatttttgtccactgaactgtcaatgcctgcacctttagcgttaagtcttgatgggtcaataccggctttaaccaagatgtctttgatattctcagctctgttagcagccaatttttcatttttagcgctattgccaacttgatctgcataacctgaaatttcaacagtagcattcgggttgtttcttaaatagttcaagatgaaaccaatattgtctgatgatccaggtgttggcatagaaactcctttgtcaaagtaagccgcgatataaccatcattaattaattgctcaatcatacctttagacaatactgtattgttgttgttggttatggaagtatcgatatacttctctaactcgtctggtacaccattgttatttttgtcaaccattctaccttttgtatcaaccgctacacctgctatagaattgttctccacatcaagataatcaggcacaccatctttatcagcatcattcattaaagtctcaatttcaccgatacggttgttcaattctttcaactctttatctttcttatcttgaatgatagcccaatcaccgtggattttttcactaccaaaggagtaggagatacctaatgaagtcactaccatttgaccagctaagttgttcgaattgtctgagtaagaaccatcccagttgaaatgttgtctgtaattattggcaacactaaaatcaccaaaaactgcaaaatgatcggtaattctgaactgtggtgaaaaacctagaatcaaaccaccattgtattcagttacattataattttgatcacttggcaaaacatttttcgtttttgatgtcattctggacaattgtaatcctccgtgtaataataaaccaaaacgtcctgcagattcttgtaaattgaataaacgaatcgcgtttactacaccttgaaatccgaagcggtattgcaccattttgaattctaaacttccgctcccaccttggttattaaactcttcgtaatttaagtcggcttttaccccaaaagtcggactaatcatgtaacgaccggcaataccaaaactatttgcttgtaatcttccgaagaatttttcaggattgctggaaaaatagccatctttatagggtctaacgcctttaccttgtcccactgatacttcaatggaccatttgttgtaactgtcaccaatgatacctgtagtatcaacagcaacctgagcaccggcagtataaagggataataatgcaagtaatgatagtaggccttttttcatatttgaaatatttatatactaaaataaatgttaaaactatgcaaatatatacgtttacaattaataatcaacttttttgactactaaaacaccccttgaatcggactaaaaccacaactttttttagaaatcgatttcggttaagaatatattaaagcaatagtaatgatttaattatagcgtaactttgacttaaatttttaaaaatatgagattccataccagaaaatgggttaaaccggaagacttgaaccctaacagcactttgttcggtggcagattattggcttggattgatgaagaattggctttgtattccatcattcaactcgaaaatcccaaaattgtaaccaaacacatgtcggaaatcaatttcagaagctcggccaaacaaggcgatatcgtagaaatcggaatagatgtggtaaaatttggtcaaacctctattacgctgacttgtcaagtaagaaatatgatgacacgagatattatcatcagtattgatacgattactatggtaagtttgggtgccgacggaaagccaaaagcgcacggcaaaacccaaatagaatacatcaaagacagattgggcgattagtttacaaaatcgtttttaccggacggcatttcgtaaatttctaaatcgaagtaaggaatagcggcaaagatatgatcaaaaatatcggccatgatgtattcgtagttttcaaatcgtttgtcgttggaaaacgtataaatttccagcggaataccctgcggcgttggttgtaattgtctacaaagtaaaatcatgtccttgtttaagccgggatactgactcaaatactgcgtaatgtattttcggaacaacccgaaattggtcatattccgaccatttattagcagacttttatcgatgttgtgtccatcattaaactttgtgatttctgattgacggttttctatgtatttggaaattaactgaattcgtttcatttcagccaattcgctttcctttaaaaaacggatactttgtgccttaatcaggatgtgtcgtttaatgcgtcttcctttggaatctaacataccgcgccagttgcggaatgagtcggagatcaagctgtaagttggaattgtagttgttgtattgtcaaaattgcgcactttaacggtagccaaattaatttcaatcacatctccgtcggcaccaaatttgtcaaatgtaatccaatcgccaatccgtaccatatcgttcaaagacacttgaacactggccacaaatcccaaaatagtatctctgaaaattaagataataatagccgaaacagctccaaaagttcccaacattgcattggtactgatatcgaatattttagaaacaatgattataaatccgaatatccacaacactatcattataacctgaatgtagctgtcgataggtttgtcgctaaaagacggattggtttttaaatgatctcggaacgcatgcaagatggttttgataatccacaaccccaaaagcacaatgtaaatggcaatcatcttcccgaaaacaccttcccaatacacaaagttttccaagataataggtaccgatttgtaaacaaaaagtaacggaataaggtgcgaaatatacttagcggttttgttggataccaataaatcgtcaaagcgggttttggttcttcgggctgtaacaatcaaggcgcggaccaaaatgtatcggaatacggtaaaaataaaataggctaaaatagtcagcaggatgatgttaatggccaagctggcataagccgacaaggtttcgccaaagtcccatttttggaacatcggataactccaaccgaatattttttcgacaactttatgcattcgtcacatattttttctctacataaaaggttgcaaacggcaatagggaagccaattgaactatgataaaatctttccatttccattgttggtcttcgcgtatgagtatagccaacaacacataacccataaataataatccgtgagccatgccaaccggaaacaataaggctttgtacaaacctaaatcgtttggcttgataaccagcatgttaaaaaatagaaccaaataggaaatgccttctgcaacggcaacgaatttgaataatcttgtcataagtaacagcaattttccacaaaattaagcaataacaatttaaaccacccaaaaagaggttacatttgttttttatcccaaagatgagcaaaagagatttaaaaaaatacctgcccgaattatcaaaagaacaattagaagatcagctgatagcgctttatgacaagtttagcgatgttaaagtgtattacgattttgcattccatcccaatgaagacaaactgatacgagaagccaaattcaaaatctccaacgaatattttcccgttagaggcaaaaagccgaaaatgcgccgttcggtagctcaaaaattcatcaaacacttcagaacgttaggcgtagatgtttttttagtggccgatttgatgttatataatcttgaaattgcccaaacgctatcggcagaaaaacccatcaaacaggaagtgttttataaaagcatgcttacgtctttccaacaagctgttgcgtttctgattgaacacggtattttaagcgatttttacgatagagtagaggctgttaaagaagaaactgtgactcaaaattggttcaatcaatatgattttacggcagttacagaaagactcgaatattaaattttagttatttaccgtaattcatgatgcgataactcttttttagctgtacttttgcaaaattgttcaaaatgctatgtctcaaaaaaaattaaaggtagaaattgaagaaaaaaaggagctttacgactaccaaaagggagatattgacaaaatttttgaacgtttggataacgcgccaaacgattatcatttgttgtaccaattgccaaccggcggcggaaagacagtaattttctccgaaattgtccgacgctatttgtccaaacacaacaaaaaagttgtagtactgacgcatcgaattgagctttgtaaacaaacctctaaaatgctcaaaggcttcgatgtcaaaaacaaaatcatcaacagtaatataaaagagctaccggatcaagacgagtattcttgttttgtggcgatggtggaaacgctcaaaaatcgcttaaacgatgaaaagttgatgattgataacgtaggcttagtaattatcgacgaagcgcattacaattccttccgaaaattattcagtcagtttaaaaattcttttattttaggtgttaccgcaacgccattgagctcgaatatcaagttaccgatgcatcaaaattacaacgaattgatagtgggcgacaccatacaatcgttaataggtaatggatttttggcccgagctaccacgtacagttatgatgtaggattgacatcacttaaagtcggaattaacggcgattacaccgtaaaatcgtctgatgatttgtacatgaatatggtcatgcaggaaaaattgttgcatgcttacactgaaaaatctttgggtaaaaagactttgatttttaataatggtatcaatacttctttatatgtttatgatactttcaaagaagccggatttcccattaaacatctggataatacaacgtcagccgaagaccgcaaagatattttgcaatggttcaagaaaacaccagatgcgattttgacatctgtgggtattttaaccacgggatttgacgaaccgaccgttgaaagtattatattaaatcgtgctaccaaatcattaacgctatattttcaaatgattggtcgtggctcgcgtaagttgccgcataaagatgattttactgtaatcgacttaggtaataatgcattacgattcggtttgtggaatgatccggtcgattggcagcacattttcaaatcgcccgaatattacttagaaagtttgcgtgatgatgtcgagattgagctgaattttaaatacactatgccggaagccattcgtaaaatgtttgtcaaaacagtcgacgtaacgatggatattgaagccgagtttaaaaaaattacagctcaaaatttacgttccaaagaagtcatcgaacgctctataaatcagcattcgttaatgtgtgttgaaaatgctgaagatttatatggcgccaaaatgttatctaaattattaaacgatgatattgatagtcgcgtaaaacgttatgtgagttgtttgggcaaaaccagcaagaactatcgtgaatggttgattgacgattacaaaaccaaattaagtttagctatcggtaaaaaattcagagcgctaaatttctaaaataaaacttcatttggtttaagttaagtaattctaaatcataattttgacattaatttatcttcttattaattaaggcttatttttaaactataatttatattatgtaaaatagatttttcagattctgttgcaaaaacatcctattatagttttcaaatctttttaacaattgccctatcatgcagaaagctttagtatttttgtaacggtatttgtgtttcctaaaaatgtttttatgagtaattctgtcgctgaaaatattgctaatttactaagagaatatccgccgtttaattatttacgtcacgacgaattgattcaagtcgcgaccagtattggtgtggttagtttggacaagcacaaaactttattcaaaatcgatgataaattacacgatagtttttacgtcgttgcatccggagtcatcaatctttctgttattgccgatgctgaagaaacattgcttaataaatgttatcctggtgatgtatttggtttgcgtcctttctttgccaaaaacaactatatgatgaccgccaaagcgcgcgaagacagtatagtatatgctattccaattactgtttttaaaccttttgttgctcaaaatccacaggttttagacttcttattggagagttttgctaccaatacacgcaatccgtttgataaagaaaatcgcagtaaacttattactgataatgtttacaccgagaatcaatcgaatgaaattcaatattttcagtcgttgtcctacaacaaaatgccactaaaagtaaccgccaacacagctgttaaagatgtggcgcaactcatgaccgaaaatctgatagacagtgctatcattatcgatcaaaactgtccgctcggcattgtaaccgatacggattttagaaccaaaattgccaatggtcgctttgctattactgttgcaattgataaaatcatgtcagctccggtaattacagttcccgaaaatgtatcagtagccgaagcccaattgttattactgaaacacaatgtaagtcacctttgcgttactaccgatggctcggataaatctgaagttaaaggtattatctcggaacacgatttgattgtagctcaagccaataaccccggtgtattaattaaagaaatcaaacgttctttatcgccaaaagaattaaaattggtaagagaaaagttaaccgatttgattcagagttccattgctaaaaacataccgctgcctcatatttataatattaccggtgaaattattaccgctataatcagacgctcagtagaattagcgattttggatttaggttctcctccatcccgatttgcttggttgagtattggtagccaagggcgaaaagaacaactattattaacggatcaagacagtattctgatttttgaagatgtcgctccggaaaaataccgtgatgttaaagattatttcttaaaattagcaaaaagaactacgaccattttagaaaaagttggttatcaattttgtcctaacggccacatggccagtaatatgctttggtgtaaatcgatgagcgattggatcaaacaatacaacaattggatgaaaatgccgggggagaaatccaacgacattagcagcatctttttcgactacgaaatcgcctttggtgaaggtaaaattgaagataccatttcggatttgattgtcagtaataccaaaaacaatgccctcttttttgactatctcggcaatgatactttgcgcaaaaatccgccattgaatttctttaaaaaattcaatgtggaagaagaaggcgaacacaaaggaaaattcgatatcaaaaatagaggcatcatgcctttggttgacggagcaagactgtttgcgttgagtttaaatttacgcggcatcaataatactcatgctcgattcaaacaattggctttggtagatccaaaattttctgagatttacttgaattgtgccgatgcctttctgattttgtccaagttcagaacattggaaggcctgaaaaacgacaattcgggcgacttcatcaatattgaagaattgaataaagcagaacgcgaacgacttaaaaatgctttgtctccgatgaaggatttggaagaactgattaaagataaatttcaattaacacaattctcctaacatgctggattggattaaaaatatcaataaagaatacccggatttttggaaagcctatttggccaaatttgaaaccaaatctaatcgttatgtggttttaagcactgaaactaccggtttaaacccaaagaaagacgttatcttatcttttggcgcttttggtgtagtgaatgatgtgattaaaattggagacaattttgaagtggtgattttacaatacaaatatttacatgataacggtttgtcgaacgagtttttgattgaaagtaaattgcccaaactggccgaacctcaggcgatgcaggctttagtagaatacattggaaactcggttttagttggtcatcgaattcattttgatattgaattgattaatgaagctttggaaaaaatgtcgtgtggcaaattaaagaacgaagcgctcgatattgaaatcatgcatcagaaacatttagacattactaataaatcgttttctatagatgatatggttaagcattacaaactaccgttaagcgcgaaaaactccgcctccgatgatgcttatgccatcggtttactgtttttaaaactcaaaaccttattaggattcaaataaaaaac

SEQ ID NO: 11 - DNA, 97056 bp, Sphaerospermopsis sp. LEGE 00249
  LEGE00249_20
tgtctttgacaatcttgggaaatgaatttataatcatgatcaaatcaatattttgatatagcttgctcaaattttaatatattttgggctatttttatcacagatttcttaacattcaacacttctgattagaagaatatgcaagagatatacaaagacttaataatgatcaacaaaaaaaagttgaaacactaaccggatatatttttaatgatttttttcaaaaacaaggtcaatcttgtatgagtcgagaagaagcagaacttcttattaaagaaataaatgattacctttttagagaaaagaaccctcttgatacagacttaaagaattatccactccatttaatagtttgctcctataagaaaaagctgaatgaaatcaaacatgatgatgagagaataaaaatccctagtagtattctctggcattgcgcccaaaacatgacatatccagaattttaccgcgcttggcatggcaacaaaaccacaattaaaaacctagaaaaccaatttacagatacccattctctcctcaccaaactccaacccacaaacaaaacatatccccttcccctcaacctcaaaaccctggaaaacgaaacagatatcatagaaatatctcaagaaatttgcaaccaaatttacctcacagcatttaccgcacctgaagaaattcccacagtaaacaacgcacctcaactaaaaagcaaaattccccaaatcaaaaaacatctaaaaaccgaaaacctagctttaattatcaacaactgcgaaccaaacgacactatcatcaacttctgtaataaactcacagatgtattacatatcgccttcatcacagaacaaccattaaacccaccattaagaggttttccccaacaacaaaacctactcaatactattcaaaattggattaatgagatagaataaaaaattgaaaacccctactcaacaactcatcaaaaaactaatcccatcaaatgcaaattacccaacctctccacaccgccatcctcgtcaccaacctaaaacgctcagaacacttttatggcacaatattaggactagcaaaaattgaccgcacccttaaatatcccggtgcatggtatcaactcggtaactatcaaatacatttaatagtatccccaaccgtccccacagacaaccaaaacgaaaaatggggacgtaaccctcacattgcattttcagttgtggacttagaagcagcaaaaacagaattacaaaatcataattacccatttcaagaaagtgcttccggtcgtcctgccctcttcacaaaagaccccgatggcaatattattgaacttagtcaacaataatagtcgtaggggcgaagcattcggaaaatagctttggagaaaaattgataatttatcgcccgaatgcttcgcccttggagaaaaattgataattgttcgtccgaatgcttcgcccgtacaggagtcaggagtcggaatatttgctgatatcaggaatatatagataggaattacgcaaaatctctattatactctcttcccttcgtgtcctttgcgtccttcgtggttcgtttcttccttcttccttttatcttgcaaatatatcaacactcatgcaaaatctctcttataccctcttcccttcgtgtcctttgcgtcctttgtggttcgttttccgtgcttgaattatccgtaattctcaaaagatatctaattctacatttcccaacagcaccccattaggtaaaataaacatctatttgcaaaattgtagtccaaaacaaacaggggaactatggcgcgtctggcattgctgagtgtatctaacaaaactggtataattgacctagcccgcagcttggttgaggaatttggctttgatatcatcagcagtgggggaacagccaaaaccctgaaagatgcgggaatcccggttacaaaggtttcagattatacaggttcacccgaaatattaggcggtcgggtaaaaactctccatccccgcatacatggcggaattttagcacggcgcgatttagaacaagatgtcaaagatttagaaaataaccaaattcgtcctattgatctcgtcgtcgttaacctttatccttttgaggaaaccattgctaaacctggtgtcaccttagcagacgcagtagaacaaattgatattggcggtccggcaatgttacgcgcttcatcaaaaaactttgcccatcttacagtattatgtgatccggctcaatatgatgagtatttgcaggaattacgccaaaatggctctgcttctttagaatttcgccaaaaatgcgctttaaaaggatttttgcacaccgcaagttatgataacgccattgcagcttatctagctggtacgcaaagcgaaggtttaccagaaacttacacggtttccggtacacaaattcaacctctgcgttatggagaaaacccccatcaacccgctgcttggtatcaaacgggaactaaacccactggttgggcagcagcaacgaaactgcaaggtaaggaactcagttataataatttggtagatttagaagctgcacgacgcattattgctgaatttactgaaagtccggcagcgacaattattaaacatactaatccctgtggaactgcggaagcagaaaccatttttgatgcttatcaaaaagctttcaatgctgattctacatcagcttttggtggtattgtggctttaaaccgagctattgatgcagcgacagcaacagaattaacgaagacatttttagagtgcgtggttgcaccgagttgtgatgaagaagccaaggaaattttaactaagaaaggtaatgtgagagttctgattttaccagatttgctcactggaccgaaagaaactgtgagagcgatcgctggtggtttcttggtacaaactgcggatgatatcgttgccgataccgctaaatggcaagttgtcaccaaacgtcaacccacacaggcagaattagcagaattattatttgcttggaaagtttgtaaacacattaaatctaatgctattgtcatcagcaaagatagaacgactttaggagtaggtgcgggacaaatgaaccgggtaggttcggcaaaaatagcactggaacaagcgggagaaaaaacccaaggtgcatttttagctagtgatggtttcttcccctttgatgataccgtgagaacctcagccgcagccggaattactgctattgtgcaaccagggggaagtctgcgagataaagactctatcaaagctgctgatgaactgggtttattgatggttgtcactggtgttcggcatttcttacactaatttaggtgattggtgattgggaaataattaatcctgtaaaatcggtatgtattttgtgatggaaaataataaacattcccagtccccagtccccagtccctaacatgagtgcagttgtaaaagtggcactcaatagatccgttttttgatcggtacagttaacatgatttttgtgtgtgagcaagtcctaagttgacaatttcatagacaaaactatacttgtattgacaaaaatcaatatatttttaggaaaaaatcaactacttgatatataatacggtgatatcaagtattgaattgagactattgccgacgcgaaaaccaagcaatgatggtggtagtctttttcagaaacttaattggaacacaatcgcgtctggctaaggcgtgaaagtctactgagggataactgctcccatgctcccgttgaagtagaaagtaaagtctagttttgtctaggttttatatagcagtaagttgaaactaaaaaacgcttggggtggaaacacggcaacactcccaggcgttttttatttggctgtattttccctgcaaacgatatatttaatttactaatataaaatttccaagaaaactcttgctattctattgaaccagtgatatattctagttgtgtgtgaggagcaaagttcaaaaagcgtctggggtggaaacacggcaacactcccggacgttttttgcatagtatgaaatataaaaaccaatattaatatctatgccaatttatctaaaatgtttttccactcaatttcagaaagtggttgtatttcaacccgcatattaaaactatcacaagctgcatcaattaaagtattaataatcgtttcttgatctaaattctcaggtagtttcacaggtgtaaaagtatctttaccaaagacttgtttaaataaatctgcatctgggtgtaaaattatagaaccatgttgtaaaattgtctttccccgtcgcagttgggcgctaccaattaatttactaccatctgctaaaattaaatctgcacctgtggcagttgcaaaacagttagggttgtgaatataaccacggccagcttgaccatagcttaactctacaccgagcgatcgccatccagcaatcagaaattcacaaatctttgtataagcttgtaaacgactacccggtatttctgaagttatgactgcgtaggttaaatctccttggtgtaaaactgctctaccaccactaggacgacgtactaaatccagtttatcaccatccccagttaaattggtggtgagattttcccaaaattccgggtattttttttgatgataacccaaagaaatcgcaggaggcgaccaagtataaaaccgcagagttggggggtgttttcctgactcatgctgttctagcaaccatctatcaactgccatttgtattttaccagcagctgcaaaataaggaattagtcgccaaacctgttttaccacaaaatctatctaaaatccaaaatccaaaatccaaaatctaaaatctaaaatccaaaattgcctatgctgcaccaaactcatctatcaaaggctcatcatagttatccgcgatggtagcaacaatagtaataatacgggaaatttcccctggtgacaattctgctacagtgcgtgtggaaatgacaaccacctgattttcaataataccaaaacgagcttccaaggtaacggtacagttcaactctaacagataacgcattaatttgggttcatctttagcgggtaatttcagcaccccagcccaaaccgtgatagtatcttcatcactagaacctgtgagttttacgaatacttccactgttccatatttaaatttccacagataagcgccatctggtgaatggctaaccattgcgctatcatcctgttgtaaggtgctaatgacgttttcaattaattctacatgattaagaccggatgtttccgcaatcagttcatcaactaattcatcaggagttagggtttcttggtagcttgtcatacagattttttcctcaatatagttactgcttgaagctacaactactttatcgtttgtagctaaaattggcttgagttagaagtttagggaagagggaacagggaacaggaaagaagaaataaaggcaaaaatcaaatatgatttctatattatatcttggaatatacctaattatcaatattttatgcaacaaataatacctagcaatcatgtttctatttctccaagtttacaaacaagtgtccgcaaattagcaataaaccccaatcactggtatgtagttgcacggagtaaagaggttacaaataagccattagctgtaacgatttggaaacaggcgatcgcactttatcgagatagtacaggaaaagttcacgccttagaagatcgttgtcctcatcgtcaagttaaactgagtcatgggcaagtaataaaaaacgaattagaatgtgcttatcatggttggcggttcaatagtgaaggtgaatgtgcagcagttccctatttagcagataatcaaaaattaccaacttgtcaaattcgccgttatcctgtgaaagaacaagatggttttatttggttatttccgggcaataaagaaccaaatatagaaccaatgggtttaccagaatgggataatttaaattatattgccacagtttccgtgattcaaactcaagcccattattcttatttaattgaaaatttgatggatatgtatcacggacatttgcatcaagatttacaagcttgggcggaagcatcactgcaaaatattgatgaagatgaaaataaagttcatgcccattatacagcccaaagttattataaaatagataaaatttggtcaatctcccaattattttttcctgctttgcgtcggttgcatcctgaaccactagatgtgagttatgtttatcctcattgggtttctaccttgggtaatgattttaaaatttactgtttattatgtccagtaaacgagacagaaactaaagcctatttaattcattttacctcactcaatgcgttttggagattacacaaattacctgtatggtttcggcggtttattaaagatagcttatttggtgcagcacagaaattacttgacggtttggtggtacaagatgtaaaaatgatagaagaagaacaacaagcttttttacaaaatccagaaattagaaattatgaattaaatcgagctttggtaagtgtgcaaaaattgatgaaaaatcaagttgaaaaatcaagttgaaaaattgggtgaggtgttgatacagtaggagtcaggagtcaggattaaaatacaaaatccctgactcaagaaatcagggattagaaaacagctattttttttagcatttccctcacgctaaagcggaagcttgaggtttcgcaaaaatcattctccctgctgaggtttgtaaagcactggtgacaactacccgtagttcagcacccacaaaaccgcttccttcctcaacaactaccattgttccatcatcaagataaccaataccttgagtcggttctttaccttctttgagaattttcaaatcaatattatcaccaggtaaataagaaggacgcaccgcatttaccaagtcattaacattcaaaactgggactttctgcacactagcaacttttgataaattgtagtcattagttaacagtgttccgttaatttcttgggcaaattttaccagttttgcatcaactgtatgaatctcttcatagtctacagaattaattacaatcctttctgggtaagtttcccggatgcggttgagaatgtctaaacctcttctacctcgcacccgttttacatctttactggcatcagcgacttgttgcagttcctgtaaaataaaccgggggacaattattactccttctaaaaatcccgtttctaacaatgcttcaatgcgtccatcaataatgcagctagtatctaaaactttagtatttgcaggtttgagagttccttccactactaaagtttccacagtgttaggattaattaagcgtaataaaccccgtccgtgggtatctgctaaattcatacccgttacggaaaggatgatactgccaacaacggctactataggtttaataaagctgaaatctgcgggaatgggtaataaaaatagcggggctaacattaaattagccagtaacaacccaattactaaaccaatggcacgagttaaaatgacttctagaggcatttctttcacttgtgcttctaagcggcggtaggtagtctggaaacttaaacccactgcaccaccgatgatagcagcaaagacagcaacaactaagcgtaaagcgtctaggttggttactccgtcaagagttccaggggggaggaggtcggtactgaaataaccgattcccgcagaggcgataataaatgagagaatgatagtgaaatcaagcatgataatgtttcctgcgactgtgtttacccattagagtaaggtattttttatttcaacggtgattgcttggggaatatgaacttacactataggtttaccagttaatacaattatgcaaacattatacccaaagacttttccttgcataattattattatttttgttatcaaaagatgaattgttgtaaagaaactgagaatgggtaattggtaattggtgattggtaatgggcaatttatcacctaatgtagatattaaataaatctaaaatctcaaatctaaaatattatgagtttttctgttcctactgctgcttatgtacatattcctttttgtcggcggcggtgtttttattgtgattttccggtatttgtggtaggtgatcgctcacggggtgaaacatcacatacaattagtcaatatgttgaggcagtttgtcaagaaataaactctgcatccacttttaatcaacctttaaaaaccattttctttggtggtggtacaccttcgctgctatctacagaacaattacaacagattgtaacaacattagaaaagcgttttggcattgcatctggggtagaaatttcaatggaaatggaccctggtacttttgatttagcacatatcataggatataaaaatgcaggtgtgaaccgggtaagtttaggtgtgcaaacgtttccagcagaattgttaaaaattgcagggcgatcgcactcagttgaagatatttttgcagctattgatttaattcaccaagtcgaaatacccgaatttagcatagacttaatttctggtttaccacatcagtctttagatcaatgggaaaattccctaactaaagcggtagaaattgcccctacccatatttctatttatgatttaaccatagaaccgggtacagctttcggacgttattaccaaccaggagatcaaccgctaccgacagatgaaaccactgtcaaaatgtatcaattagggcaaaaaatattaacagatgcaggttatgaacattatgaaatttctaactatgccaaaagcggacatcaatgtcaacataatttagtttattggcaaaatctgtcttattacggtttcggaatgggtgcagctagttatgtacaaggtaaacgctttacccgtcctcgtaaaaccaaagaatattatcaatggttagaaaatggtgcaataattgattgtgacatcacacctatagaggaagaattgttagaaactttaatgctgggtttgcgtttagcatcgggtttgaatttaaagacgttaacccaaaagtttggtacagaaaaagtagaaaaaattaaacaatgtttgcacccttattttgatcaaggttgggtacaaattatgggggaaaaattgcggttaactgatcctgatgggtttttattttctaatgttgtgttagcagatttatttgataaaatcggagaataagatcaattttgagtaagcattcagctatcagtaatcagtaatcagcttaaacctataatatagataggagttgctgagaaagtcttttcgtggaggtagggaatagggtataatcctgtaaatttcgatttataatataattatcccttggattattctaaaatctatcataacataaccctctcagaagtcaagacccttgaaattacgttgagtcatttgcagctattctcaataattttgggtgaaaaatgcggggtgaaacttttttgggaaaattgagttaagaattgttaaatggaactgtggcacaaaaaagccagatattttccctacttggtcatattcccgaagcgatcgctcatcatcatcccaaagttgcaatgatgattctttattttccccagtagtgggtgattggtgattggggactgggtaatcaatttaaaatttgatctttccccatcgctaatcacctgtttctcaattaatagcccctattaatttaaatcaaatatcccatttattcagataaaaactaataaactaatccgcgtttatctgcgttcatctgcgttttctattctatattatctatattaataaattccaataaaaaatctgatccagtgggaatttcagtttttgggtatataacacccttggattattctcaagactatcataacacaaccctgtcagaagtcaagacccttgaaattacgttgagtcattcgcaactattctcaataatttgagggtaaaaacgagtgttgaaacttttttgggatttttgggtcaaaatcatgttaaaaattgttaagcaaaaaacgcagatgatcagaaagatttgcgatcgctcataatcaacccaatgttgctatgataatggtttattttcgccagtagtaggtgactggggactgttgactgggaagagaagcaggggaagcaggggaagaatattgaacttttaccttttaccttctgcctcctgcctcctgccttctgcctcctgcctcctgcctcctgactcctgactcctgactcctttgaaattatgctttatcccgttgtttggcagaataactcagttttactcatagatcaaacccgtttaccaaatgagtatgcagtggtagaaattaatcgtagcgaagacatggccgaggccattataactatgatagttagaggtgcgccggctattggcgttgctgctgcttatgggatgtatttgggtgcaagggaaattgaaaccagcgatcgcacggaatttttaaaccgtttagaacaagttgcccagttattgcgttctacccgtcccactgcggtaaacttattttgggcaattgggagaatgatgcaaacagcttatgaaactctgggaacaatagcagaaattaaacaaattctcctagaaactgcccaaaatatcaacgctgaagatatccaaacctgtgaaaaaatcggtgatcacggtttaacagttttacccaaaaccccagaaaagttaatcatattaactcactgtaatgccggtgctttagcaaccgctggttatggtactgctttaggtgtagtgcgttctgcttggagagaaggaagactcacacgagtatttgcagatgaaacccgtccccgtttacaaggtgcaaaactcactgcttgggaatgcgtacaagaaggaattcccgttactgtaattactgataatatggccgcccattgtatgcaacaaggtttaattgatgcggtggttgtcggtgctgatagaattgctgccaatggagatactgctaataaaatcggtacttatagtttagcaattgtagctaaagctcataatattccgttctttgtcgctgcaccgatttctactattgattttaccttagctaatggtagtcaaattcctattgaagaacgtcatccttcagaagtttatcaagttggtgatactgttttgacaccttcaggagtagaattttataatcctgcttttgatgttactcccgcagatttaattacagccatcattacagaaaatggtgcttttgctccaggggatttggtaaaatgtcatcataattcgtgagcaattcaatcaatacaagacttacgcaaaacagaacaaaagtaggggtaattcatgaattacccctacgcaagaatcaggtttttagtccaatcttgcgtaagccctacaatattatttacccagaatgacggtctatttcctgaagctgtcctaattttttaattaccaatccttttgcaatggtagttaaaactggtttgataattgaaggtttgatcaaaccagaattttttcattcgggactatcccaattttgaaaaaataattgtagcaacaccaaaaactctcgtttaactctcttacctttgtgttctttgcgccctttgcggttcaatcatatcaaggcttagagcatttgatttcgttggttaatttttttaggattgattaacattatacatatttattatatagtatcatatactggtactctcatctaagaaaattttagctaatcgtaagattttgtaaaaaattaattgagttttgacaaaacgttataaattaccacccatgaaaaaattaattcccacactcaccttaattctttcctgtatttctttggttagttgtagtaatgcaccaaccgatacaaccacagcaacatcaactaataatactgtagaatctcaaccagaaaattcacccacacaggaaacagaaaaggaaaataaaacagaacccaaaacagaaacaaaaacagaaacagataaaccagagaaaataaaatctgcaccgcaaacagtcagcaaaaccaccatcaaaaataaatcaccgcaagttggtacagttaaagaattagtcaatggtgatttaatgtgttatgtcaccttagtagatgaacaaggtaaagaaaaccaagttggtgcgagttttgatatttgtgcagaagaaggaaaatttttaaataaaaaagtccgtgctattttcacagtagaatcagtgaatgattgtgaaagtgcagaaccttgtggaaaaactcgtcaagaatctataattactaaaatggaggttttagaagataaaacaacagcaaaaaccgaaaccaaacctcaagcaaataaaacccaaaccattagtaatggagagtggaaaattactattggtaatgctgactcttggacaggagttaataatacaggaaacttgacatataaaggatgtgatacaaaaggtaactgtcttgaattaacaggtggtaaagtttcctgtcgtgatggaaaatgtgttacaggttggagaaatggagattatgtttacattttagaacaaccgattacagaagatggaaatgcggattcaactttaatcgtaagaaaaggtgatcaagaaattctcaaagcgacaggattaaaataagtaataggttgggttgacaaaaagaaacccaacattactcattttcttcctttgtgtactttgcgtactttgcggttaattaacccaaaaatctggaaactacaccgagaaaagatgaataaataaaatgatctaacttcttgttaggttacgctgtcccttaacccaatatacattaaattagattaaacaggaaaaattctttctccactacccggatcaaaaacaaataaatgatttaaatcgaaatgcaaatgcaacttttcaccgggatgtaaacgcacacccccacccacttgaacattgataaaactagaagaattaggtaaactcacacgaattaaagtttctcttcccaagggttcaacaactttaacttctactgcaagggttgaattttctggttgaatttctgctttactaatactaatatgttcaggacgaatacccaaattacaaatttgttcagggtgaaaattcaaagctgctttgatattttcaggaacagctaatagttgaccactaataccaaaattatcaccttgataaatagagggtaaaatattcataggcggattacccaaaaaagctgctaccatttcattagcaggtaaagcataaatactttgaggatcgccaatttgttgaattcgtccccgatttaacactacaattttatcagctaaagtcatggcttcaacttggtcatgggtgacataaattgtcgtaattcccaattcttgatgtaattgttttaattctgctctggtatcatctcgtaattgagcatctaaattagataaaggttcatcgagtaaaaataattgaggttgacgtgcgatcgctcttcctaatgctaccctttgttgttgtcctccagaaagttgtttaggttttctatctaacagatgttccaaagacagcgatcgcgcaaccgttaacactcgttcttgaatagtttttttatccacctttcgcatttccaacccaaaagcgatattttgagctaccgtcttatggggataaagggcataattttgaaataccattgctacatcacgcgctctggctgggatatcattaaccaagcgatcgcctatatataaatttccagaagtagcagtttccaaacctgcgatagttcgtaaaatcgtagacttaccgcaccccgaaggaccaactaaaacccaaaactcaccatcaggaatttcaaaggtgatatcctcaatcgcggtgacattgttaaatttacgtttaattttatctaaaacaactttagccatttctaataattgataattgataattgataattgggcattaggcattgggcattgggcattgggttattaatcttcccatgctccccctgcctcccctgcctcttccctgtcacctgtcacctgtcacctgtcacctgtcacctaaccccacgcaggatgagataaaagagaagccattacccgcaccccgcgcagttggttagaaaggggtagatgacctctaggggcgcttaaatcccaggtaaactcgttggggtagcgagtccatttattgccatccttccagccgatttttggccataaagtttcccagtttctacccacccccaaccaaatttctcgctgtacagaaaaaccaaacttgccttcggagtagacaacccaaagatgattaattgtttgtagatctttgatggggaaattttccacttcagtaaaatacaaccattttctttgtactgcttggggtcctgccatttcgcacattttttgaattgtcagcagatcagcagcttgaaactcctgcttgatgagtaattgttgcaaagaattgtaactgatcccacgatctgattttagaggtacaattccttcaggaaagtgagtttctagaaattccttagccgtaggtgcatcagaattgtagatgacttggtaagctttaccatcaatccaagttgcttgagtgtcacgacgtttcaacaaaaattcctgcaacacctctaaaccctcattacccaatttagctaattgtgggatgatttgttgttggactttttcggacccagcgattaacttttggcgcagggagtcgatgtcattagcagtgcctgatacaatcattgggtctgtcatgccattactcgtgttagcgtttcagtgaacaaacgaatcagctattgggcattctacaaaatgaagcacagatagcgaaaagtagtttactatttttgaccggacaaagtagcgccggtttaactgcaatctacgtctgagctaccaataatttaccaggtaaagcaggggatgatctgcgcctcaaagaaagggcaggggaagcaggggaagtaagggaagcagggggagaatattaacttttgccttctgtcacctgtcacctgtcacctgtcacctgtcacctgtcacctgtaactccttgaaattattctatttggaatgtgttaactatgtacgacaagattacccccccgacaactggcgaaaaaattaccttcaaaaatggtgaacccgttgttcctgacaatcctattattccctttattcgtggtgatggcacaggtattgatatttggccagctacagaaaaggtgctggatgctgcggtagcaaaagcatacaagggtaaaagaaaaattagctggtttaaggtttatgctggtgatgaagcttgtgatttatacggcacttaccagtatttaccccaagatactctcaccgctattaaagaatatggcgttgctatcaaaggacctttgactactcccgtaggtggtgggattcgctctttaaatgtggcattacgtcaaatttttgacttgtacgcctgtgtgcgtccttgtcgttactatgcaggaactccttccccacacaaaaacccggaaaaattggatgtgattgtttaccgggaaaatacggaagatatttatttggggattgaatggaaacaaggtagtgaaataggcgatcgcctcatttccattctcaacaatgaacttatccccgctaccccagaacacggtaaaaagcaaattcccctggatgcaggtataggaattaaacccatcagtaaaagcggttcacaacgtttagttagacgtgccatcaagcacgctttacaactgcccaaggccaagcaacaagtaacattggtgcataaaggcaatatcatgaaatacaccgaaggcgcttttagagattggggttatgaattagcaaccagcgaatttcgtaatgaatgcgttaccgaaagggaatcttggatcttaggaaataaggagaaaaaccctaacatttccttagaagaaaacgccagaatgatcgatcctggttttgatgctttaaccccagagaaaaaagcacaaattgttaaagaagtggaaacagttctgaactcaatttggacaagtcatggtgatggaaaatggacagagaaaatcatggtaaatgatcgcattgccgatagcattttccaacaaattcaaacccgaccagatgaatattcaattctggctacaatgaacctcaacggtgattatttatccgatgctgctgctgctattgttggtggtttaggtatgggaccaggggcaaacattggcgattcctgcgccgtttttgaagctacccatggaacagcaccaaaacacgccggtttagataaaattaaccccggatctgtgattctttccgctgtcatgatgctagaatatatgggttggcaagaagccgcagatttgattaaaaaaggtctaggtgcagccatagctaatggtgaagttacttatgacttagcgcggttaattgaaccacctgtagaacctttgaaatgttctgaatttgctgaggcaattatcaaacatttcggttaattgcggttaatttctattaattaaaggggcgggttttacccgtcctgtttgtcagaatcaggatgtccaggatttgaggatgaacaggattggattaagaagatgtataaaaattatatttgagtcataatatcaataatatctgtgttgaaaaggagaatagataattatggtaatgacaccaattaaagaagatgtattaaaaaagtattccttagaagattggatgcaaagttccccagagggtacagaatgggtaaatggggaattattggagaaagaagaagtgacattgaaacacagtcgggtacaagcaaaactagctacttactgcagaaattacaaagattctagtgaacaaggtggagaagtgtatacagaagcaccctgtcgtacaaatcaacaaggccgtcgtcctgatgttgcttatcttacccccgaattgatacaacaatttggtgaacctgctgttttacctcaaagttttcccctcgtagcagaaattatttcttctacagatttagcagaagataggattgctaaatctcaagaatatttgcaatcaggaagtgaggaagtttggttagtctttcctgaaaatcggtggattattgtaattactcaaaatcaacgtcttgtgtttattgctggtgaaatagtcaggactcaaattgtattaccagggtttaatgttgcggttaatgaattattgggttaagacagaaaattaagatttaaaagtagtataaaaacgataaaagtagtatttaaatagggtgattttttatggttatcagtcctttaaaactcaacctagacgatgttaacttaactgatgaacagttttatcaactatgtcaaaaaaacagtgatttgcaatttgaacgcactgcaactggagaattaattattatgccaccagtgggaggagaaagcggaaatagagaagcagaatttattatagatttaggtatttggaatcggcaaacaaaactcggttatacttttagttcttccactatatttaaattaccaaatgggggcgatcgctctcctgatgcagcttggattaaaaaagaacgttgggaagcattaacacctgaacaaaaacgaaaatttccccctattgcaccagattttgtcattgaattaaggttagtaacagatagtttagaaactctgcgtcagaaaatgcaagaatatatgaatgcaggggtaaaaatgggatggttaataaatccgcaacaacaacaagtagaaatttatcgtttaggaaaagatgtggaattgagaaatttacccacagaattattaggggaagacatattaccaggatttagtttgagtttagattgttattaaaatctcaagtaaagtgttataattttcatatctcaactagtggatacaatcatgattgagcaacttctaatcaatagtgaaattgataattgtgatgtaccagatgccaacttgctagtcactgaagatgatacacctgtggataatctcgcatctgaaaaacaacaacgccttttagtcggttctctttacagttctttacaaaatcagatttttttagcagcagctaatgtaggtgtttatcatacttatggtgaacctgccatagttcctgatatatttgtcagttttgatgtgaaaactcctgaaaactggtgggaaaaacaaaatcgttgttatctagtttggaaattcggtaaatcaccagaagttgtcattgaaattatatcaaatcgagaaggtgaagaactagataaaaaactgcaaatttatgaaaaaatgcgagtttcttactatattgtatatgacccacatcaaaatttaggagcagaagttttaagaatttattctattcaaggtagacgttacgtagaaactacagataaatggttagaagatattggtttgggtgtaactttatggaatggagaatttgaaggtagaaatgattcttggttgcgttggtgtgatcaaaatggtaatgttttactaactggtgatgaacgtgcgaaaatagcagaagaacgcgctgaaaatgcagaagttcgcgctcaattactagcagaaaaattaaaggctttgggtgtagaccctgatagtatttaagtgtgattttaggattctaaatttaaaggatgtgatttttcaacccaaagccgaaataactcgacaataattctccatcttccctgattttctgcaatcacatcatgacgggttaaagtatctaaagctgtctgtaaattactttcatctattcccgtcaactcaaccaaatcatttaaacttaacccttggggatattttgctagatgaattaaaattacttgttcagtattaccattttccccagcttgaccccaaacaccattaaaataattactacctctggtaaaaaattccggtttattcacaactgcttctacatcttccactgtaaaaactgcatcgcggtttcttacttgttcaaacacaaaatcattatataatcgtactaaatgataacctattaactgcactaaataaggttgtccgtgggttaaatcataaattttatctagtgcttctggtgtgtagtctaataaaaaatcttcaatagctgggttagctagaattgtttcaggaactcacctcctactgtggagaggtacaattcatcattccctaatctatttttgcagttatgatctaaaacagtgtgcaaatctaccaactgcaaaaagacttatgagtttaaatcgtcgtcatttcttggttttactgggtgctagtgcgggtgcttttcttctcgatagtggtgcttctgctgaaacttctccccccagaatatcaactattgaactacctcctttaccctacgcttacgacgcactagaaccacatattgatacaagaacaatgcagtttcatcacgataaacaccatgcagcttatgtgaataacttaaataaagctttggacaaatacccagaactgaaaaacaaaactgttgaacaactactgcaaaatctggataatgtccccgcagatattagaactacagtcagaaataatggtggtggtcatgttaaccattcaatgttttggaaaatcatgaaacctaatggtggtggtgaagcaactggagaaatagcaactgcaattaataaaacttttggtagtttcgcagatttcaaaaaacagtttaatgaagctggtggtggtcgttttggtagcggttgggtttggttagttcgcaacaaaaatggtaagttagaaattacaactactgcaaatcaagatagtcctttaatggaaggtaaatatcccatttttggtaatgatgtttgggaacacgcttattatttaaaatatcaaaatcgtcgtcctgaatatttagatgcttggtggaatgtggttaactgggatgaaattaatcaacggtttgcagatgcaagtaaaatagagtaattcgtaattcataataattcataattcataattggtaattgatttataaacacaaccaattaccaatcaccaatcaccaattacccattacctaatttacaaaggtttttgtgttggtatacccacaggacgaggaaaactcacaggtgtatgtttcaccttccttaaatataaacaatgacgaatactattacttaaaggagtggtaaattcatcaattaattcaacttctccccctaaatgatgtaccgcattttctaaactttgattttcttcctttgtccaacttccccgataaataactgctaaaccaccttttttcactaaaggtaaactatattcagcacaagcagaaacactacccactgcacgaatcacagctaaatcataattttctctatgtttaccttcctgtccaatttcttccaccctccccacaattgttttcgcattgataagaggaagatccgttaaaacagagtcaataaaattaatttttttgcgagtagaatctaacaaagtcacctgagaattagggaaaataatcgcaattggtaaaccaggaaaacccgcaccagtaccaatatcaattactgatgcacctggatgaagagaatcaataaaatcctgttttggtgcaactccccttaacgaatcccaaagatgtttttcccaaaattctgacgcttcagtaatgcgcgttaaattcacataacgattagcttcaataaccaattcatagagtttttgtaattgattttgttggtcatttgttggttgccaatttaacgtttcttgccaaacttccaccatttcaggtaaactaaatacggactctaaactcatattcactcaattaattatctcaaaatctttgctttcttctctgcgactctgcgcctctgcgtgaaactttttaagttttaattcaaatgtttcacttcccaactgtttctgcaattttcttttctaaagttttaggatcaacagattccaaaacaccatgatttaaagtccaacaactgtccgctattggtaacatatcccctgcatcatgtgtaacaactaataaagtccaatcttttttcaattttgctaataaatttattaattgacgacgaatagaccaatctaaaccggctgtaggttcatctaataataataaatttggttggcgaattaattgaactgctaaagctaaacgtctttgttgtccaccgcttaaagcatggggtgaggtagaaaatgataaatgatctaatcctacttctctgagtgcttgatgaactcgttctgtacctaattcgggatgtcctaaacgcaattcttccaaaattgtaccaccgcaaaagtgcctttcgggaaattgaaagacaattcccgctaattgttgcagttgttctgagattagtggttgttctctccaaaatgcagcaccggaggtaggttcaactaatcctgataaaatttctaataaggtgcttttaccagaaccactaggacctatgactaaacctagctgctgtggtggtaattccaggttaatagatttaagaattgctgtgggacaagctgtggggtgataagttagatttctgagataaagcatttgttaaaattaccagatagtcagcgaacaactgatgaacaactgatggactaaaagcaaagttacgtaaccaaaacctgatccagcagcaacaaacattcaactttttctattttgacagaattacacaaaaaaaatcgctacaatcagcgaggaaacctgatgaattttcaatagtctagataaattggatttttttggatttttttgctaagacagaagcgttttttggttaagcattttttgattttaagtaatacataagacaagttcaaccgtaataattctgtgttttattatgtctaaacattttttaggatttcctctggtttctaaagttgcttttgctactacgttaatcttaaatttgtgggtaaatccctcattagcgggtgatccatttcgcagtagtgaacctcatcaaattggcgatcgcacggaagcagcgtttaaagcgattttccaacaaggaaattatcctgttgcagaggatcacctgaaaaaagcgatcgctgatgaacccgatgaacctttagcttatgctttaaaagcatctttagcttatactaatcaagatttagtaggattggaaaagtacagcaaaaagactttagaagctggacaaaagttgattggtactaaccaattacgtggtaatttatacactggagtaggcaattttttagaaggtgctgtcattcttacccgtgaaggtacggttaatggtgcatcaaaggcatttactaggttaacaagagtgtatgaatatttagatagagcagaagccattaatgccaatgatccagagttaaatttaattaaaggctatatgaacttaatgttagccgttaatttgccttttattagtcctgatcaagcgattgaacaactggaacaaaatgcagcacctggatatttagtagataggggtattgctttagcgtatcgggatttgaagaaatatccccaagcattaaaatatgtggatcgtgctttgaaaaacacctctgacaacccagaaatttattatctcaaagcgcaaatactgtatttacaaggtaacaaggaaaaaagtcagaatgtggttaaagaagcgatcgcatattttgagaaagcgttaaccaaaaaatcccaacttcctgctagtctagtcaaacaaattgaatccgaacgcaaccaggctaaaaaccgactcaataatatatgatgatttagtcattaggaaagaagggaacagggaacagggaacagataattatttattctctttcctaatcaccaatcaccaatcaccaatcagcaatcaccaatcaccaaaaatgtacattcaatttcgtgaatttaatccctttgacgtttggttctggatcaaatttagcaccattccttcccaacaagaaaaacaatatgtagaagaagtatttaactcctggttttatttaggtaaactaggaggtttcaacgctgaaaacttgcaagttcaagaaactggtttggatttaagctacatggattatgataaccaaggttatgatcaaagtatgttagctttaatgcacaacatgggtgaatttgaatatgaaggaaaatggggaagatgctggtttgatttaggaacaagtgatgcgatcgccttagatattctcatcaacgcactatctcaattaagtgaagaatacgtcaccatagaagcattatatttaggtggtgaaaatgaagattggccagtagaagatagtgaaactcgcgcttattccctttacgataattaatcattcaaataacaacaattactcacaataatgaacaaaccaggtgaaattagagtcatcgttttagcattaattaaagatggtgacagaatctttgtttctgaaggatatgatccgacaaagcaatcaacattttatcgtgctttaggtggaggagtagaatttggtgaaaccagtcgcatagcattggaacgagaatttcaagaagaaatacaagctgatttaaccaacattcgttatttaagttgtatcgaaaacctgtttatattcgatggtaaacagggacatgaaatcatccaactttatcaatgcgactttgcagatccgaaattttaccaaattgaaagtttaaccttttccgaaacaccagaaaagaaacatcgtgctttatgggtagaaattgagaagtttaaatcaggagaactaagattagtcccagaaatcttttttgattatttgtaagcatttagctatcagtaatcagtaatcagctttcagcaaaatcaaaacctttccagatacctgaattattaaatgagtcgggtatctatttcatccagaaatgttgaatgtcgttacaaaagtttacatattcagttatagtattcctaataagcgggagcatcactcgctgaaccgattttgactaatccagttcccgattcaaattctagtttccaattattcttaattcgcactacaaaatatttgtctttttgcactaattcctgcataaacctgcataaaatttagtcccgcaaaacctctatccattaccccaacagcatcttgcggtaaattagacatcattgatgaaccaaatttataatcatgattatgtccaaaatttatcaaattatcttctggacttcctgttgacagattgagggaactaaaaagttttacttgatgatgtcctagaacccatagtaacttacttgttaaggtaattactgtagaatcaattggacaaatggcgtatttatcatgtaactttttgtaagcttttttctggactaatttattcaattgatgataaatcttttggaagatttcttgatttctgtgtgtgttagccttggaaaaagtcgaaatccttacatcaatacctgtattgtttaatcttttaaataagtccctcatacttgttaaactattatccaaggcataacccaaccaacactcaacgtaaagacgggtgttcaaaaccggataatcattttttggcaaggatttgaggatgtctttgacaatcttgggaaatgaatttataatcatgatcaaatcaatattttgatatagcttgctcaaattttaatatattttgggctatttttatcacagatttcttaacattcaacacttctgctaatcgcccaagttagacttttcaaacatcctcttacaatgttcagcaacaatggataaagaaaaattacttttgggttaaaaaatgtgataattaaataatacgttgcaatttttaacaaaaataaatcactttcatcctgttcatccttaaatcctggaaatcctgattcagacaattttcttaaaccataaaaaaacacccatccagttattttcctgaatgggtatcaatcacaaaaaaatctacaattcaattatcaaacattcccataaacaggaatagcagcaccacgtacatccttagcagcttccgaagctaaaaaacaaattacctcagcaatagactccggttttacccacttatcggcgttttctgcacccatcgcttcccggttggtgggggtatcaatgacactgggaaggacagtatttgcagtgatgttagttccttttgtttcatcggctatagccttagttaatgctatcacaccagctttagccgcagaataggccgctaattgtcccgcaggttctacactagcacgagaacccacagttacaatgcgcccatagccatgttttaacatactttccaggctatatttacaagtcaaaaaagtagtattgagatttaattcaaattcatgcttccaactatcaaagctgtattcatgagtttttcccattgaaaaaccacccaccaaatgaattaaaacatctactcgcatcatgctattaatgacttgttttacagatgcttcatcttgtaaattagccggaataaatttaattctggcaatatccgctggtgataaaattcctttgagtctttccacatctttaagactacgataaggaatagtaacatcagcaccttgggctaaaactgcgggtgtgacacctaaacctagtccaccagtaccacctgtaagtaaaacttgttttcctttcatgaaagatgcacttttttaaccttcatgaattaagataacgcaattgctgatttataccaatccaaaatctaaaatccaaaatccaaaatctaaaatccaaaatctcaaatctcaaattccatgactatggatatattttactacccgcacccacgacaccaattttatgacgataggaaagttcagcaccaaaccacccggtaatgctggttaaagttcccacaattaatgatagtaataaaccccaaggtagtaaatttgattccgcatcaccccaacgaataataaaattcaaagttgtgaaaatcaggatagaaatattcagaattaaatgcgcccaacctgcggcacgtttgcggactctttctatttgtaaaaagtcactcatgccaataactgaagcgataataccagtaactaaacctaatccaattaaccacactgaagccctagcccaaaaataatctcgcgttaaccaataaccaaaatcactacctaaagctgcggctaaaaaagctatgggaaaaattatactcaaaggatgtaaaggatgtccagctatggatactgtgctgggtacaccactatctaaatattctcgatcatcgctttcaataattggtggtaaattgggaaatggtgtagaatttggttctgtggttgccatcttttcatctcctattattcagcagtaggaattttctcaacattttctcccaaacctggattttctgacataatcacgtactcacttaatttattataatttattataatttactaattaactatctttgagcaaatctagaaaattgagcataaaaatttatctatctagggatggaataaaaaatctataattatataacttacagtagaagcagacataattaacagatatttgtggtgtttatttctgtttcaatcacaatattcaaagggtttataatagcaattgattatgaaactctggctaaaacaaagagggcaaccacagggggtttgcccctacatctgactcctgactcctggtatatatcctgtttttctatccagagttaagaatgtaatcgttcaaaagaaagatggaaaatatctagtgattatgcgaacctgggattggtaataaatacgattacttgcgattactttagctaggagaactcaacatggtagccactttagatgataccaaacgaaatgcgattgcagtaaaattggcagatatgaaattactgcaacagttaattattgataatgaagaaagatttttaagagaatgtagtgatggtgaaattgctaataatctccgcaaaatgctagatgatgaccgcagaaatcaaggtattcttgatactgtagtagttcaatatggcattcaaaaaaatgcagaatctacagtacaagaaatggtggcaaaagttcgcaaattaatgcaaggtaatgaattaagtttctttgaaaaagtatttcaacatgagttattgaagcatcaacaagtaatgaatggtttgacaattcataaagctgcccagaaagttggtgctgatgtgatggcagcaattggacctttaaatactatcaattttgaaaaccgcgcacatcaagaacaactgaaaggaagtttagaaattttaggagtgcgggaactaacaggacaagatgcagatcaaggaatttgggcaagagttcaagatgcgatcgccgctattagtggtgctgtgggtagtgctgtcacccaaacttctgacaagcaagatatgaatatccaagatgttctgcgtatggatcacaataaggtaaatatcttgtttacagaattaatgcaaagcaatgatccacaaaaaattcaagaatattttggacaaatttataaagatttgagcgcccatgcaggtgcggaagaagaagtagtttatccgcgagttcgtcctttttatggtgaagctaacacccaagaattatatgatgaacaagctcgctggggtccttggtttgaagaattaagaggtattagccctgctacaccacaatttaaagacagactcagacaaatttgggatcaaattggcgatcatattcgtcaagaagaaagcacaatgtttgccgctattcgtaataacatgagtagcagagaaagtgaagatttagctagacaattcaaagctgctaaaactagaattcaagaaagaatgggtagagaaactagaacagaagccgctgtctagagttgcttactgcttcatattgtaagggtttagcaatgctaaacccctactcctcaattctgtactaattcatctcattcctaacattcgattcacttgtgcagactgtaaaggtttgcgttctatattctggaaaaactcaacttcctttaaaaaagaataggctgttttaaaattacttaaattcagtaaaacaatatcttcatatactgtatcttcgggaacttttatatctacaaataattcttgtaggttattttgcgctattgccagattcaaaaattttaaaaatgattgccgttttttagaacgcacattcaacaagtaccagttattactaataggttgagacgatgaagattctaaagattctattggtggcatagtgatgaagttgatgtgaaaattgaaagctctgagctatcttagaacttgagttaatgaatagtagccaaaaccagattttttaacttactactactcccttcttgctaaaatctctaacagattactccttttcttcctttgtgtactttgcgtactttgcggttaattcatcaaaaaatttgcgaactacaccggaacaagagtaatcaaaatagtatagcaggaattttctctaacttcacctgtagcaatagatttattcatgagatttattcatgagatttattcatgacaaatattcataaacaactactccccagatggggagatatgcagtaaattaacatctaaaaaataatcgctatcgctgtaatttatttagactgccaatatttataagctgcataagctaatgtcaccactccagtaataattgcagattcatcaacttcaaattgaggatgatgtaaaggatgattgatgattctatctttatagcctacacctaaacgaaacatcgaaccaggggcgtgatccaaataaacagaaaaatcttccgcacccagggaaggttcgggtaaaacttgcacgcgatcgctactccaagcttcttctgctgatgactgcaataattgtgtcaaagcataatcattttgtacactgggtacaccttgacgataattaacttgatattttgcatcataggaattacaaacattagcaactatattttcgatccaatttggtaactgagcgcgagtttcaggatggagcgatcgcaccgtacccaataactgtactttatccgcaatcacattcgccgctctaccgccattaatcttaccaatactcaacaccacaggacgcaaaggattttgagtacggctaatagcttgttgcaatgcggtaattacttgtgaagcaatccaaatcgcgtccacagcttcatgaggacgcgccccatgtccagattcacccaaaatcataatttctaaatcgtctgctgctgctgttaatgccccataacgaatacccacagaaccagcaggaatagaaggaaaaacatgaacacctaaaatagcagcaacattattcattgctccatcttctaccatccaatttgcaccttgggcaatttcttccgctggttgaaataaaaacctgattttaccacccaactcatcagctatttgggacattaccattgctgtacctaaacctaccgtagtatgtacatcatgtccacaagcgtgcattactccttctgttcgtgaagcatattccaaaccgctacgctcttggataggcaaagcatccatatcagtgcgaattgccaacaccctatcatcatggttagtgctgtgtaattcgccgatcacaccagttttacccaccccttctaccacgtgcaacccactagaagacaaaacaccagccacaaacgcagcagtttgatattcttggccgctgagttctgggtgtgagtggatatgacgacgaatttctactaagcgaggtgcaaggttatttgctatctctttgatccgggttagcatttaattgaatgtaatttacaatctttgttcttatcatagataagtgtcaactaggaaaatgcttccatctgacaagatatttaagaagctgtgcagagttaagggtttgacgctccccgccttaaaaggacgacccataactattacttatgcagctaggggaagagcagaaagtgatgaggatgataaagtttaatgtacttacttgatactgatacacttagcaggtgtagattcagaaccaaaaaagaccctgtacagtcttgttatattcccaagactgccgtaaaagatgcgggaatttattacagagttaaaccggtggcgataatagcaatgggggaaacaggtaatttaatcatgatctgttttttatagaatatatatagcatttaccaagttagtgaggtacagagttttttatcttagggaattgggaattgggaattgggaattgggaattgggaattggtaacagtaaataaattagggtgtacctcacctcatgagactgggaaacgctatatattgttgcttgactattattgtgttcctattcaatcaataacacgatagctagatactgtccatctaattttataattataataattggcagtgcttatacttctttaacttattcagattgtagggtaatggatagaggttttgcgggactaaattttatgcaggtttatgcaggaattagtgcaaaaagacaaatattttgtagtgcgaattaagaataattggaaactagaatttgaatcgggaactggattagtcaaaatcggttcagcgagtgatgctcccgcttatagggtagttaatttttgtgatttagaaactaaaactgaatttcgcttagtcacgaatttaccgtcagatggagaggcagcagttacagatgatgaaatcagggatatttaccgtttacgttggggagttgaattattatggaaattcttaaagatgcacctaaaactagatagattaattaccaaaaatgttaatggtattggcatacaaatttatgccagtctcatcgcttatctaattttacaacttgtatctgttcctcaagaatggggtaataaaatgttagataaattccgctatcttcaagcttgtatgtgtcaacaaattagttatgttcattggatggaagatatcatgagatgttgacattttcacccttaataggactactataactgaatatgtaaacttttgtaacgacattcaacatttctggaaataagtaatataatactctatcattattattaggcatcatagcaaatgtaatgattttgcttgcattacctttatctctcaataatttcataaaatcatttctaaattctgcttgttctccaaaagtatctagtgtttgaaaatgatcaaggttaaagtaaccatctgtttctaatacttttttaaaagtttctcttgctttccattttgggtcataaaaaaatcttttgatgaaatcaaccataaatgtataaataatttctgatttttttagactatttatttttctaaaactttccattgagacatcagaccaaccatagggatcaagaataaataaagaatgacctttcctattttcagattgaaaaacacaatagtcaaccttattttcaaattcatcattaataaattcacattctattatcaaatctcccaattctgttttataaatatgctgattttcatcggataaatgttctaattctgcttgagacatagcaatattttttaaacattttaaatggtcttttttcttatctataaacataaacttaacatttaaaggataagttctttttgatttaaaataaccttcttgaacagctttaattaagcgaatgggcgaaccaaaccaaatattatgtgagtccctatcattgtaaatacccccaccacaaaaaccgtcaataatagtaaaattagtcactccatattgtccactactataaagtgtataaactagatctgttacatattgctctgtaagtaaatgtttagtttttgtatgctgttctacaaaaggaatttctttgccatcagcagaccacttggtatcagaattactcacaattgatcatccttttttatagtttgctaataattatacaaatttaactagctggtgtgtataaaagtaaaattattgatattttactatttatactctgtagttttccgcgcctctgcgtctctgcgtgaaaaaaacctcttacccaaatcaaaccacccacatcacaacccctaacggtatcgtaataaaagcgatattcaagaaaaataaacaaaataaatgaccaccatagacaccaacaaacacaaaaaagccaaagccctcaaacccggaagcgtgcgccccgcaaaagaactttgtagcgaatgcggactatgcgacacctactatatccactacgtcaaagaagcgtgcgccttcatcacccaaagaatagacgaactagaaaccagcacccataaccgcccccgcaacctagaagacgaaaacgaactctattttggcgtacatcaagaaatgatagccgcccgcaaaatacaacccatcgaaggcgcacaatggacaggaatagtcagcaccatcgccatagaaatgctcaaccggggcttagttgaaggagtcgtctgtgtgcaaaactccaaagaagaccgctttcaacccatgcccatcatcgcccgcacccccgaagaaatactagcagccaaagtaaataaacccaccctatcccccaacctctccgtattagaacaaatcgaaaaatcaggaatgaaacgcctattagtcatcggagtaggatgtcaaatacaagcattacgcgccgttgagaaaaaactcggactagaaaaactctatgtcctgggtacaccatgcgtagataacgttacccgcgccggactgcaaaaattcttagaaaccaccagcagatcccccgaaaccgttgttagttacgaatttatgcaagacttccgggtacattttaaacacgaagacggatcagaagaaaaagtacccttctttggactcaaaaccaacgtactcaaagacatcttcgccccatcatgtatgagttgctttgattacgtcaactccttagcagatatagtagtaggatacatgggcgcacccttcaactggcaatggatagtagtgagaaacgataccggcaaagaaatgctagaactcgtcaaagaccaactccacacccaaccggtgatgtccaaaggagacagaaaagccgccgtacaacaaggaatagaagcctacgataaagccgtcaccttacccatgtgggtagccaaattaatgggagtcgtcatagacaaaatcggaccacaaggattggaatatgggaaattttcaatggattcccactttacaagaaactacttatatgttaagcggaatcatccagaaaaattagaagatcatgtaccagagtttgccaagcggatcgtagcgcagtataaattaccggaataaaagctcacgcagaggcgcaaaggcgcaaaggtaagaagtctttgtgtctttggtgtgattttacaagttattgacaacacgggagattccgtccttgatcagggatgcaccgaagttgatcagtaagccgagacgtttatcagctacaacaaggtaagtgaagagttgttttttgtgtacaggatgtatattttccacagactttagttcaacaatcaccttattttccacaatcaaatctgctcgaaaaccatcactcagatgtacaccatcataaactaaaggtatgactttttccgcctctacccttaatccccgcttttccaactcatatttaagaaccacttgatatgcagattccaacaacccaggaccaaacctggtatgaatcttgtaagcagcatcaacaacttccttagcgatctcattctcattcatcttcacttcttacctttgcgactttgcgcctttgcgtgagaattatttcatacaaaagtattaaactcttttcttcctttgcgactttgcgcctttgcgtgagcttttttaaacttctcccacagcttcaatagctgcctgtaacgcaatagatacatgagtccaatgtgtaccaccttggcaataaacaatataaggctctctcaaaggtccatcggctgataattccaaggtgctaccttctataaacgtacccccagccatcacaacttggctttcataacctggcatcgcatcaggtacgggatctaaataagaaccaataggcgaattttgttgaatagctttacaaaaagcaatcagttttttggctgaaccgagtttgatggcttggatcacatcccctcttggtgctaggggtgcggggtttacaggataacccaacttatcaaatacgtaccctgttaggtacgttcctttcattgcttccccaactatctggggtgctaaaaataatccttggtataacaagcggttttgatcaaaggttgctccccctgcactacctattcctggggcggtgagtctacaggctgctgcttctactaggtgagcttttccagctatgtatccccctgctgtaaccagtgtaccacctggatttttgattaatgacccggctatgaggtctgcacctacgtgggttggttctttggtgtctataaattctccgtagcagttgtctacaaagcaaactgtgttggggttttgttgtttgactatgtgaactattttttctatttcagctatggaaagacttggccgccatgagtatccacaggatctttgaatcaggactaaacgagtattttctttaactgctgtgcttaattcttgccaatctatttttcctttgggcgttagttctaattggcgatattttatgccaaaatcaataagggaaccttggttttgccctcgcaagccaattacctcttccaaagtatcgtagggagaacccactactgctaacatttcatccccaggacgaagcacaccatacagcgcacaggcgatcgcatgagttcccgaaacaatctgcactcgcaccaccgcagcttctgctcccatcacttgggcaaaaacctgatctaaggtatctcttcctaaatcatcatgtccataaccgctgacacctgcaaaatggtgcgcccctacacaatgatctctaaaggcattcagaactctttgtaaattatgcttgacctgagcgtcaataccataaaaaatttctaatagtgcctgttctgcttcccgaagctgctctaagctgttcattgtttcctcattaaaaaaaataatctaaatatgcggattcctaaatcacgcagattaggctagacaattcctataaaggttactgcatgacaattgctacttccactaaacttaaaattaactgggttaataccctgttcttcattggcctgcacatcggcgctttatttgctttaattcccagtaactttagctggagagcagttggtgttgcattattcctctactgggttagcggtggtttaggtgtgactctgggttttcaccgtcttgttacccatcgcagttttcaaactcctaaatggttggagtattttttggtcttctgtggaactctcacctgtgaaggtggaccaattgaatgggtgggtatacaccgaatccatcatttgcattccgataccgctaatgatccccatgactcaaataagggtttctggtggagtcatcttggttggatgatttatcactcacccgctcatgctgaagttcctcgcttcacaaaagacattagtgatgacccagtttatcagtttttacagaaatatttcattttcttacaaattgccctgggattggtactgtttttcttaggtggttggtcttttgtggtttggggtatttttgtccgcattgtttgggtttatcactgcacttggctggtaaatagtgcgactcacaaattcggttatcgcacatatccagattccggtgacaattctaccaattgctggtgggtagctttactggtatttggtgaaggttggcacaataatcaccatgcttttcaatattcagcccgtcacggtttggaatggtgggaaattgatatgacttggatgactattcaattactccaactgcttggtttagcaacaaatattaaactggcagataaaagagcataacgcataattgatgtttaaagtcaatagttttatagtcgttttttgggtatgaaactattggctttttgcgtgtaattacggagattcaaaatagaaattatgaatttttgaattttaattttgaattttgaattttcatctatcctaaattactcttaggttgctataatctcagaaattcaatgttacaaaacttagctgtaaactcattttgattatgactttgcagcccagtttgctgtttttcaggtattcatgactacatcactaatcaaagaccaggaaactttcgtcgccacaaaccttagtaaagacgaaatcaaactaaaacatattatcaaaagtctacccaaggaatgttttcagaaaaatagccgcaaagcgtggactactgtaattatcagtttatctatggcagcgttaggctattattttttggctatttctccctggtttcttttacccatagcatggatttttacaggaacggctttaacaggattttttgtcataggtcatgactgcggacatcgttcttttgcaaaccgtcgttgggtaaatgacctggttgggcattttttcatgatgtttttaatttacccttttcacagttggagaattaaacataatcatcaccataaacatacaaataaattagatgaggataacgcatggcatcccatcagaccagaggtttttgaaggttgggataaaaccagacagtctgcttttcaattattcatgcggaagcgtctgtggtgggtaggttctatcggacattgggcagttgtgcattttgatgctcggaagttccaacccaaagatcgggctaatgtgaaattatctgtaggtgtggtagtagcttttgcagctattgtttttcccactttgattattacaactggtgtttggggctttattaaattctggtttattccttggatggtttaccatttctggatgagtaccttcaccattgttcaccatacaaccgcagatgttccttttgaaaccgctaacaaatggaacgaagcgatggcgcagttatttggaactattcactgtgattatcctcgttgggtagaaatcctttgtcacgatattaacgttcacgttccccatcatatttctactgctattccctcctacaatttgcggttagcttacgatagcattaagaaaaattggggtgaatatctccatgaagaatgtaatttctcttgggatttaatgaaacaaattactaacgaatgtcaactttataaaactgacattggttatacaacttttgatgaatattacgcccagaaagctaaatctctagcttaaattcaataattaacctcatgatttaatcaagcaaaatttattaaatcatttttctcaactttgcctgttttggtgggcattgcccaccctaccttaattacttttcgttttagagattcacaaatccagtgcaattagaatcagttcaattcaaccaaaatcctgctgttaaatcttctcaggatgaagataaactgcctttcactcttgcagatttaaaagctgctattcctgctgaatgttttgagccgagtgtcgctaaatcactctattattttttccgtgatgttgctattgttgctggtttatatgcactggcaaattatctagattcttggtatttctggccagttttctgggtgatgcaaggaactatgttttgggctttgtttgtagtaggtcatgactgtggacaccaatctttttctaagcacaaatggctaaatgatttggttggtcatctatcccatacacctattcttgtaccttatcacggttggagaattagccacagaacccatcacaaaaatactggcagtgtggaaaatgatgaaagctggtatcctttgagtgaatctcaatataagcaattaccttttctacaaaagctaattcgctattatctgtttttacctctagcttatcccatctatttgtttcaacgtactcctggtaaaagtggttcacattttgatcccagaagttccttgtttaaaccttcagaaaagtgggatattatcactagcactaccctttggattgggatggtaggtttgttaggtttccttacctatcaatggggttggatgtggttaattaaatactacgctggtccttacgttgtgtttgtaatttggttggatttggtgacatatttacaccatactgaacaagatttaccttggtatcgtggtgataattggacttttttaaagggtgcaatttctaccattgatagagattatggcatttttaaccatatccatcatgatatcggtactcatgttgcccatcatatctttttgaatatgcctcattataatttgttgaaagctactgaggctattaaacctgtgatgggtgaatattactataagtctgatgttcctatttggaaggctttgttacattctgctaaggtttgtcgttttattcctgatgagggtggtaaggtttatcacacttattatcaagagaatgcgaagtaatttttaggtttttgatgtttattaagtccgccgagtgcgggcttttttgtctgaatcaggatttataggatttaaggattttcaggattttggttattgttttaattttcgatatttgttatagatagtatttgatatttgtgataatgaaaagaataaaaggatataaagttggacaatgaacaacatctagttttcttattattaaatattaaatagataactgtatcactttaaaagtttcaatgtacaagacttacctgaactttaagcaatagcaaaaaacgaatcctgtaaatccttaaatcctggatatcctgattctgacaagatttaattaggggttgctgagaaagtctttccgtgagggcataggagtcaggagtcaggagtcaggaggagatttgaaaatttctttgccatctcttgaaataccaaaaaatgcacactttttccggtatacccttcaaaacccttgcactaatttctgtgtttatcagcctctaacctttgatatatcaaggttttaggtttattcagcaaaccctaattactactattctggtaaaaactcattatctaatatttgtaaaattgtataattacaactttgtggaaagctttcaaaaggtaaattagtttccttaacagctaagttaattccatcttcataacttaattgcaaagcttcttctaaataagattttaaactgggactatctgttaatattcttttgaattgagtgcgctgttctcgaatggtggctaaccaactattactgcgtttttctggttggtattgccattttagtaaatgtcctaataacaaggctaaacggttaactaattctcttctttcttgtcttcccaaggcttctatttcctcaattaagtttaacttatcgagtatttcccatttttcttctcttagtagttgaacttgttcttttgtccatccataaaaatccgagtcgtaaagtgtattcatggattttatctataatactactgttgatgataaaaaattaaccgcaaattcatctgttaaaaccttccattcccctgaataatatgcttcactgttgtcaatgtttccaaactaataaaccctctacggtgtcctttttgattggacattcccaaaaatacggaatctccccgtgaagggttacgagaaaaccgaggggaagcattgatataagtagaggcgctattgactcctaatgcaaattggcgactttcttggtaagagtctgtaactattgcatccgcatgaccgctactatattgattaatccaagcgatcgcactttctaagctatctactaatttaaacgctacggttttatttaaatacggtgttccccattctccgtcttttgctaattgtaattggggaaaggcttctactaattctgcatctgctttgagttcaaagcctttttcttttaagctattccacagcacaggcaaggaagatggtaacgcttgacgatgaattaaaactttttcaatggcattgactggatctggttcactttcatggctatctaaaatcatccagcgtaccatctctaaactaccattgagggaccagtacaggtaacaattgcccattgctgactttaacacaggacaggtggcttgtctgactacttgctgaattaagctagaacgtccgtagggtatgactaaacttaaatactggtcttgagtgactaaatcccgtaaagaagtaccatgttcagtggtgactaattctatacaacctgggggtaaaccaacttcactaatggctgtttgcagaacttcggcgatcgccgcattagaatgactagcttctgtactgcctttgagaatcacagtattaccagttttcaaacaaaaaccagcagcgatcgcccctagttctggaaaagcctcataaataaacccaattactcccaaaggcatcaactgggtataactttgagaatcttcctgttgataatcagcatttctcacccgtcgcaagggatcggataattcccccaaacgttggagaatctcaacagtattctctaaccgagagggagttaatttcagccaatccaaaattaattctggtactgccatttcccgactagcttctagatccagggtattggcttcgagaatatcgtcaaaggagcgttttagcgcccgtgccattgccaacacagcgcgacttcggtctgcccctttggtagttcctaacttcagggaagcttgataagcgcgtttggcgctgttcattggttcgggataatcatcaaaagcttcaacagtcatccgattttggattttggattttggattttagattttggattagttcctcggataaatccggggcgctgatgcagttaacgtctgtaagtaagccagaccataattgctggcagaatagctaatagcaccgccactattgcccaagcaataatactcgaaccatttgccaagcgtaatgctaacggtagccatataatgactaacacgaaaataatgcccaacgctatcggcagataactttctgccaattttggttgaatcagattccagcttttccctgtccagcgccaagcccgcttatagggataagtggtagaaagttgctccagtacatatccattatcttcaacgacaaatatttgctgacagcgatcgcagccaaatgcttctgtcagggtaatgggaattaaccgcccccgacgacgacaaggacaagtataatccgtatttaagtctattttttccggtttttgagatggcacaagcagtctaaataacttgagcgagtttttgttaacggttttgggtgggaatgccaaaaattactttttggtcaacatccccacacttagcattatttctagtatatttctgcaagcattgtagccgctattttcaattagacaaaataggaagcaggagtcagtaggggcaaaccccccgtggttgccccagaaggcaggagtttatgcaattaaaaatcttaggtctgaaaatctaatcatgatttcccagacctaatgattttgttggttgattatttgatattatttttttcagagcgggtaacgcgattcgaacgcgcgacatcaaccttggcaaggttgcgctctaccactgagctatacccgcgacctcaacataatcttagtatttcagatttatctaggtttgtcaacccctattggaaaattttttttctcagaagtcaggagtcgtaggggcgaagcattcggacaaaaatattggggaaaaatcgagaattgatcacccgaatgcttcgcccgtacaggaggcaggagtcaagagtcaggaggtaaatatttctccccatctccccaaactctcttttaaactacttctgactgtaccaatttttggactgatgctggtaaagactgagcgttactggcataaggttctgctaggttggaacgtagttgacgcatcaaactggccatttctatggcattcatggcataatcccagccatgattacttttaatccctgctctttccaatgcttgctgcatggtatctgttgtcaaaatgccaaaaatcacgggtacaccagtttgaaagctggctgctgcaatacccttggctacttcagcagatacataatcaaaatggggtgtttgtcctttaattaccgcacccaagcaaattatggcatcataacgttgagagagtgccaactgacgagcgacggtaggaacttcaaaactgcctggaacccatacatagtctacttgattgccttgggggtcaggatctataccgtgacgttttaggcaatcttgacatccttctaaaagcttaacggtaacgaggtcattgaatcgaccgatcaccattgcaaactttaaaggttctgtttgagtaaagttgccctcaaaaactgccatgactgcctcttataactatacttcttagccaatacatttttctggatggaaataaaggagcaggaaagcaatatcagcacggaaaaagaacaaagaaatttttgcttccctttcctgtgagttcagcttttctgctcctctggtttttatgttatgtgtgaacgcttgcgtgcagccgttgtctacaccacaaaaaagtttaataaaccaactaaaagcactaaagcaatccaaacaccagaaccaacccacagcagttttttagattccacccagttttgaggggttgcgtaagcaacaggaacaccaataaccaggacgaaggacatcagaacgagagatactaaagcaaattggaatactatggtcatttttacttttcccaacacagcgaaatcgtaactttcaccaagactgtcacgatatgatagacagactaggctgatcagtgaaccatttaatttaggtcttctgaacaattaatattttaaagctgctttgtaacagttgatcagttattaggaaagaggtaatgggtaatgggtaatgggttattaacctccccctgctctcttttctgtccccagtccccagtcaccagtccccaatcacctatcatggatataattctttgtcacacaactgctgattttgacgctttaggggcggctgtggggttaacttgcctcaagccaggaagtaagattgtcttaactgggggatctcatccaccagtacgagattttttggctttgtatcgggatgaatattcactgattgaaagacgttctgtcaatcctgaaaaaatacgttctttgatggttgtagatactcaacagcgcgatcgcttaggaaaagctgctgcatggttagatttaccgcatattcaagaaattatagtttatgaccatcatttaacacaagatagcaatattcccaccacaaaattatatattgataaagtcggtgcaacgaccactttaatggtggaagaattacaaaaacggcatatttctattaatcctgctcaagcaactgtgatggctttgggtattcatgttgatacaggttctttaacttatgatcagtctacgcccagagatgctttggctttagcttggttgatgcagcaaggggcaagtttatctgtaattgcaacttaccgagatccaggtttatctccccaactacaaaaattattaactcaatctttggaaaatttagaatatatttgtttccggggatataccattggaggagttactctcaaaactgataattttgtacctggtttatcagctttagcatcagaactggtagaattaacagaaatagatgctttactgttagcccatgaatatcttttagaagatggagaagttagattaacagtaattggtagaagccaaattacccataccaatcttaatcttttatttcaacctttcgatggtggtggacattctcaagctgcatctttcaatattagaaccactgattcacaatcaattttacaacaactattagcagggttaaaatcacaaattccccatcctcccacagccagagatttaatgtcttctcctgtgcgaactattcgcccagaaaccactattgctgaagctcaaagaattttactgcgttacggacattctggtttatctgttgtcaatcatcaagataaattagtgggtattatctctcgacgtgatttagatattgctttacatcacggatttaatcatgcaccagttaaaggttacatgaccactaatttaaagaccattacgccagacgctaccctaccacaaattgagtatttaatggttacttatgacattggacgtttaccagttttagaaaatgaaaatctcgttggtattgtcactcgtactgatgttttaagggaactgcatcaagctgatgcaactgatgaagaaatagatcaaaaaagcgaaaataatattacattaccacaattacaagctaaattaaagccgcaactttggcaattattaaatatagcatctcaagcagctgaaaaacgtggttggcatctttatttagtaggtggtgcagtacgtgatttactattagcagaagcccaaactggcacattaatgattaatgatattgatttagttgttgatggttttcatcaagcagcagatgtgggtgcaggtgtagaattagcaaaagcattgcaatcaatttatcaagatgctcgtttagaaattcatggtgcatttcaaactgctgctttattatggcataaacaccgagaattaaattcattatgggtagatattgccacttcaagaacagaattttatccttatcccgcagctaacccagaagttgaagctagttctattcgtcaagatttatatagaagagattttacaattaatgcaatggcattaaggttaacatctccccgtagcggtgaattattagatttttttggtggtttattagatttacaagctaaggaaatcagagttttacaccctaacagttttattgaagatcctactcgtatttatcgcggagttcgctttgcagtgcggtttggatttgccattgaacagcgaaccaaagagtatattaactatgccataaatagcggagtttatgacagaacaactcaagaaaatgtcaaaactcctgccttacaaactcggttaaaaactgaattaaagcatattcttgaagctccctattggcaatctgctttacaattattagatgatttgggtgctttacaatgtatccatcctaccctaaaattagatattgatattttacaagaattacgtttattggaaaaattaattatcatatatttgcgaagctgtgaaaaacaacaaatattacatccttttttacatccttggcaaatgcgtttagagttattaattgcccatttagaaccgcaatatacaacaaaggtagctaaaaatctacaattagctgatgatagtattaatagattaaagaaattagcagaaatgcaaacagaggtaatttcattattaccaagttgtgaattaccgagtcaaattgtccacttattgaaaaaatatgatgcaccaactttgatgttagttgctttaaaaagtccgcgcaaagttagacggaaaatctggtattatttaactaatttggcaaatgttcaacctttgttaaatggcaatgatttaaaacaattggggtataaacccagtccgatttttaagaaaattttggatgatttattgactgctactcttgatggtaccattaaggatgaatctgaatcgcgggaatttttagctaaacattatcctcgttaattttaatattgccagaatcaggatgtccaagatttgaggattttcaggatgttgatttaatgttgatttaaaaattagtaatttgaattagtaatttgaattagtaatttatatgtgaaaaagtgctgttacctaattctgaaaaattccaccttaaacaccaacaaaaaattaatcaattaccatcctgtacatcctttaatcctggttatcctgattctgacaaattctattttttaaaacgaaccacagagtcacatggaacacagagaaaaacaacatcatgtaaatcctctaatcctggacatcctgattctgacaaatcctgattctgacaatttaaatttaattattctacttaatttaaattgaactaataaatatttaatattaaattaaatatattgcaataaatatttacgtatgtattcataattatttagatattaaaattatttaataattccagtatttgagggattaccagctaaaattatacaaattcattagcgtcccaatactgataaacttctgaatgatagtcaacacctgatgctgaatgcaagttataattttcttgcggagcaactttacaaaaatttatgagtaatccccttgtgcaagccttttttgtaggcagagcagcagcagaagtaattaatgagcgtgtagaagtcgccttgaccgatgctttgagcgaactgggtaaatttgatgctgaagccagagaacagttacgccagtttacagaggaagtcatagcacgagctaatcgggctgccgaagcctcagaaactgcaacaaccacaggtagcggtgcatctggtgtaggttctacagacttacaagcagaaattgacgaattgcgggcagaaatcgccttattacgcactgaattacaaaaatatcgcagtgcgtcaaaatagataaagggaacagggaatagggaacagggaaaaataacatttattacccattacctattacccattacctattacccattacgaagagtgtctgttattagtggagattccgtgaatacccaacggtacgaaaaaaatatggaacaaggttattcaggtaaggcttaccgttggaatcgggaaaaatactctagcaaacgccgttttgtggatatttggtcttttgttctgactttaatgttcaaaatttggcggtataataaagcttggagttatcctgggggtgtaacggaagctaaacaagctgctagacgtaaagcccaagctatctggattagagagacctttttaaatttgggaccgacttttattaaagttggtcagctgttctctacccgtgctgatatctttcctagtgaatacgtggaagagttatctaagttacaggatagagtaccagcctttaactatgaacaagtagaggcaattattgagcaggagttaggtaaaaaaattcctgaactattccacagttttgaaccagttcccctggcggctgctagtttgggacaagttcacaaagctgtgttacattctggagaatcggtagttgtcaaggtgcaacgtccgggactcaaaaagctgtttgaaatagatttacaaattctcaaaggtattgcccgctacttccagaaccaccctaaatggggacggggacgagattggatgggtatttatgaagaatgttgtcgcattctctgggaggaaattgattacctaaatgaagggcgcaatgctgatacttttcgccgcaatttccgcgcttataactgggtgaaagtacccagggtttattggcgttatgctacttctagggtcattactttggaatatgttcccggaattaaagtgagtcaatatgacgctttagaagctgcgggtgtggatcggaaagcgatcgctcgttatggcgctcaagcatatttacaccaattactaaataacggtttcttccacgctgatccccaccctggtaatttggctgttagtgccgatggtgctttgattttctacgacttcgggatgatgggaacaattaaatccaatgtccgcgaaggattgatggaaactttgtttggcatcgctcaaaaagatggcgatcgcgtggtacagtctctgattgatttgggtgcgatcgcaccaatagacgacatgggtccggtgctgcgttctgtccagtatatgctggataacttcatggataaaccttttgaatctcaatcagtggccgccatcagcgaagacctgtatgaaatagcttacaatcaaccattccgatttccagcaacttttacctttgtcatgcgggctttttctaccctggaaggggtgggaaagggtttagacccagaatttaattttatggaagttgcccagccttatgcaatggaacttatgactaatagtagtggttcagaggggaatagtttcttgaatgaattaagtcgtcaagcagtacaagtcagtagcactgctttaggtctaccacgtcgattagaagatacactggataaactagaacggggtgatattcgtctgcgggttcgttccctagaaacagaacgtctgttaaggcgacaaactagtattcaaatgggaatgagttatgctttgatcatcagtggatttacaatttctgctacgattcttttggtgaatcattatgtatggttagcagcagtagcaggtttaattgctgccggagtttcacttgtacttctccgcctaattttacgccttgaccgttatgatcagaagtattaattattgctgcacaaatttatgaaacttaacttcgcgggtttgaccgatccgggacttattcgttctaataatcaagatgcttactatatagacccggaaggacggttttttatagttgctgacggtatgggcggtcatgcaggaggagaacaggccagtcacattgctacccaagaaattcggggatatttagaaaaaaattggcaatcttctgaatctacgccagaattattagaaaacgctttattgttcgctaatgaagcaattttgcaggatcagcaaaatcatcctgaacgtgctgatatggggactactgctgttgtagtggtttttcgtgattcagatccaccttggtgcgctcatatcggcgattcaagattatatcgttatcggaaatcccaattagagcaaatcacagaggatcatacttggatcgctagagctatcaaacttggtgatatctccgctgatgaagcccgattacatccctatcgtcatgtgttatcacgctgtttaggtcgtgaagatttgcatcaggttgatatacaaacattagatatcaaggttggcgatcgcttacttttatgtagtgatggactcacggaagaactcgtcgctccccaaattaaaacttgccttgacaattttcccgtacttgataaagctgctttttctttggtggaagcagcaaaagaggaaggtggacacgacaacattactgttgtccttgtagatgttgagtaaaattcataatagggaatagggaatagggaatagggaattaggggttgctgatagcgtagcgtggcgttagccatataaatatgaaaactttacgaaaatgtcacctgtcacctgtcactggtctttcacagataactttttcagcaaaccctaattatctattcttcccatatccctatcttccaatgcccaaaaaccaacaaagtaaatatactcagcattttgttcaatttgagcattttttatgttagcaaattgctaaaaatatctttaagcctttcaattcacctgatgaggctaaatttacattagacttctccgaaaaagacgtagagacaattcatgaattgtccctaccaagggtttcaggttatgcttatgtaattttcggagatatctattatttagaaaattgaaattttgaaattatcgcccttgttagtcccaactgcaaggatcaacaatcaagctcaaataaatctactgtaaaaatccttgattgatccataagtctatttacataaaacctgctttcaggaatcatgggcttaaaacattagatttaaacgcaagatttagaaacagaaaaattaaccgcaaggtactgggcaatttgtcaaacaattgttatctttcttaatacagaggaaaaacaaatgctgaaaacaaatatcagcccaagtctcaaacccttggcttttctgtcaccaatatcactgttaagcgttgttttttgaggttttaactatgaatcaaccaatagagctttccttggaacagcaatttagcatttgttcatttgctacacaggtcaagaacatgagccatgaacaagcacaagagtttttggttaaactctatgaacaaatggttgtaagggaagcaacttataaagagcttctcaagcatcagtggggattagattcaggttccactatggcatagagtaggtttgcttttgtcgcagtgggcgacctccttctcttgcttggttccaccagcggaaaaaagctggggatgttggggcgtcaacttcgattaccagtcacctaactcttgatctcataggatctgacacaggtaaattcagtaatcatatttcagtctaataatgcccagaccaattttgtagaagatgctattgtatatagctgaaactaatttagtggaatacaaaaattacccaaaaagctcatatctcaaagaatagagccgtttgttgtttgcttcctcctgctgccaaggatgtcggcatctttttcttatgtcgagagtgcagttaaattcagctttacattctatataactataatttgcgttaatcaagaaattttatttacaaaactttacttattatccagatatatcaaagaatgaaccagtatcacttgtttgcagtttagctaatatttgccgttttatcttttcatactcctgtttgagaaaatttttactaacttgagcatctgcggatgatgtcaatactttgctgatttctagccactcttgcagtctttcgcgttgaataggggttagtagctagttactgttttcttaaccaatactaacaaatactcacatttactcaaaatttcctgtcatcttttggctttgtgacagaattacagtaaaatcactgtatgctactaggattcaaaacccaactcaaaattaacaagcaacaacgactactactagcgcaacacgcaggagtagccagacacgcttggaatcaaggtttagcactttgtcaacaggtattattacataataaacttaatcctgaagaaaaaatcaaatttcccacagccatagatttacacaaatggttagtagcagccattaaatctacccatccttggtattatgaagtgtctaaatgcgcccctcaatacgcattaagatatctctcagatgcttttaaatctttcttcaagaaaagtaaagggtttactaagtttaagaaaaagggtaaacatgattcttttaccttagatggtgccataaaaattgactacagaaaggtaaaagtacccgtaattggttggataaaaacttatgaaattctccctacaggatatcaactgaaatctgtcaccatcagtaaacaagctgacaagtggtttatctcttggaaaatagaaatagaaacgactcaaacccataaaaatcaggagtttgtaggagttgatttaggaataaatcatctagcaatattatcaacaggagaagtatttgatggagtaaaaagttataaaaagtatgagaaaaagttagcaagaatgcaatatttgaaccgtcataaaaaagtaggttcaaataactatagaaaagcacaaatcaaaatagcgagattacaccaaaaaatagccaatatcagaaaagatacattacacaaaattactacctatattagcaaaaaccacgcggtgatagggatagaagatttgaatgtatctgggatgttagcaaatgggaaattatcaaaagctatatcagatatgggcttttatgaatttagaaggcagctacgcaatactgctcacttaactaaatatactttaggttatgctatcactaaactcgccccaggcatagtataatccaaaaaaattgtcaagccaacctacagagcgataaaataattctatcaaaggagatgtaaataagttggagacagtgcaaatgcaaaatccatttcccggtatgaatccgtatttagaacaacctgaattatggcatcaagtacataaccgtttgattgtcgctatagctgatgatttaactcctcaaattgcccctcaatacagggtttctattgaggagcgagtttacacaagtgtggatgatatttttctagtgggaattgctgatgtagctgttgcgaaaagaaataataatgcagaaactgggacaactttaactactacaaaactagcagaacctagtaaagttaaagttcccatgtatgaagaggtaattgagcgatttttggaagtgaaagccacacaaagccgggaagtagtgactgtaattgaaatactttttcccaaaaataaacgctctaaggaaggtagaactgtttacgaaaacaagcgacaaaaaattttagcatctgctactaatttagtggaaattgacttattgagattaggtgaatctttaccaattctaggagcaactaaaagcgattatcacattttagttagccgcagtcatcaacgaccagatgcagacctttacagttttgatttacaagatcctattcctgtgtttcccgttcctttgcgttcaggagaaaatgaacctgtgattgatttacagaggttacttaatgaaatctatgaacgggctagatttgatttagcaattgattattcacaagttctaaaacctgctttatcttctgatcaggaagcttgggtaagggagattttggataatatgtagacagtgtaattataggtgatgctttagcttgcgacctttcctaaaaaactgtcgaaagaattggtattgattaacccattttctatcaatactcgacgtacagctaccaaatgcacaggttgaacataagcctgttgtgcgttaagttggtaaaatgaccaaatttcctgacaatggatattgatagatttgctgagaacctgttgttggaacttttgtaaaacctatcttgaaaagcaactgttctaggtcagtaaatggaatatctttaaccatgatttcgatatttgattatgtttttaatttcctccatagcatcttgataatctgtttccttaccttctttttgatatatatttgcggctgtttgaaaatctttaattgcaccctgcttgtctcctaatgtaaaacacacctgctcatttacgtggtcgagttgcggctattaatagtttgtttattattagtgcgtccaatgagttgggggttttgaatctggcgcggttgcggctttattcggacctgttttctctgtggttagtgggggaataggtacgattttggcggtggttgtgacggcgatgatttggccggaaatcctcaagttgggggcgttgcatgaggatttataggggaaatagtctcacgcaaatacgcaaagaaagaaggagtctgagaaatgaactattcatgacttctctggttgaaagttgatgaataatgaattacattaaaaataatacaatataatgttgtgcattattgaggtaatttcatgagtaccacgagttttcggcttgatgatgacttacaagagaaacttgaaatcactgccaaccgtactaagcgttctaaaggttggataattaatgatgctctccgtcggtatattgagcaggaagaacttaaacaaaggatattggaagaaactcaagaagccttagctgatattgaagccagtcgcgtggtatcaggagaagaggtgatgaaatggttggagacttggggaactgcggctgaaactaaggctcctttgctatgaaattagcgttttcggaaagtgcagttcaagatttgattcgtctacgagagtttatcgcagttcataatcccaaagcggcagaacgcatatctctgcggctgcgacaagcgatcgcaaaacttgtactgcatcccgatatagggcgttctataccggagtttgaaaatgtccgtgaacttgtagctggtgattatgttgtgcgatatttacgtcttgaggatgggatttttgtattaagaatatggcacggtaaggagtttcgtgattttgggtaaaaactgaatcaggttagaaaaagctcacacaaacttgtataattctatatgttatgtttatcttgagtaacccagtatgactcagcacccagaaatagattacaagcacgttttatctgaactttcggttaaccgtaagagggtgtttgaaaagtttttggcagtcaaaatttaagcaagtcgcctcaccataatacggattatggcaaggtagataaaagtctcagaggtttcgggtaataactcataatctctgactaatcgccgacaccccatcaaccaaccgtaagtgcgttccaccacccaacgttttttgagtaaaggaaggccccttggtctgctctggtcgaagaactacctgaataatccaacgacaaaaatccatgtcccactgcataaacggctcaccgtcaaaaccaccatctacccagatagttgtcagacgagatacctggtgtggagatttttgaaggacttacgcaaaatatctatctctcaaaacctcatcttgtatatgtactacaaattgaagtgcggaatgtgggttataaattcctttgattttttcaaccacaataatcgtagaaatcaggagtggtaggggcgaaggattcgggcgactaattataaatttttgtccaaggctattttaccaacgctttgcccttacgactcctgactcctgactcctaactcctgatgtatttacttgacttgacgttctaggctggcctccatggtactagtgagaaaatgacctgctaagataccgctagtcaggtaataactatcttctgaaatctggtgtaaagtttcaaaaccgctgcgacgttcgcgatcgcccaggacccaataacgctgtacgatggtatctgggcaaatccaaccttcaccttcaatctgtccaaatatattatgctgaagcaaaaaagtatattggcgatcgccttcatgcagtctacctttatattggcaagatatttctgaacgatcgctaccaggaaacaccaactttgtcgccatagaaaaccaatcatcacgatcccaaactaccaaagtcatacctttaaagctgatcggcatactatttctttccaaccaacttccttgcatgatccagcgtcctggttgcaacaaaaaactgtgagccaccttataaattcctttgattttttcaacaacaataatcttaggagtcaggagtcaggagttattgattttggattttggattttggtcaagcagtgagttcttgggggtttccccatgagcaactgctgttagcgtaacgtgccggaggcatcacccgaaggtattgtttttgtgatttccaatctaaaatctaacatctaaaatctaaaattttcctcacttatcacctgtcaccggatgtacttctcctaaaaccacttcttgatctgctccagttgcaacgggtaaattaccaggaagacctaactgtctccagtaggctaaaatagcgaaagcgatcgcttctttaaactctgcacttaccccggcttcatctgtagttaaaacttttactgatttcaacaatagctctaacctgtgttttaagtaaagattctgactaccccctccacataataataaacattttggcattcgcggtaaaaaagcatggtaactattaacaatcgaagcagccgtgagttctgtaattgttgccagcacatctgctggactaagttgatatgcttgacagtcttgtaaacactgatgtagataagttacaccaaataactcccgaccagtagatttaggaggtggtaaacgaaaataatcttgacttagccatttttctaccaatggataacagggactaccactagcagcccaactaccattttcatcataacttttagcaccattgctaaaatattgcactgccaaatccaagagactatttccaggaccagtatcccaaccacgaatttgatttaaccagtcatcacgccggggaggtagataagttacattaccaataccaccaacattttgaatacaacgtgcttcctggggatgactcagtaaataggcatcgactctaggaacaagaggcgcaccatgaccaccaacagcaatatcagccacacggaaattactaatagtagtaatacctgtcaggcgagaaattaaagcaccccggccaagctgcaaactgtaacctaatgattggggataggggaatggtgactgatgactgggtaaaatatttgctgaaacagaattttctgaaatagaaaatcctggaggtcgatggtaaacagtttgaccgtgagaaccgataagggtggcagggggataaccgacttgaatattttgggctgcttgggcaaaaacaagagcgatcgcatcatctatggctgccagttctgccattgagataggcgcaccaccacagatcgccaatattttttctcgtagtgcagcagggtaaggataggttttcccggctaataattcaactttcagatccaaatctgtaccaacaatttctaccaaggcagcatctatcccatccacagatgtgccactcattaaacctataacacgagtcgggtgcattgacagagattctggtgtgattttaaaaagtagtttaacttaaatgttaccttgatgaaaaccatttatacaatcgtgaatctgttaattcctgatttaaccaatattctgactcctgacacctgacttttaaatttctaatttttcccagtggcaataatatgtaaatcaatattttttagcaaacccaccaatttttgaattaaagaacctttcagcagaatttcccaacgagaacgcctactcgcaccaataactatctgagtaataccatatttttctgcgacttctacaattgccttagcaatattactattacttacccgaataaaaattccattaaattctttacataaattttcacaaatatcaacgtgtaggctttcttctttagttagaaaatggtcaggattagccacaaataaaacatacaaaggagcatttatataaccagctaatcttgcgccccgacgtaaaagttgtacagaattagggtaagtagatacacaaactaaaactctttcgtgaacactaaaactttgacttttctgtatacaagcaatggcatcttcttctacactatcagcaacttcccgtaaagctaattctcgtaaagcgattaaattacgtctttgaaaaaagttatctaaagctgatttaatttgatcatgggcatatattttgccttctaataacctttcttccaaagtttctggtgttacatctacaacaactacctcatccgccacttctaaaagtttatcggggactcgctcacgcacaactacacccgtaattcttgctactatatcattaagactttccaggtgttgaacattcatagttgagtagacatcaatacctgctgccaaaacaacttccacatcttcataacgtttttctcgtggtgaaccaggaacattagtatgggcaagttcatcgactaatactaattgaggacaacggttaataattgcctgagtatctatttctggtaacattaaatcaccaagagaccataattttggcggtatgatttctaaaccttcagctttttctgccgtttcttttctaccatgagtttctaacagtccgataacaacatcaataccttcctgtttgagcgcgtgtccctcttccaacattcgataggttttacctacccctggagccatgccaataaagattttgtgttttcctcgtccttggaaatacatagaatcagtgttaattgattattaattttcctgacggttaatttcttgcaaatctagagcataatttaaacgcaaaacattaactcctggttcaccaaaaatacctaaaaatctgccatcagtatacttattaattaaagggataatttcatcttctttaataccccgtgcttgtgcaactctggctaactgctgacgtattgccttcaaagaaatatgaggatctaaaccagaaccagaagagtaaattaaatcagccgcaggttgtatattttcatcttgaaactgagttgcttcttcaataattctcttagttagttctgaattactaggagcaagattactaccccctgatataccagttggtctagctattctaccttggctatatctcacagcactgggacgactctgaaaatatttatctgatgtgaaaatttgaccaagtaaagaggaacctattggttcagcgtttatatttaaaacaatgctgccattagctgaagaagggaaggcgaactgaccaaagcctaatattgctacaggataaataattgctgttaacaaccaaagtaataaaatcatccgcatagcgcggatagtttctcgaataaacaccataattggtaattggtaattggtaattggtgattggtaattggtgattggtaattggtgattggtagttggtaattggtagttggaaaaaataaaattgattacccagtcgccagtcaccaatcaccagtcaccagtccccgattaagctaaacctgcaactgtaattagcatatctatgaatttaatagcaataaatggagcaattacaccacctaagccataaataaaaatattgcgttgcagaagttgattggctgttaaaggccgaaatttgacacccttcaatgctaaaggaatcaaaatcggaataatcaaagcattataaatcagtgccgataatacagccgaattcacactggttaacttcataatattcaagccttgtaaattagcagctgcaaaaattactggtataatggcaaaatatttagcaatgtcattggcgatagaaaatgtcgtcaatgccccacgagtaatcaataattgtttaccaatactaacgatatcaatgagtttggtaggatcagagtctaagtccaccatattagcagcttccttagcagcttgagtacccgtattcatggctacaccaacattagcttgagctaaagcaggagcatcattagttccatctccggtcatggccaccagtttaccttctgcttgttcccgctcgatgacgctgattttatcttctggtgtagcttcggcgataaattcatctactcctgcttctttagcaataacagaagcggtgatgcggttatctccagttaacatcacggtacggactcccatgcgccgcagttgctcaaaacgttcgcggataccgggtttaacaatatctttgagataaatcaccccatagatttcattatcgagacaaacagctaaaggcgtacctccttgatgagaaacttcctcataagcattatctaattctggagtttcccgtccattgcgagaacgaacaaagcctttaattgcccccaccgcaccttttcgtgcctcatgtccaccaggaaagttagtgccactgatgcgggttttggcagaaaattctactccttgggcttgtttgcggtctatatcaaattttgcgccaaatttttctgccaagcggataatagatttaccttctggagtatcgtcaaagatactggcagctaaagccacattagcaatttccgacattgagtgaccgttgatgggtataaaagcttctgctaaacggtttcccaaagtgattgtacctgttttatctaagactaaagtatttatatctccacagacttccactgcctgtcctgaagtagcaatgatgttaaattgggcgactctatccatacccgcaataccaatagcactaagtaaactgccaatggtggtaggtataagtgcaaccaaaagagcaattaatacggtaacgctcacaggactgttgacatagtaggcaaaggcgggcaaggtggcgactacaaacaaaaatgccaaggtcagcactgacagtaaaattgttaaagcaatttcattaggtgttttagtgcgttctgccccttctactaagttgatcatccggtcaataaatcctttaccggggtcagcagtaatacggatgattaattcatcggagataatgcgcgtcccaccggttacagaactggcaacatctgaacctgattctttgaggactggggctgattcaccggtaatggctgattcatcaacagaagcgacacccataatcacttccccatcggcggggatgatatcaccagcaactacatgaacggtatcgccttttttcagttccgtggaagggatttctgtgattgtgccatcgacgacaatttttttggctatggtttctgaacgggtagatcgtaaagcatcggcttgggctttacctcttccttgtgccaatgcttcagcaaaattggcaaaaagcacagttaaaaataagataactgtaactaaaccgttgaaaagctgggggtttttctgggtgacgggtccaaatatggggggataaattgtggcagctagggtaatgactgttcccaaccacaccaaaaacatgatgggatttttaatggcatattggggagatagcttcacaaaggtatctctcattgccctgatgtagagtcctttggtactaatccgccgtgtttttttacgtttgatacggcgatcgcggggacgcaaacgagaagatttcggtcttggggtagttgcagcagagttcataaagggtgattggtgattggtgattggtgattggtgattggtaattggtgattggtaattcaattttggattttggattttggattttggattgtttttgttatccccaatctaaaatctaaaatctaaaatctaaaatttttctcccagtcaccagtcaccagtcaccagtccccagtaccctaacttccagatgctaattttaaaccttcggcgactggaccaagggctaaaactgggaagaaagtgaggacggctaaaattatggctacaaaagctgtaacgctggtaaataggaaagagtcggttttgagagtaccacgagtttggggaacttttggtttacgggacatactatcagctaataggatcagggcaataatgggaatgtaacgccctgctaatatgctgaaactgctactcaagttccaccataaagagttgtctttcaatccctctagtccagaaccattgttagctgccgctgatgcgtattcataaactacttgggaaataccgtgaaaaccggggttactgattcctgatagggatatgggataagctagggcgatcgcactagggactaataccatgatcggatgaattagtaggacgacgctggccagaaatatttcccgttgttctattttgcgtcctaaaaattcgggggtgcgtcctaccattaacccagttataaagacggtcaggatcagataaataaataggtaggctgttcctgttccttgtcctccccaaattatctgtacaaataaattgaataagctagaaaatataccttggggcattaaggaatcgtgcattccgttaattgcaccggtcatggtagcagtggttgtcaccgcccaaaatgctgtttctgcccagccaaatcttacttcttttccttctaaattcggtagttctgtatttaaagcttggttaataatgggatttccttgcagttcacccactgctgtaacccagatcataactatgaagattacaaacaccatccaaaacagtaaccaagtttgtttctggttattggcaaatacaccgtaggtataaattaaggatgagggaattgccatcatggcaatgatttctagtaaattagaagcaccattgggattttcaaagggatgggctgagttagctgcaaaaaagccgccgccgttgttgcctaacagtttgatcatttcaaaggaagcaacaggacctctggctatgtactgtgttcctccgtctagggtttggacaactaaagtaccttctaatgtttgtggtacacctaaagccaggagagcgatcgccccaataattgaaaggggcaacaatatcctagtaatggcaagggtaatatcaacgtaaaaattccctaactttcgacctgttaacccccgaataaatgctattcctactgctaaaccagttgctgctgaggtgaacattaaaaagcctaaagctgctgtttggctaaaatagcttaatgttgtttcccctatgtaatgttgctggtcagtgttagtcaaaaaggatatggtagtatgtagcactgtatcccatgtaggcattactaaaccgttgggattccaaggcagtattccctgaaaagagattagtaaatacacagaaattgccatgatcaggttactactgataactgcccggatatactgccaagctgtcatctcctcttttttacttacaccccccactaggtagaaaattttttctatcgggttcatgatgggatcaagtattgtgctttctcccaaaaaaacacgggctatgtattgtcccaatcggggtgtgatagctatgacaatacatagggttaacgcaatttgtaaaaaaccttgtcccatttatttattactcgattacactgaagttctagccagtcaatattgaaaaataatacctaaactattggtaaatttgattgctaagattggatgatgtctgaatatcacctcaatttatcaatcttgttgcattagtttttgaatgtttgttgaatttgtatttaagaatatttcaattttacttaattgacactcttgcaagaatataaaaaaatcgtgatatttttcttacaataacactgtcaattcgtataactttacactcttttaacaacctaaccctttgacgctccccgccttaaaaggacggggattcttgtttcaatgagcatccttacccaaacttgttaccaaatctgggtagagggtcatttctccacaagcgataagaactgaggttagcagatgattatattctatatttccgaatttgaggaaaaatcctgattgtttaagaggatgtctaagaagtatcaggttttgttgagatccccccaacccccttaaaaaggggggctaaattcttcaaagtcccccttgaaaagtgggatttagggggatctgcgaatgttggataccgcaggaaaaagttttcagacatcctctaagcatattctatacattctaggacttacgcaactggcatatttctctgttcgtagtaagcgatttatcgcttatttttggcactaaagtgcctactacagacttaaatttagactttccttgtgacacttgcgtaagtcctgcattcatttagtctgtaaaaacacaatatgattatttacattatattgatggggtctacatcaatggtgaggctgactgcggcagaattactaatctttctgatttcttcccaatctggtaaattaggcagtgtatcaggcgcaaatttcaataatatttgccaccgataacgattagctactcgtagaatactagctggtgctggtcctaatatctctaatccttcttgttcgctaaaatttgtcgctattagttgggctgtattttccacttttatgggatcagagctactcaaacgcaataatattaatctgccataggggggataattaagtgcttccctttgttctaattctgcatcacaaaaagattgataatcatgggttttcacggcttcaataactggatgttctggggtgtaggtttggataattactctaccgggatcttctcctcttcccgcccttcctgcaacttgggttaaggtttgaaaagctctttcactagcgcgataatctgataaatgcagcaacccatcagctgcaactactcctactagggtaacttggggtaagtctaaacctttagttaacatttgtgtacccactaataagtctgcttcaccgttggcgaattggctgatcagggtgcggtgtgcgccttttttgcgggtggtgtcgctatcaaaacgaattggtttaatgtggggaaattggcgttgtagttcctgggttactctttgagtaccactaccaaagaatttgaggtagggtgaactacattgaggacagtttttaggatgtggttgaccataattacaataatgacattttaataactggggtgcgccttcttctacatgatgataagccaaggatacatcacagttgggacattccagcacataaccacagctacgacaggaaacaaaggtgctatgtccccgacgatgaataaataatattccctgttgttttctttcttttaattcttctaaagcttgttgcagggatcgactaaatattgatctatttccctctttcaactcttgacgcatatccactatttctataggtggtaggggtttggagttgatgcgttgtgggagagataggtattggggactgggaactgggttattaacttccccctgctccctgctccctgctcccctgctttctttgatacttacccaactttcaagggagggggtagcagaacctaaaattagggggcagttttctaattctgcacgccattgggctactgtacgggcgtgataggtgggtatgggtgagtcttgtttaaagctgctgtcgtgttcttcgtcgaggataattaatcctaagttgggtaatggggaaaaaatggcgctgcgtgtaccgatgactacttgcggttctccggtaaacatttgtcgccaggtgtcgtagcgttcaccgtcggaaagggcgctgtgataaacttgcactttgttaccaaaacgggcgcgaaatctgtctgtgagttggggtgtaagtccaatttctgggactaatactaatgctgattttccttggttgagtaggggggcgatcgcttgtaggtaaacttcggtttttcctgatcctgttaccccatgtaataaaatttgtgcaaatccatttaatgatttgatggtttctaaagcattagtttgggctggtgttaataatttggcttgatccccggctattttgggtccttgttctctgcgtagtttttcccgttcttcaatgacaatacaacctttttgttctaatcctcttaaagtaggtagtgtagtttgacatatttctacacactctgtcacccataattcaccaccatgatctcccagtattttcaatatttcttgttgccgtttagtgagattcatgtatcttccatgatcaactagtgttactgctagtttcatttgtggtttagattgggtgaatttgaaatagctttctgcccagtttctatctattaattgtttttttgccccataaaaacctttgacttgacgtttgaggtattgaaaactgtaatctccatctggttgcgattcgagtattttcagtatttctttggcagcttgggaacgtaaaaattcggctgcaccattgggaatattttctggttttagccgcagacgactttgcgatcgccctaataatcctggtggtaatgctacccgaatgacttgaattaatggtgtgtagtaataggcggcgatgcgattcagtaattcccaatagatgctagagaaaaattctttgctgactacatcttgtacttcccgaattttctctagtcctaaatttgctggtggttgtgataataaacgaatcgctattcctcctacctgttgcgctccaatgggaactgttaaaatatcccccggtttaatatctaaatgttctggtatcttataaatcaataggtctttgttagatagttcatcaactgataactcctgttctggtatgacatcatttaataagtttttttctaatgtttcctcaactgtttcatcaattgctacattctcttctggtatcttatttgtcttaaatgttaagagttttgacaaatccactaatacttcaatccaaggataaagatttgttttggactggtatgatgatcctggttcagctaatactagagtggataaacttaaatcctgaatatacataatttttggctttttcaagagatatttgctcacccaaatggataaacttagtcgagattacttaactttaactttttaagtttactacaagtaaactgtatttggcaatacttttattactcatgatagttgataactttgtttatatgtaatcttatagacaaaataatttctaaaatacgtgcaataaatattttatgctaactacacaaatgaaagtatatccgataataatgagttgtttttgtctactaaataggtagtagattttttccacctattgatagatattcaatagtttttgtatgtgagatgctttgatacaatcaagattgtccggattttaagctaccatttttgtaatttggatcatttgggaagctttaacttaggaagctttaacttttttactccaaatcaaacaaaacttcatggaaatacataaaaatttaacgtatagggtctttagatggaatttttatatttgttaagctggagaatgtttgaggggtgtttgacatatttggtgatgaagaaaaaaattagaaatatgtctgctggtagtgggaaaagatggtattttgggtgcaaagaccatataaattgtatctagatgtaaccaagatatggcagacagatacatattttccttccgaatcaagaattttcaagaagattgtatttggctgggtaaatgggtgtatatgtcggtaaaaactaactattctcaaacgagcagctgtcactaaatttatgtaccaaaccaagcaactatcccaaaaggaaactatgaatcttgctgaattgggaacaatggaaatactagataacgctgctgatcatgatgaaccatcacttgatagtttagaagcagtagtatttgaagactcttcaattgtggaaaatttggagtcagatgaacgagatggggatgaaatggcagcggctcgtccttcgggatataataaaaccgaacatgacgatgctgtgggcgcgttttttaaggaaatggcgcgttatcctctccttaaacctgacgaggaagtagagttggcgcatagggtaagatttttagaagaagtaaaagacttacaagcagctttagaagcagaactgggacacaaccccagcaaaagcgaggtagctgctaagtttgatatgacggaaaaacaactggaaagtcggttgtatcaaggtagggtagcgaagcggaaaatgattcgctctaacttgagattagtagtatctattgctaaacgatatcttaatcggggagtgccttttctagatctaattcaggaaggggctatgggtttaaatcgcgctacagaaaagtttgatcccgataagggctataagttttcgacttatgcttattggtggattcgacaggcgattacacgggctatagctaatgatgcccgcactatccgcctaccaattcacattgttgaaaaactcaacaaacttaaaaaagcccaaagagaacttaaacaaaaactcgctcgcaacccgacagaagcggaaatggccgagtcgttggaaataagcgttcaacaactgcgtcaactgcaacaactacgccggcaagcattatctttaaatcaccgtgttggtaaagaagaagatacagaattgatggacttgttggaagatgaagataaccaatctccagaagcaaaaatgaatgaaaatatgatgcgtcaggagatatgggaggttttaggtgatgttctcactcccagggaaaaagacgtaatttctttacgctatggactgacaaccagcgaaccctgtactctggaagaagtggggaatatgtttaacctttcccgtgaacgagtgcggcaaattcaaagtaaagcgatgcgaaaattacgccgtcctcatatcgctaaacgtttaaaaggttggttaatttagggcaggaatcaggagtcattagtcattagacctctccaaaatagaatgtattaatttgtcataagttgtaggggcgaagcatttgggcaataatttaacggaaaaatcagacatctagatatcccaaatgcttcgccctgcccccataaataggttccataatttcttttctggagatatctattagtcattagtcattagttaagaaaaattacacacttagctataaactatttatagacgttgaactataagctaaaaactaatgacttttggtagtgatttaatgatcaggtttgctgaacctggagatagtgctgtgttgtttgaattgatacagggcttggcagaatatgaaaaattatctgctgctgttactggtaatgcagaaacattaaacgatcatttatttggtgaacgaaaatatatagaggcgattttagcagaagtcgcaggtaaagctgtgggttttgctttattttttcacaattattctacatttctcaccaagccaggaatttatttagaagatatttttgttttacctgaatatcgtcgtcaaggtattggtaaagcactgctgactaaattagcaaaaatagctgttgaaagaaattgtgggcgcttagaatggagtgttttagattggaatgtttccgcacaggaattttaccggactatgggggctgatattttagaagattggcgaatttgccgagtcagtgaaccagcaattactagattagcgaatcaataaacatcttttcacctaagcattcagccttcatcagtcgatttccggcagtaaaagcctaattattagcattaatgttagcattttttagatatgaatttttaatttttagttaaaaaatgattttttggctaattaaatttgggtttaatataaattaatatatattcccaaccattgcaataataagtcttacatctattatgctcaataatttagttcaatttttacagttattcttttgatttatacaagacaataaaaagagaattatggagcaattacctcctaatcagcaattgttgtagagagaacacaaaatgaaaaagattatttctgtattactattaggcatcactatcttcacctttgccttcattaatcctgctttcgctgctgacactggtgctggagaaaaaatatttacagctaattgtgcttcttgtcatgcaggtggtaaaaatttagttaatgctgctaaaagtttgagtaaggcagacttagaagagtacaatatttactctgaatctgctattattgctcaagttacaaacggtaaaaatgctatgccagctttcaaaaataatttgtcagctgatgatattgccaatgtagctgcttacgtcatggaaaaagcggaagctggctggtaaatagatttgtcagtgagttaataatagttatacctgaaagggtaagacaagagattcccaactgttttggcagttgggaatcatgcttgataattcaaaaattatgaatcagaatcactatttagcggttgctgaaaaagtgatctgtagaggctaggaaacactgacctttacataaatttacatttactgcaaacccgtgatataaaaagaacgtcaggtaaattttgccaaaattacctccaagttttacagcttgtcgtttgactcatacaacagaatccaaagaaaattatgaagcatattgcaccaactcaacgattgttgtagagagaacacgagatgaaaaagataatttccgtattactgttaggcataaccatcttcacttttgccttcagtagtcccgctttagcggcagatgcggctgctggagctaaaatatttagtgctaattgtaatgcttgtcatgcggggggtaaaaatgcagtcaatcctgccaaaaccttgagtaaagcagatttggaaaagtatggtatgtactctgctgaagctattattactcaagttacaaatggtaagaatgcgatgccaggctttggtaagcgtataaaacctgagcaaattgaaaatgtagctgcttatgtgttggaacaagcagataaaaattggaagtaatacaatttactttctgaattgaaataattattggcggggctttttgtctcgctaattaatccaattattagataagtagaaacaactaataaattataaaaacataaacaataattaaaatatgggtttatcgagcgtaattttagatcagcgagaaaaagaagctacagcactgaaatcttttttaatttacagtctcattggttctttagctttacatattggggttttagctttagggattggcaaatttatacaaagagtttctcaaactcaagaagaaccaattgaaatcacaattgtggaaactgttccggaaataatagccaaaccacaagagataaaaaactctcaaccaaagataaattctgctagtggtggtagtggtggtagtggtggtaataacaattttaaaagttctcttccagaaaaaactaccttgagtgtgagtaacgctgctattcaacctatagttaaacaaccccaactgaaaactactcaaaattttgttgtcaaacaacgccaaacactaactattcctgaaaagacgataacacaaccaagtttaacaactacacctattgctaaaactattcctgaaccgacgacaacacaaccaagtttaacaactacacctatttcaaaaataactgaaaaaataactgaaaaagtagaaactgaaacaaccactcaacccacagttgaacaacctgaacaaactgtcataccagatacaaaactttcaaatgttccagcaccaaagttaataactcctagcagtgttagtgttagttccaacaatacttctactacttcatctagtcaaaatagtttaagtaatttaggtaatcgtttgcggtctggtttaagtaaaggtacagaaaatgggactggaaatggtgagggtagcggtactggagatggtattggaaatagtgcaggtaaaggtactggaaatggtattggaaatggtgcaggtaaaggtactggaaatggtattggaaatggtgagagaaatattgcgatcgccccaaaaccacgttctgtcaatggtacaaaattaaatcgtgcagattgtattagatgtgatatcaaatatcccgataaagccagaaggcggggtatagaaggtcgtgctgaagttgctcttgatacggatactaatggtaatgttacctttgtgcggttaattcgttctagtggtgatagtgaactagatgaagctgctcaacaagctgtacaagagtggaaattaacacctttagatggtggtagacaaggtgtgagagcatcaattaattttgcgatccaagggtcacagcgtcatcgtcaaatcaaagaaagacaaagagaaagacagagagaagcttctcaaccaaaaccaaaaattaccaatcctcaagaatctacatcttcactagaaccagtcaaatctgatacagaaaatcaggttgatgaaagtaaaacccaggaagtaacaccacctgattctacctcttctgagtctaatagtgattcagaaaataattaggtgatctgaaatatgacagcttgtcttttgacagtttttatataaacagagagaatacttacatttgtttttaccaagtgtgagttgagaaagatgaataataattttgttttcctgccagtttttttactgagtttactggtagcttttcctgctgtcgctaataataataaaactaaagatcaggtagtaaattcagatattcctagtttaaatgaaattcaactacctgccacaaatgcgaacttattaactcaacaacctgcggaaacagaagttaaaaaagacacagaaacagatttaactcctacagaacctacagaggatacagatatttccattgaagcgataggagaaaaagacgctttacccgaatctacaccaactcatgtaattgaaaaagaagaaatcgcaaaacaaggtgctactagcgttgctgatgttttaaaaaaaatgcctggttttgctattaataatgtgggacatggtgctgatattcacaccggaacatattatcgcggtgcttcgattaatcaatctgtattcttaattaatggcagaccatttaataatgatattagcacctatcatggtggaactgacttaaatagtattcctgtggagacaattgaaagggtagaattatatagcggtgcggcttcatctttatatggttcttcggcttttggtggaattgtgaatattatcaccaaagaaggttttagaaagcccaaattaactggtagtgcagaatttggatctttaaatttaaataatcaacaggttacttattctggttcaactaataaagtaaaatacaatttcagttttgaaagattctttatagacaaccgttatcgtgttcctgtgggtgcagcaaatcgtaatcctgcggatggttatttatttaatgctgatactgccaccagtacctattttggtagtattggtttagatttagatgctaaaaattctgtgaatttagatgttactgctctcagtagtcgtcggggattaatttattttggttttcctttgcaaagagatagattagaccatgatagtttaaatgttggtttatcttggaaaactcgactgggtaaggataacgattcaaatttaacaactactatcggttataatcaaaattactttagtacatacggaccgggaacaggaggaacagtttatcgtacaggaattttagatactaaacaaattactactagggtagatcatgagtggaaactgagcgacaataatcaattgcgttggggtttagatttaaaaaacactgatttaataggtgatgttgtcagtataggtaatcttgctgataaaaatgaaaaggaagatagaagtgttttaaatacggctttgtttgcggtaaatacttggaaagttagtgatgattttctgattgatttgggtttaagacaaagctttgacagtcagtttgatagttatttcaatcctagttttggtttccgttatgccatgaatcctgtggttgctgtccgtggaagttgggcgggggcgcaacgtaatcctggtttagatcaattatatgtttttgataatgttcataattggaatccaaacccaaatttaaaacccgaaactggttctacttggactgcgggagtggattttaatttatctagtaatttgctggcgcagttgacttattttggtagtagtttggataatcgtttggctattgataatcgtactagaacatggacaaatgtgggtttggtagatactaatggtttagaagctgctttgcaattaaaattagctcgtgattggtctacttttatcaactacacttatacagatgccgaaattaaaacgggaacggaaaaagggttacaattaggtttgattccttattctttgctgcaaggtggaattggttatcaaaagaatggatggcaagctaatttgtatctgacttataatagtggtactcgtcgcgctttgtttactaatactgctgctggtgaaaaaaatacagatttttcaccttcttttgtaaatttagatttgagtggtcgtattcctgtgagtcaaaatttaggattgactttttacttggaaaatttgttcggtgaacaatatgaaaaggtgaatcgtatctatagtcctggttttacttttcgtttggggttaacttctagtatatagttgatttttagattcccccaaccccccttaaaaaggggggactaaattctttaaagtcccccttttcaatgaggttttagggggatctgaaaatatttgatacatcatgagagacttttcaaacatcctctaagaagctaccagttgatgtaactcttctggtgttaagtgagagtgtacaacttttccatcacgaaaccaaacaatgcgattggtttgactagcaacttccgtttcatgagtcaccatcacaactgtaattcccgtgctatttaattcaccaaaaatatctaaaacttcttgagttgtgcgagagtctaaagcaccggtaggttcatctgctaagagtacaacaggacggttgacaattgcacgagcgatcgctactctttgttgttgtcctcctgataattgggtaggtttattattcaaacgtttttctaaaccaactttgattaatgcttccgttgcgcgttcttttctttctgctggttttactccagaatataccattggtaacatcacattttctaaagctgtgagttggggtaataaatgaaattgttgaaatacaaaacccagctttttgtttctaatatgtgctaagtcctgatcattcatttgggcaacattgatattatctaaataataattaccagaactaggacgatctaaacaaccgataatattcatcgctgttgattttcccgaaccagaaggacccataatggcacaatattcaccttcattaattgccaagttgatattatttaatgcgtgtacttctgtttcccccattccgtagactttaaagatattttctagatgaataatttctggttttggttcagagttaggagaaagagaatcgttaagagtgagagtgttagacatagagatttaattttctaatgattagtttacaaaagtggttttctgtaattatcatattataatgtaaatacaatcaaatgacaattaattaggtcaggttgaaaaagccgaaatcccaaaaaccgagatcctagacttcttcaataagtccgggatctatccacaaacttattaacccaatagtgcagcaccttgagaacataatgggaaaacatatcttatgaataacgacgattttttaaaatataattgaatatgtagaattatacccaaacaatagctgaaaaagattatgacaacttctctttatgaacgtgatttcttactttggacaacagatatagttaataaattaaagtccaaagattttgaacacctagatttagaaaatttaattgaggaaattgagagtttgggaagatcagaaaaaaaagaactcaaaagccgacttttggttttaatagagcatttactaaaaagattgtatgtcaactcaccagataattatcggggttgggaaataacaattaatgaacaaagacgacaattagaattagaacttgaagattctccgagtttgaaaaatatctgggatgaatcttttaatacagcttggagactagcaattaaaggagttaaaaaagactatccacaaatcatatttcccgatatatggccatattcttctgatatagattgtatgttagattgtgatttttggaaactgtaaaaattatgttgggcttgattaaatactggaaaattattcaagcctaactacgaaatttcttacagaaaaacaaggagctttatgattatatgctcataggtgaagcctctaactaaactgtataatcttaatattcttaggtcttgtgtaacaggcatcttgcctgttaaccttatataagttaaatgcacaacagcttatcaagcagttatgggtacaaacccctcccatttttcaggtattggtaaggaaaatcaccccgttgagcgcgttaattggcatcaggcaacggaattttgtcaaaagctgactgaataccttaataaacagggaattaacgtcaaaattaccctccctagtgaaactcaatgggaatatgcttgtcgtgctggtacaactacaaaattctggtttggaaacaatgacagcgagttaaaaaaacacgcctggtataatgaaaattcaggtagtcaaacccattctgtgatagaaaaaaagggtactcatactaatccttggggtttagtggatatgcacggtaatgtgtgggaatggtgcgctgattcctggacaggtaatatttctgacttgcataaaaatggtaagtcgtatttaaatacgcctcaaactaacaagtctctgcgtgggggtagctggtacagcaatggtaataattgcgcttctggctatcgcaactacaatctcgcgggcttcaacagcctctacggcggtttccgtgtagtatgtttgtaggggcaatccccctgtggttgccccgaaaatttatggttgccacaggattattgcctaatatttgtaattatgtggttgatgtaatatttgtattgatcaataaattgattatttggattattggggcgatcgcatcacatcaaaattcatgtaaaattaatcatcaatccgataatttacgggatttttttgggcgatcgcatcacatcaaaatccatgtaaaatcaatcatcaatccgataatttacgggatttttttgggcgatcgcatcacatcaaaattcatgtaaaattaatcattaatccgataatatgtggttgccccaataattccattatgtgttacaatcttgaagtagtagtttttttagattatgaataaagttaccttagaaatccctgagcaattaatgaataacttgcaaaatcaaactgactctgtgcaaaatattttacttaaagcattagaagaatatttagcaaaagagcaattaggttttctcaaaactaaaacatgggaactgtgtggaagtttagaaattcctaaccccgaacctgaatttactaccaaggttcaagattcagaattatctaccaactatgcagaaatcaaataggagtcctatatgagcaacctaatcatagaaattcctgagcaagtaacagaagtattacgtatccctcctgatgaacgtcttaatcgagtacgtattgaactagcaattagactttatcaaaaaagtattctttcctttggtaaggctcgtgaattagctcaattaactaaatgggaatttcacgaattattaggacaagaaaatattgaacgtcagtatgatttagaagaattagaaaccgatttagaaactttagaaatattacaatgaaagcaataagtaactcatcagttttgattgctcttagtagtattggacaattagaattgattaagcagagatttccagatggtgtaataattccccaatctgtgtggaaagaagttgttgaaacaggtacaggaagatcaggtgcagaagaagtatcaagagcttcatggttaagtattttttctgttagtaatacttctttagtctctttattaagattagaattagatcagggagaatcagaagctataactctttttattgaacaaccagctcaagccattttacttgatgaaaaaaatgctagacgagttgcaaaacggatgaatttacctacattgggtacagtgggaattttaatttgggctaaacaaaacggattaatttctaacttaaaagaacaactagatgctttacaaactattggtaaatttcgtctaagttatttaatttatcaagaagctcttagaaaagttgatgaataatatttacatttaacaagaaatttttggaaaatggagtttaggggcaaaaaatttatctgattcacttagaaaaaatataaataaaattaatcttaaacaaatgcaagaaccaccaattattcaaaaaacatataatttaatgttattataatatataatatctccatctgttgtgaagatatattatataaacatataaatattaggattgaaatttgctgctaattaatagccatttaatatcacatcctgaaaatccttaaatcctgaaaatcctgattctgacatttttaaatttttacgcacttctcaacgccacaataggatcaagttgtgcagcacgacgcgccggcacaacaccaaaaaataaaccaatccccccagaaatacccaccgccatactaatagaaacaaaagaaatacttgcttctaaaggactgatagcagcgactaacattatacccccaactcccacagcagtaccaactacaccaccaatgacagaaacaataactgcttcaataatgaactgaagtaaaatatctttttgggtagcacctatcgcttttcttaaaccaatttcttgggtacgttcagttacagaaaccagcataatattcataattccaataccaccaacaaacaaagaaatagccgcaattcctgttaacataatcgtcaaagcaccggaaatttgaccaactgtttctaaagcatctttttgggtacgaatagtaaagtcattttcccccactaacttatgtctttgtctcagtaaattggtaatttgaaattctgctgcatccacactatcagcatctttagcagaagcaacaatataagttacttctaacccataaggtgaggttttacccactaaacgatttgcggctgtaataatgggaactaatgccgattcatcataatctacacccaaatttgatcctttatctgttaacactccaattacttgaaagctggcatttttaattctaatttgttgactaataggatttttatcaccaaaaagtttttcttttaatttcgcacctaaaaccacaacttggttactgcgcttcatatctatgtcggtgaaaaatcttcctgttgctacttcaaaatcacgtactttcaaaaaactaggagttgtaccaataatattcacattggtatttctgtttttataagtaacaacctgtctactatttaattctgctgttgtgtctgctatggtcggtacttgagtatcaattgcattcgcatcttctaaaactaaagttctcacaacatccctagaaactcgctgaacttcttcattaccaggaatcacaaatacaacatttggacccaaggaatttaattggtcagatacaaatttttgtccaccttcaccaataccaatcatcgcaattactgagctattgccaataataatccccagcattgttaaaacacttctcagtttattagatatcagggttttacctgccatttgtacactttctagaaaattcataagacgtttgattttggattttagattttggattttcagaattattcttctttctctatttaactcctaactcctgtaagggcgaagcattcgggcgataaattatcaatttttatcacaggttattttccgaatgcttcgcccctaagactcctgactcctgtcacctattttttctcttttttaatcttgtaatcttttggaggattaataaatattaaatcacctgtttttacaccctctaaaacttgagtttcatttttaatttgtgtaccaatagtaatttctcgaaactggggtttattattttcatctggtactaatacccctgttttgccattttccgtgagaatagctacggtgggaatagttaaagcgtcattaatgcgatcgcccaaaaatgtcacatccacatttaaaccagaacgcaatttatccacaccactatcaatatttatccgcacctgaaatgatgttacaccttgttctacaactgcttcaggagcaattaaacgcacactccctttaaacacctgatcaggataagcatcagcaacaatttctacttcttgtccttgtttaattctcccaatatcagtttcaggaacattcgccaaaatttctaaacccctagctaaagcaataattgaagtggaagtcgcagaagcattactagaagcagaaatagcaggactaacataacctcctaatgtggcatatctttgagtaacaattccagtaaaaggagcgcggataattgtatcttctaactgaacttgttgctgtcttaactgagcatttgcagcagctacagctgctctcaaacgagcaatttcttcaggacgactaccattttctaactttcgcaatgcttccctttcttgggtaacaactgcttgttgtcttttgatatcttcatcacggtttccagctttttgcaaagataatcgcttttttgcttcttctaaactggcttttgctcttctatcttcagtaatgtactggtctaaagtatcttgagaaatagcaccttctttagctaaagcttggtaacgctttaccctggattgagttagttctacctgagcgttagcagcatctacagccgccctagcttgatcaatttcctgcgaacgattaccagcacgaattacagctagttgagcttgcgcttgtgctaacctcgcttttgcttgggcaatttcttcaggacgactccctgcttcgctttctgctagttgtgccttggtctgttctaagttagcttgatactgaagtatctgcatcttgatttcggaattatccatgcgggctataatttgccccttttggactgtttctccctgttcaacgtttaattctgctaataatcccggacttttcgggctaatattcacgctttgtactggttgcactttcccactcgctgtaattctcactgtgacgctttttgcttccacgggaacagtgagttgagaaatgtcttgtttgctgttttcccggtttactacttttaggactgttgttgtccccacaacgaaaacaccagcagcgactaaacccatcagccagcgtaatggatacttaacttttttgcctatcagtggaatttctgtgtagctagtcatattattatttgccttcttatttgtctaaaattttgtaaattgcccaatttatcaagttttgatctcaatactaaacaatcttttgctattaactgacaaataactaagatgagtagattcaagttcttatttatactaaaagtgtagagaatggtgcgccctcacatcatagggtgaattttactggtgttgaggaaagacgaaacgtgggtgtaatcactaatcaccaatctcaaaccacaacaataaaatgtaagtaatcacttattaattgataattgacagttgataattgacaattgtttcattcaaggtttaacacctcctctttacagggtaaaaagccaaaaattccgctttttcaagactctgacttttagggaaaggtaattgtcaattgttcattgttaattgtccattgttgaataattgcccaaattaattggctaaaaatattacattcagttgtgcaattaatcttgagtaggtgaaattccctgccaaactatctctatgagattctggacaaataagagttcatctgtaggtcgttcttctgtggggtgtatatgctctaagaaaacataattcatcagtgatcctaacaatatcatagcaatagtttggggatcgcaagagcgcagtcttccattttctatttccctttctagaaaattggtaaatgttttcaaatctcggctaggtctagaatctgcgcgattgaacatttctgggattaaattaccacgcgatcgcaacatcatcaaacgtggcatgacttgacgattaaattctaaaatctctagactcatatctataagattttgtttcagatttccttttcctaccaaagtatcaagtttttttccccaaggagatttttcaggtattcccattgatgcaaagaaaagttcttctttagtggaaaagcgtttgaaaatagacgcttctgaaattccagctttttgagcaatttccaaggttgaggccccaaaaccttgctcaagaaagatttcacgggctgcatctaatatttgctcattggtaatttttggtgtccgtggcataaataagtatgttattacttattaatataacaaattttcacaattaatgtcaattgggaattgggttattcatccaatcaccaatcaccaatcaccactattctgtaaaatttacctgtcgtctacggtggaaatcgtctaagctaacggtaaagatgaattgatttgtggctaagaggcggtagtgtgccaaaacaccttaattttatttcttttctaattgtctgtggtttatggaatctgccccaagcagttcacgcacaggcgctaatacctcatacagtagagattgatacagctaagttagagaagcagggtttgagcttggctcaagaagctgctgaattagctcagtttcagcaaattgatatggccttgccaagagcgaggctggcgactcaactagctccgaaaaatgataaagtatggttcctgttaggtggattacatctgcaaacaaaagagtttgatgcagcgatcgcagctttgaaaaaggcacaaactctcaatcccaaaaatgcggatgttctttttgctataggttcagctaattttcagaaagaaaattatcaagcttcagccaactattatcaagctggtttgaagttacaacccaatgatccagaagggttgtttgatctgggtaatgcttattatatgctcggtcgtttaccagaggcgatcgccaaatttaatgaatctgtatcccaggataaaaaattctggccagcagttaacaacattggcttaattaaatacgaacaaggggatgttgaaggcgcaataaagaaatggcaagaggcaattgctattgacaaaaaagcagcagaacctttattagcactagcagtagcactgtatactcaaggcaatagccaacaaggtttagcaatagggaaagaagcactccgcatagaccaacgctatgcagaattagactttcttaaacaaaacctttggggtacacgcctgttaatagatgccaaaaagttcttggatttacctcaaatgcaatcagccctatatccacaggaagatgtaatcatccccgatccaccgactgcacagtagattctttccgatacaaaaaagctaactaatgctaacaaaagtgggctttttcttcctgcttcatcctaaaagtgtcggtactatctatgccaaatcttgatgggtgaacgttgctaatatcagttatcaatactcaaagctagtgtttggggagaagttccatgatttgctcaacaaattgctgatggtcaacaactggttttgagatgtagccatcagcaccactttgtttaagaaagttctcgcggtcgccttccatagcgtgtgcagtcactaaaatcacaggtaaatttgcggtttgtgggtcagattttaacatttgtgtaattttgataccatcaacagacttgccttgataaatactacgtgacagagaaacatccattaaaatcaaatcagcttccccagcttgggcaatttttattacttcttccacatcttccgtgtgttttacccccaagccaccacgtttggtcaaaatcttggaaaaaacacgagcattaatcagatcatcttcgacaatcaaaactgttttcatgagaatttaagaatttaaattagggtgaatatgggaggattacaagcaatattggatttctgctttgggattttcgatgggaaagtgttgatggttaaggtgtttccacaatttgcaacagtataaccgctaccaatttggtataagacgttatgcagccaataatatttgccacccgtttaataatcaatgtgtatctccaacatcaaggataatactacggttttttatcctctgagaatcaagattgtgtgaggaatgctatttcattggtaatgctgtggttgttacagtggtaagttacagcgatttttgtatagttagaattcagggaaaaaactcatggcacaacagttaaaccttctctccacgggacaggtaattccaacagccctgcacactgagatgcaacggtcttatctagaatatgccatgagtgtgatagtcgggcgagcattaccggacgtgcgtgatggcttaaagcctgtgcatcggcggattttgtatgccatgcacgaactcggtttaacaccagatagaccttatcgcaaatgcgctcgcgtagttggtgacgtattaggtaaataccatccccacggagatcaagctgtttatgatgctttggtcaggttagtacaggatttttccagccgttaccccttattagctggacatggtaattttggcagtgtggataacgacccaccagcagcaatgcgttatacagagacgcgccttgcaccagtgggtcacgagggaatgctggcggaaattggcgaagaaactgtggaatttatcggtaatttcgataattcccagcaagaacccactgtattacctgctcagttaccatttctcttacttaatggctgtgctggtattgctgtgggaatggctacaaatattccaccccataatttaggggaaatagtcgatggtttaatagctttaattgataatccagatttaaaggatgagaagttatttgagctaattcctggacctgattttcctacaggtggggaaattgttggtaacttaggcattcgcgaagcatacactaccagtaaaggtgggatcgttctccggggtgtagctaccctagaagaagttatgccaactaggggaagtaagcgccggacagcgattatcgtcacagaattaccgtatcaagtgaataaagccggctggattgaaaaagtcgctgatttggtcaatcaaggtcgtttacacggcatttctgatttgcgagatgagagcgatcgtgaaggaatgcgagtagtcattgaactcaaacgcgataccaacccccaggatgtcctccaacatctctaccaccaaaccgccctacaaactacctttggcgcaattcttttggctttggtggatggacaaccccgccagttaagcttgcggcaaatgttacaggaatttctcaatttccgagaacatacccttaatcgtcgctacagttatgagttaggtaaagctgaaaatcgtttaaatatcgtcactggtttattaacagctttatctaacttagatgaagtaattgctattttaaggcaagctaccgatggtagtacagccaaaatgactctttgtagccaattagatttgagtgaagtacaagcggatgccattttagccatgccattacgccgtctcaccagtttagaacaacaaaatttacagcaggaatttagtgacctcaacgcgcaaattacctcattgcggagattactggaagaccgacgggaattactgaagtctttgaaaaaggatttgcgaactctcaaacgcaaatatggcgatgctagaagaactaaaatttctgccatcagcgatatcccagttaaacaagaaaagggcaaaacagaaacagaggaaaattccaaatctgaacaaccctcagaagaagctattttagaatttactcaacgcggttatgtacgtcgtctttctcctcatgggaagaagccaaaaactgaaaacagtttgcatgaaaatgacttcattattcaaacagcagtaactgataccaatcaagatttgctcatcctcaatactgggggcaaagtttaccctgtgaaggtgggagatattcccaccacaactggacgttctccacggggaacaccattaattaccatgcttaccagtacggctcaagccaatgtagaaggtattgttagccgctttgtgctgccagaagatcctgaaattaatcaaattgtactgctgacaaaacaagggcgcattaagcgtctggctttggaggaatttgctaatctcagtcggcgcggaattacgattttaaaactcaaagatgatgatgaattgtcttttactgagtttaccacaacaggtcaacatctgattttagccagttctggcggccgcttgttgcgatttgctgttaatgatgaacaattgccaattatgggacgtgcagcaatgggtttacaagctttccgtttggtaaaaaatcagcaaatggtcggctgtgcgaatgttggtaaagatgatcagttattgctggttactcaagaaggatacgccaagcgaatacccgccagcaatttaagagcagctaatcgtggtgatttaggtctacaaatcctcaagtttcataacaaaactgatcatttagcgggaatggtacgtgctatctctggtacagaggtggtaatagttactaacaaggagcgagtggtcagaatacctgtggactctgtgccgatgctagatagagatgctaagggtgaaagtgttttacaagtcaaccgagatgaggtaattatcagcgtttttgaggtgcgatcataaatttagaagtttagcttggaagttcagggtgacaacattcttgtcacctgttggctaatcaatttataagatttgttaaattatgttcacaaatctctacacaaacataaatcaatattgcatttctgaaaaaaattgttatattagtttacataaggcaataaagcttagtaaatatagtttggagtgcgaaccatgactaatgcaacaaaaactattacttctgtacctgaagatcgcaatgcttggcgttggggctttactccccaagctgaaatttggaatggtcgcttggcaatgattggctttttagcagcaactttaattgagttgttctctggccaaggcttcctgcacttctggggtattctgtaaattttgaaatgcaaatttttctgtaaactaaaaaacctggtagttaattacaaccaccaggtttttcagtttttaggagtcagaaggcaggagttcaaggagtcagaagttcaaggagtcaggagaaagataaatatttcctgtttcttgttttcacagtcaccagtcaccagtcaccagtcaccagtcaccagtcaccagtccccagtcaccagtccccagtcaccagtcaccagtcaccagtcaccagtcaccagtccccagtcaccagtccccttaccgaatatactccttgaggacgctgttacgattggggtgacgtaacttgcggagtgctttggcctctatttggcggatgcgttcacgggtaacgttgaaaatctgtccgatttcttccaaggttttcatgcgaccatcatctaagccgtagcgtaatctcaacacatctctttcacgaggactgagactatcgaggactttttctaggtcttcacggagtaagttcttagaaacttgatcttctggtgtttcgccatcagattcaataaaatcgcctaaacgggaatcttcttctttaccaatgggtgtttctaatgaaatgggcaactgggctgacttagcaataaaccgcagtttctcaatagtcatttccatgcgagtcgcaatttcttcttccgtaggtttgcgacccatttcttgagataatagcttggtagttttcttgatccgtgatatagtttcgtagaggtgaactggtagacggatagtacgagattgatcagcgatcgctcttgtaattgcttgtctaatccaccatgtagcgtaggtagaaaacttataacctttctcatggtcaaatttttctgctgcccgaatcaaacccaggctaccttcttgaattaagtcttggaaggataagccacgattcatatattttttagcaatggaaaccacaagccgcaggttcgattgcaccattttatctttcgcccgacggcctacgtgcagacgataacggaaagttggtaatggcagttgtaccgcttctgcccattccttaaattcgggttctcgttctaactgttcgtacagatgatcccttactctttctaattccagtaaatcagcgattttccgcgccagttcaatttcttcgtctgcgcgtaataaacgaatccgaccgatttcttgcaggtaaaggcgaatcgagtcttcggtaaagtgttttttcttgctttgtgtccgacgacgcgatttagcggcttttccagactttgcgtcgtcctcatcagtctgaggctctaaaaaatcatcaatatcgccgtcatcaactagcagtaagtcctcttcatcctcgattaataagagttcttcttcgatatcaggcgtatttatttctaggtcaggccgataatcaatatcgagtacgttgttagcctggttcatgccgcgttcctcatgctccttgcagaatcaattactcaaaatgtggttactgctcttgtgatcgagctttttttcaccgaaatataggcttttggctaatttgcctatgatctttcccatttcctctcaatggaggcgcagttgtttactttaatggcaaaaatcacttttatgtgagttgctctgaaaaagtaaaactaatcgctgttgccgttatacacaacttctgattcactggtctaaaaccagatgcaccttaatcaagaaattaaccacttcagacataatggatatgactgcgggcagatttacctgttaagactgttctgattgtagcctgtttcacagaaattgtaatctttttgtgtgttaataacgaactcatttactaagatgaagccacttttatcaaaaagacattaaaaacggtagtcacaccattaaatcttgttggaaactttttgaatttgcagtggcattctcattagattaaaaggtaggcgcacttgctatggggagattttcaaccccaagtaaaacaatagttttctgagtttcctggcaacagcacattggaggttcactcaagtgagcagttattgatgcacccccatgtttaccattccttcataaattacttatttgagatagcaaaactaggttaaccgctgagtatatagggcaatagtgtaacagtggtgatgcttgtttccaaacaccaagccttgtatatgctatgttcataacctgaactaaggagttaaggttttgggataataagccgattgacagatgaatttagagttttctcttttcggccttattaacacattagcgcaatgtgaagatttcaaccctatgcagcttgacaaactgttcctattgtatacaaagatattttaatcagtcgagaaataatttgtcattggatatgctaaacaatttacctacttatgaaaaaagtgcatcggatacataatacaaatcgccagctttcagctatcagtaagtggcgacgctatgctgccttcggagctttcgctgttttcgctacgctaacagcaaatctatattttttaccatagcggtatatgacaatattggcaaatttattgttagtagttttcctgtgcgaaggtatatattagcaccttaatattttaaatgactgctatttttatttgccaagcagggtatttttacttgttttataagtattttataagtatactacatttattttccaaaacttgcttcattataagaaaatcgagtgagccaaaaccacgcccgatcaattatcagaacttggtggagatactttatcgtacttgaggcggtggatgtgggcgaacggcttgttaaatactagtattttaacacagctattagtaattaatctcacccatacatccattggatgtagggcgagttatataactagattcaagataacaaattagatatctagatctgtgaggtttagtttagaaccataggtttcaataaactcccgtctgggtgcaacgcgatcgcccattaaaatggtaaatattcgatctgcttccgctgcgtcttctatctctacttgttttagtgtcctggtttctgggttcatggttgttgtccacagttgttcgggcatcatttcccctaaacctttaaaacgctggatggtatagttagcgttagctggtaaggtagcaatgtgttgttgtaattcgcgatcgctataacaatactggtagtttttgcccctttctactttatatagtggtggacaagcaatatagatgaaaccttgttcaatgagcgatcgctgatagcgatagaagaatgttaacaacaaagttcggatgtgcgccccatctacgtcagcatcagtcataattaccacacgatgatagcgtaattgtgaggcatcaaattcttcacctttaacgcctaaacccaatgctgtaattaaagattgaacttcgttgtttttgtagatttttgcgtcgtcggttttttcaatgttgagaattttaccacgtaggggcaggatagcttgagttcggcgatcgcgtccttgttttgcgcttccacccgctgaatcaccttccacgatgaatatctccgattcggcggggtcacgagagctacaatctgctaatttaccgggtaaaggggatgattccagtacagactttcttctaactaactctcttgcgtgacgtgctgcttctgcggctttaaaagcttgaatagccttatctagaatagaatcagcaacagtaggatgaaattctaggtattcagtcaggacttctcctacgaaagaatcaacaataccccggacttccgtattaccaagtttagttttagtttgtccttcaaactcaggatcagggactttaacggaaataactgcggttaaaccttcgcggacgtgttcaccactgagattagattcattttctttaattttattccgcttgcgggcggtcgcatttaaagttctagtcagaacagtttttaaaccttctaaatgagtaccgccgtcaatagtacggatattattagcaaaacctaagacattatcagtataggcatcagtacaccattgtaaggcaacttccacctgaacattattcctttccccctgcacataaataatttcttcgtgtaaaggttgtttttcccggttcatgtaggcgacgtattctttaataccgcctttgtattcataagtttctaccttgggtgcatcacttttgataacttctaaacgatgatctgtaaaggtaatttttacacctgcgttgagataggctaactcccgcagacgacctgctaaagtgatataatcaaattcagtaccagtagtaaaaatttgctcatctggtttaaaagtaacagaagtaccggtctggggttctttatgtggttttgcttgcagatcagtaacaggtatacccctttcatagcgttggttatgtaccttgtgatcacgccaaacagttacttctacaaactcagaaagggcgttaacaacagaaatacccacaccgtgtaaaccaccagatactttgtagccaccgccaccaaacttaccaccagcatgaagaacagttaacaccgtttccaaagctgattttccagttttcgggtgaatatccgtaggaataccccgaccatcatctgtaactgtaacagaaccatcagcattgatatccacttcaacatgagtacaataaccagccaaagcttcatcaacagagttgtccactacctcgtaaactaaatgatgtagtcctcgcggtcctgtagaaccaatgtacatccctggtcgtttacggacggcttccagaccttccagaacttgaatctgatcggcactgtaactgctcgtcatgaaaattctcctgataaaaaggggtttaattcgccaaaaggctaaaaaagtaaaatcaccccaaaattataacacaaaagccttaatgccgtctctagagcaatttaatagcaaatttatatagggggtggaataggctggggactggtgattggggactgatgaagattaatataacccaatgactaataactaattactaatgactaaattaattgtgatttgtggtgcgacagcgacaggaaaatctggattagcgttaagtttagcagaaagattaggttctgtcattctcagtgctgattcccgtcaagtataccgcgagtttgacattggaactgctaaaccaacgcgggaagaacagaaattaatcccccattatttgattgatatctgtgaaccgactgaaacaatgacagtagcagattatcaggaacaaacacaacagttaatagataatttgggagtttctccattattgttggtaggtgggacaggtttatatatacgtgctatagtgcagggaatgaaaattcccagagtttcaccacaaccagaattgcgatcgcaactagaatcattaggtcaacatcaactttaccagatgttaaaacaagttgatcctatagcagtgcaaaaaattcatgctaacgatttagtgcggacattaagagcattagaagtatattatgtcacgggttgtcccatgtctgaacaacagggagaaaaccccccaaattatccaattttacaaatttatttagattgtgaaccagaaattctagatgtgaggattcgccaacgtactgaacaaatgatagcagatggtttagtgggtgaagttgaatatttatgtcaaaaatatggtgttgatttaccattattgaatactttaggttatcaagaaatcaaacagtatttagcaggagaaattaatttagaagaagcaacagatttaatagctttgcacacacgacaatttgccaaacgtcaacgtacttggtttagacaaacttctaatttggaatattttaatgttgcggattctgatttattagaacaagtttgggaaagaataaatgagtttgtctgattctgacaaaaatcctaaaaaaccgaaattcaaataaacaaactaggagaaaccttaaaatattctcccaaagctttagcttgtgctttactaatggaacgtttaccattaaccatttccgaaaccacaccactactagaaccgagaatacgcactaagtcagcttgacgaagtccactagattccaggagatgttgtaatatttcatgaggtgtagattcatccattggataatgttcttcctcataatcttcaattaatttcacaagcaatttatctaattttcgctcttctggagtcagatttttcttaaaagttagaaattcagcaacttttaaaagacgttcatactcttcctcagtttcaattacttgaggagcgacctctgctagtaattgactataggttttattatcaaaagtaatcatcatttttccatttctctttactatattcagcgtgagttagcaagtatttgtagaaaaccttttgtgttgcataattaatcccgacaattaaacggtaatcattacctttgatattgaaaacagtgaaattaccaactgcttcagtatcacggtaaactttacgcacatcctctaaattttgccattcagcttttttaacagttgtattccaatcttcaatttgttttttgatatcaggatattttgctgcatcattgcggagggtgcgaatggaaattaagtgcatagattttgggtttagtttttaactttttctgatttgtgtatgtgtagatcatcgttccgctttcacttttggtttataacgaaactcattatactctcaaaatgaaagcaaaatgtcaatagtctatcaaacctgacgaaaaatctctcttaaaccctcttctcttcgtatccttcgcttctacccttcgggaacacctccggtgaacgtggttaaatctccacaaactccaaaaaaacccgaaaaccctcttctcttcgcgtccttcgtgtcttcgtggttcattcctcaaaaacccttgacacccaacgacaatcaaggtataatacacatcaaatagaaggggagtagctgctggcaaaagccagtgcatctgaatcaacatactggtgatgagcctggttcagatggcgaataataaagtatttgaaagcgagaccttcactgagttcacacaaaaacagtgtgtgagcttcagtgaggtcataaaaactctcattagaagctccacacaggtaaaaaatcctacaggagcaacagagagtgttaacagccttcaccgcaggtttattattaattaccatatccgaactaggtgataaaaccttttttatcgccgtcattctctctatgcagcactccagaaaaatagtgtttgcaggggtaacagcagccttagcagcaatgacagtattatcagtgatatttgggcaaatactgtcagttttaacacaaggttcaaaaatatatgtacactatgcagaaatagtattatttattgcctttggtttaaaactgctttacgatggctggaaaatgccagctaaagccgatgaagaagttatagacgaggcaaaagaagcagtagaaaaggcggagttagacagtaagcagaaaagtacctggtcaatattactgaaatcttttgtattaacatttatagctgaatggggcgatcgcacacaaatagccaccatagccctagcagcaagtaacaacgccataggtgtcacagcaggagcaatattaggacattcaatttgtgcagcgatcgctgtcattggtggtaaattaattgcaggtagaatttccgaaaaacaaataaccctcctgggaggcattttatttattatcttcggtatcgtcgccgccatagaaggaaactaggagacaggaggcaaaaggcaggggaagaagcaggggagcagggagcaggggagcagggagcagggggaaattatttgtaagctgttgtgcatttaatttgtataagtggaacaggcatcttgcctgttaaacaagagttcagaatattaggattatacaatttagctgtgtaacagcttatttttcccaatacccaatgcccatcctcatggactcggtgtactttccggtgatgctgcgggggtaggactaggcattgctgctgccttgttaatttcatctttatactgagcaggagctaaagccgtagcactatcaaacaaaggttttgcttcatcgagcttaccctgttcttttaaaagcatcgcctttgctaacacaggacgaaaatcttgaggatcttttttaattgcttgctcgtataaagagatagcttgagtctcatttttctgtaaagcgtgaacactgcctaaaagtatctgtacagcaacaacatcaacacttccagactgaatggaatttgcttgagttgctgtagataaagtttcttgtaacaagccaatagccgcttctgggcgctcttgactgagttgtaaatttaccattccctgtaaagccttgagatcaccgggtttggttgctaaaatagaacgataagtttgggctgctccttcattatcgcctatttcctgctttgtttgtgctagtaaaaccccatactccgactgctgtggattcaatttagccaacttttccaaaggttcaattaccgcttggatatcagcatttttaacttcacctctgcctttttgattgagtaattgtaaccttgcttgtaaaagacctttaagtgcagcttgattttcaggttctcgttgcaaaactagctccaaaccgcgaatttcatctgctaactttgacttttgctgagataaactagaattagtagagttgctgctagtattttgtgctaagggttgagaatcattgaaagccccaatgatgggtataatagaaaccccaataaacgccgcaactgccagaagtaagacaacctgaattatccaccgattacgtggttgagacacaatttttttccttttggtaaatttgagggaaataaatcgaaattaatgaaattaatatttacacaaagcacaaagttaaaattttccaaaactttgcggaatacggttatttcactgtgaattttataacaaaaaactatctagactgttaaagtaagtgatgactttaggaggagcattcagaattatagctatgctatgcttccgaaactagagtaaaggcgctaaatgacacatttagtctctaaatgagaaatttcgcgcctttgtgttcgcacaacccactctataatggccagattaaaaggaaatatacttttatcagccataaaaacgctctttccatctgcttttgtcaaatcccataatgggatgtgtctccgccgcaaggagtttttatgaattccgacctgatgccgtctcctgaatcttccaattctacagcctctaaccaggctccagctaaaattgacttaacagctaagtcatcaaaaccggatagttcacctgttaaacctaacgagagtgatattaatgggaatttggctcatcgccaacaaccgatcccacctccaagcgaaccattgcagtaccgagccattggtttagtccgggggcgctactctcccagcagtgaacagtttacccaaggaacactgatcacatctgatggtgtggagctaaatgccgtccttttagggcggattatgagtttagtcaaaaatcacctggacttagaaaaacaacatctctgggtagtttatccccgcaccagacaagaaaatgactcactacacatccaaattgttggagtttgggaaccagaaaatctggctaaaaattccccagatgaggatggcaaaaaatcgggttcacaagctttagagagacccgaaaatggtgctgccaagaaatctactcgccaaactgctgctaaagaagaaatttcccagcccgtaaaagcttcatcagaaattcctgatggagaattttctgtgcgtggtgaggtagtttaccaatcttttgacgctaagagtttggtagttaaaatcaagcaagctccacggaaaccaactgacaaacccaagtattttaagttgaaaatgcggggtgtgctggctaccaaagctgtgggcaaattttgggatttcaaagtcaagcgcgaagctgatgtattgatagtagaaactgctgaagcgatcgctgatttacccaaaaaacgcaaaccaccattcaaaggtggaccccgtgctggtggtggcagaaaaccatttccccccagacgcgatggagaaactccacgtcccatcaagaaaataggtggagaaacctctgcggtgtctaaacctgtaccaaaaacacctgctcctaagccagtgaaaaagccgaaacctcaagaatagaaactggggactgggg

SEQ ID NO: 12 - DNA, 95010 bp, Sphaerospermopsis sp. LEGE 00249
  LEGE00249_21
caaaaagactaccaccatcattgcttggttttcgcgtcggcaatagtctcaattcaatacttgatatcaccgtattatatatcaagtagttgattttttcctaaaaatatattgatttttgtcaatacaagtatagttttgtctatgaaattgtcaacttaggacttgctcacttctttaataaaattccttcctcttcccctcttcccttcgcgttcttcgcgttcttcgtggttcaataactttgcgcctttgcgtctttgcgtgagaaaaaataggggcaggaaaacccacccccataaaaattaagtcacaccaaaaacgatcaccaagcccagaacagccccaaaaacaattaaggcatagaactgaacccgaccgctttccaggtacttcaaaccttcaccactaacaagagtaaagaaaccagtcaaattaaccgcaccatcaacaacgcggaaatcaacttccatcacttgtcgagcaacacgacgcaaaccaaggacaaatacctgatgataaatatcgtcaaaataccatttattcaacgataactcatacagagatttgatcttagaagcgatcgcactggggtcaattttccgagccaaatacatcagcacggctaaagtaatacccaccacagaaatagccacagaactacccgccatcacataaaactcatgggggtcaaattccgcagctttttccattacttcagctaaggtttcattaggagagtagataaactgctcaaaataattagcgtagggagtacccaccaaaccgatcaaaatagaaggaacagccaaaaccaacagaggtagagtcattgtccaaggagactcatgaggtgaactgctgtggtgtccgtgaccatgactttctaactcaccttttttcattgctcctggtccaaaattaggttgtaattccaaacctaatttagcagcagcagcatctttgagcatggttttgattttctcatcattaccccggaatttgccttcaaatgtcgagaaatacattctaaacatataaaaagcagtaatacccgctgtcacccaaccaataaaccataacagagggttagcagcaaaagccgcaccgagaatttcatccttagaccagaaaccagcaaagggaggaataccggaaattgctaaacaaccaataaagaaagtaaacccggtagcgggcatatattttcgcagtccacccattaagcgcatatcttgagctaatacggcatcatggcctaccactgcttccataccgtgaataactgaacctgaacccaagaacagcatcgctttaaagtaagcatgggtcatcaggtggaataaacccgcactgtaagcgcctacacccattgccatcaccatgtaaccaagttgggaaatggtggagtaagcgagtccttttttgatgtcgttttgggtaatagcgatagtcgcgcccaaaaatgctgtaaatgccccagtgaaagcgatcacgttcattgctgcggggacgtgttcaaatactgggtacatccgcgctattaggaatacaccagccgccaccattgttgctgcgtggatcagggcggaaataggtgtaggaccttccattgcgtctggtagccagacatggagggggaactgggcagacttggcaactggaccgaggaagaccaaaatggcgaagaggatagccaggaaattgctgatagaaccagattctactaattcacccaggcgatcgcccatgattgtaaaatcaaagctgcctgttgcccaaaatagacccaaaatacctagcagtaaaccaaagtcaccaacgcggttagttacaaaagccttttgacaagcatccgccgccgccttgcgatcgtaccaaaaaccaacgaggaggtaggaacacatccctaccaattcccaaaagatataaatttgtactaggttgggactaaccaccaaccctaacatggaagagccgaataaactgagataggcgtaaaaccggacataaccagggtcatgcgccatgtagccatcagtgtaaatcatcaccaaaaaggctacagttgtcacaaccactagcatcatagctgtgagattgtcaattgtgtagcccatcgtcaagtgaaaattacctgctgctgcccattcaaaggtacgcagataaggtgcatgaccttggtattgactccacagcagagccatagacagccccatagctgcgcccatcagggagataataaccacagcgtttagctgtcgcaggcggtttgttacctgatttaacgagattaaccctagacctaccagcattgctcctaataggggtaatactggaataatccaggcatactgatagattacttccatcactcacgcctactttgaaaattattgacaaattaaggacaatgctgtaagaatattcttcttaggctaaattgtccaggtcgcaactcctaataattgtaagataacgccaatagtcattaaaaatatagtcaagtatttacagctttcagaagattagacctgaagcacaaggtttgctgaacaagtcctgtcgtggagacagggaacagggaactcttaacagggaacagttttagctatctgttggtaacaaatttttggatttcttaaagccaaaatgcagggttttttaggtctcagcttcaaaaatcttgcatttattgaaaattaaaatcgctaaaactcttttccactcccggttttacatttatagaacttacgcataaaccaggtttcttgacgattgatgcgtaagtccagatttattcagcaagccctaaatatattcactttttccgaaagaaaatataaaaacccttatcagatattgtgagaagggtttttaattttgttaagtttgttaaggataatttaatatttgaatcatggaaaaaattggggatgaagtaagctgttgtgcatttaatttgtacaagtggaacaggcatcttgcctgttaaacaagagttcagaatattaggattatacaatttagctgtgtaacagcttaatgttgatataggtaagctggcgttaacaattgtcgttgtgacaaggtaggaggcaagggcaagaagaagcagggagcagggagcagggagcagggagcaggggaaaattatttgtattttcccaatcaccaatcaccaatcaccaattaagcagagcggcactctaaatcaggcattgttgttatactcaaggtgttatggttagtcatgcaactgagttgaatttcttccagcgcttgacgtaaatcatctctgctgcggaaaccctcaaggcgttgtctgatcacacctttttcaattagtagtaaagttggtagtgacttgagacgataggtggtagatagcttgaaattttgatcagcgttaaccgctacaagtttaattccgttgtcgcactgagcttgaaattgcagcaacaatgggtgaatgatgcgacacaagccacaccaaggagcctcgaaattaactaacacaggaattggagattctaaaacttcttgagtaaatgtccgctcactgaccgacaacaccatgacgcctcttgatttataaggtttttatatcaaagtaactaccactgatgtgagttggcaagtcagtatcattagaatttgctgacaaaaaagccagcgcgattaaattcacggtagctttttttggtgtttaactttctgactgccgtttcctccccaggaaagtcaagcgaccagcaaatcccaatattaaatctcaaaccgactgaggaaacccacactgacagttggtttaattcatcttacattgatttggtggtatttgataagcgggaatttggatgaaattagtattttatgttgatcttggggatcacttaaaactaccacgatattctactggtggctacgattaataaggggtgagaccaccagagtaaggctacaaaaatggcaactcccaagtaagctggacgaataaattcttgccatttcagagcttgacgaccatcaaaaactgcttgaaagggaataattgaagtgcgttgtttgactacttgaaaagcttctccatagcgtttgctcaaacggcgatcgccatgccaaactccaaataaatggtgtaccactaaacctattgatgtcaccaaagtaaagcttgtacctagccacagagtatgggcaatacaccaaataacttgacccaccatttgcggatgacgggtgatacgaataatacctgtttcataaagatgaacttggggcttttgaatagccgcaatttctagtagattgaaggtagcaggatataaaaataaaaaggaaattgctgatagtacccaaactactggtttcacacccggtatatcctgcacttgccacagttgccaaccatcataacggtgattaaaaaagtaagtaattaatatcactgctaaaggtaaactaactaatgcaaacaaaatgcgatacaaccttggtccgatgtatttttcagcccaaggacgcaaagcagcacctccgctgtgggcgatcgcaaaaactaactgtaaccccagcatcacaagatgactgctggtgaaccaaggactagacatcatagacacaactcaatttccgatgaaaaattcaaaattgaaaataaaagcagctaatattggtaattatcttgactaataattactagatggtaaaagccaagatagttgattgcacccttaacagtttatacacaagaggattttttgcaagatgttgtgttaatttctttttcggatcacgtttttaaatgtcatatttaaatgtcatagcagttttcaggatcattaggagcagtgtatattttggaatctttgtcaaacaagagttttccaaagctgactactgactactgactactgactactgactgctgacagctattacaatgccataaatcatgcctagcccaaaagctatagaccttgatttatttttaaagctgctccttcccaagtttgtgggttaagccttatgtctgaccttcctttcactttagatcagttacgcattctcaaagcgatcgcacaagaagggagcttcaaacgcgccgctgatagtctttacgtctctcaaccagcagtgagtttacaggtgcaaaatctggaacgccaactggatgtccccttatttgatcggggtggaagacgcgctcagttaaccgaagctggacatctactcctcagctacggtgaaaaaattctcagtctgtgtcaagaaacttgtcgcgctattgaggatttacaaaatctccaaggtggtactctaattgtcggtgcttctcaaactactggtacttatttgttaccgcggatgattgggatgtttcgtcaaaaatatcctgatgtggcggtacaacttcacgtccactctacccgtcgtacagcttggagtgtggctaacggacaagttgatttagctatcatcggtggtgaaattccctctgaactagctgaatctttggaaatcgttccctacgcagaggatgaactggcgctgattttacctacattccatccctttgccaaactcgataccattcaaaaagaagacctatataaattacaattcattgctcttgactcccaatctactatccgcaaagtcattgatcaggtactagcacgttgtgatattgataccagacgttttaaatttgaaatggaactaaattccattgaagcaattaaaaatgctgtgcaatcaggtttgggggcggcttttgtctctacttcggcgatcgctaaagaattacaaatgggtgtgctacactgtacacctattgaaggtgtggttgtcaaacgcactctttggttgattgttaatcctaatcgctatcgctctaaagccgcagaagcctttagtcaggaaattttaccccagtttgctacccctggatgggatggagatgcgttaaaattatcacaaaaaaatctgatgttaagtacattagaaatagatacatcaacgtctatttcatctgatccagagtaaattttttgtcagtagtcagtagtcagtagtcaaaggtgtagatagctaatgactaatgactaatgactggtgactcatgactaacaactaacatggaagtttactgcactcgtcctaactgccccaggccaatcaaccatttcgcggatttagatgatgttacaactttaaaaacaacccagcaaaaatactgcattagttgtggtatgccactacttttagatggtcgctatgtacctactcagttactaggtaagggcggttttggtgccgcttttttggcacgcgatcgccgtattccgggaatgcgctcctgtgtggttaagcaattccaacctgctgggaatttaacacctactcaactacaactagcacaacaactctttgaaagagaagcagaagttttagcgcaaataggcaatgaacatgagcaaattcctgacttatttgctttcttccctgtctctgtgtccagtttaccaccaggaaaacaagagcagtttttttacctcgttcaagaatatattgatggacaaaatctagaagaagaattactgcaagaagggaaattttcagaaatcggagttacacaaatactcacagaaattctcccagttctcacttttatccacgaaaaaggcattattcacagagatattaaaccctctaatattatgcgtcgtcgggatggtaaattatttctgttagattttggtgctgtaaaacaagttgctaatgttcctggtgcttctactgcttctacgggaatctattctctgggttttgcaccaccagaacaaatgtcaggaaatcaagtatttccttctacagatttatacgctttagctgtgactgtgattaatttattaacaggacaggaagctagtaaactttttgattcctatactaatcagtggaaatggcggacacaagttactgttaatgacagactagctgatattttagacaaaatgctgctccctgctgctagtcaacgctttcagtcagcagcaaaagttttacaagctctttctccacctgctcctagtgtaattcctacagcttcacctccacaaatacaaacacctccatcagtaccacagggacaaaaaatacaaccacatccatcaacccaacctccaacaccaataccaccaccactaaaaccaatcccactacaaccaaaatttgctacttgggaattattagctggggcagcttttagcgggtttgaaggagcattaatagcgatcgcccttttcagcttactcaaaaacccaatcatcactatggctatttctattgtgattttgagtggtttaatttttgctcaaactcaacgttggttggaaaaatttgacttattaattatccccgcaattacttttgcaattatattttttatcccctttttacatggtggtattgttattcagaatgtggttattttagcatttgcttcagctttaatagctattgcggtaacatcaatatttcgtttgatttataaattaatatcttcaataatttagatagtttggtttttcaaaagtcacttaaaaacaaaggagtcaattatgttacaaaaagaagttaaagtattactattatccttattattgacaagcggtgtactaggaattggtatatggttatttttagggcgaattttgccaataactagtgtgaacacattagaaaataatcagaaaaaaaacaataataagctgttatgcctttaacttgaataattaatacaagcaagatgcttgtgctactgtaacttcaggttttttaattatacagtttagctgcatattagcttaatcaatcagaaacatcagttaaagaaaggattagttttggggaaaaaatatttaggactggtgaagcttctgcatttaaaacagatggggctaaagcaatagctaataaaaattatcaacaagcgatcgccaaatttacagcatctttaaaattccaacccaatgatccagaagcactaatatatctgaataacgcgcggattggatctagcaaaaactatacaattgtggcaacaataccattagccaataatcctaatactggtactggattagaaatactacgaggtatcgctcaagcccaagaggaaattaatagtcaaggaaaaattaacggagcttacttaaaagtcggcatagctaacgatgatgataaaccagaaatatctaaagaaattgctagtcacttagtcaaaaacccagaagtaagctgttgtgcatttaatttgtataagtggaacaggcatcttgcctgttacacaagagttcagaatattaggattatacaatttagctgtgtaacagcttattaggtgcaatctgctgtagtagcagtaatgcaacattaacggcaggtaaagtttatgattctggaaaacttgttgctatttcccctaatagcagttctgtgaaaattaccaactttagcccttacatttttagaacagttcccagtgattttatcaccgctagaactttagcaaattacatggtgaaaaacttaaataagcaaaaagcagcaattttctttaattctcaaagtgattatagtcagtctctaaaatcagagtttgtttcttctattttattggaaggtggagaagtatctcaagaatttgatttatccaaagccgattttagtgctgcttccagtgtgaaacaggcaactgaacaaggggcgcaagtattaatgttagccgctaacacaggaattgtagacaaagcattgcaagtagttcaggtaaatcaacagcgtctaaaattactggctggtaatggtgtgtatacactaaaaaccttagaaattggtagagaacaagcagtaggaatggtattagcagttccctggcatattcaaggtaatcccaaatcggaatttcccaaaacatcccgaaaattatggggtgctgatgtgagttggcgtactgccctagcctatgatgccacaaaagcttttattgctgccttaggaaaagatcccacccgttctggtattcaaaaaactcttgtatctcctggattttctgctacaggtgctggtggtgaaattcgctttttaccatcaggagatagaaacacctcagtccaacttgtaaaaatagtccctggtagtcgatctcgtactggctatgactttgagccaatatcaccaagaaattaaatcaagaattaaaccgcgctcaaaaacgtggattcaaactcaatcaaattcctgtagcgattgatgggttagctgtagccgtaaacccgaacctaaatatcccaggattgacaatagaccagctaaaatccatctacacaggcaagattaataattggaatcaggtgggtggaccaaatctaccaattaaggcatttacacgccgtgttagtgatggtggcacagttgaactttttgtccaagacattttgggtggtcaagctttcagttcccaagtcgagtttgtctctacgaccacccaagccttaaaaaaggtggctgatagtcctggtggcatctattacgcttctgctccagaggttgttcctcaatgttccattagacccttacctttgggacgcacggctggggaatacattcctccttatcaagaaccattgattctccctaatcaatgtcctgaaaaacggaatcaattgaacattcaggcttttcaatcaggaaaatacccgattacccggaatctgtttgtagtggttaaacagaatggtcaaactggggagcaagtcggcgttgcttatgctaacttactgctaacagagcagggacaggaactaattacccaaactgggtttgttaaaatccgctgacacctgctagtcatcgcttctaaaatttccagaaccagattaaacacttcacttggcttggtgaaagtgttttagctcgctctgttaattgactctgctggcaagcaaatcagattatccccttgggtgaggatgagtccacgttgacgcaatttacccatcaagcgagtaacggtgacgcgggtagaaccaatggcgctaccaatttgggcatgggtgagagggaaaggtaggcaatagccgcgaataacatcgggatcggtttcgctcattgctggttctccatattcctcaattaacaaggtgaggaaacctagcagtcggtcaatggtacgtcgttgtcctaaagcacttagccacaatagcttgcgctgatgttgatatctaaaggcatccatgacttcacgacggaagtgaggccagttatccaaatcatgccagtacatccacagcaccgcagtttggtcaacgtgggcgtaagcttggagtgtaaagggggactgagcgacgatttcaaatggttgtcctgcgcccacaaaacccaaaaaggcttcttcaggggttctgttaatgcgtcgagatgttagctggctggcagtagcacttacttgggctgttcctaccatgcggattgcacctctctgcactaaatacagcaatccgggtctggcgggaatgcgctcatctttgctgaaggtgcgacagcggtagtgttcttgcgcccagtcaagaattcgttgccaagttaagaaaggccgtgatgcctcggaaaaagaggattgagattgcatagttaacaaagagcgttcggctaaaaacaaagactaaataaaaaggtgcaaggagtgtctttgtgttaacagggtaggctgaacacccaacagcgtcagccatccaaagtgtagaaagcgaattttgccctctactcttttgttatacttcttactgtacaatgagggtagtaaagtttactaatcattcattgattattcacgaaattttatcctactctcatttttctttacttagactaaacttctatctaaaggtggatggaacaggataaaatcgtgataaccgcaaaagtttgctaaataactacgtgcaacattggctactatttaagaagtatacctcaattaaacaaatagtctatatccatttaataaatttcctcagtgtttataccaaggatgagaaaattctatggataaaaaagggaaaactgcctctatatcaaggcacagatggtaaaaaaattttatatatttctagtgtagctttgcaacttgcctcatctgataattcaaaagtaacaggtattatcagggcgattgctgctcatttggcagcttatggtgagctttttcacgttaaagttgttcctcctgctttgattcatatagaactgattgattctactttggcagtttggttacataatctaacagtcggtgaaactagcttagaaggaattggaggtgggggagatggggagacgggaagatggccagatggtgagaattacaacaataaattgtttaaaattcaatatgcccatgcacgctgctgttcattattgagattagctgatcgagagggattgattcaactgatagataatagtacagaagtgctaggtttgctgtctacccaaccgataccctggctagactgtgatcaaaaattgcgtctttatcaaggggatgaggtgcgtctgatgcacctgttggtaaaaatggtagatgatttggtattccctgattctaacacttcagttaactggatgaccactgcactgaaattgagcgaagcttttgaaagtttctggtgtaattgtcgcatctggggggaagtgaagattaattcattggagttagctcaggctaggttaggattgctgattgttacccagttggttttaaggtctgtattagaaagtaaattgggagtttttgcgcctgtggagttgtgattggggactgttgactggggagcgttgactggggagaataagatattacttcttgcctcatgactcctaactccggtctgggcgaagcattcgagcaaagaattattaattttgatcacaggttattttcctgtaagggcgaagcattcgagcaaagaattattaattttgatcacaggttattttcctgtaagggcgaagcattcgagcgaaaaattattaattttgatcacaggttattttccgaatgcttcgcccctacgactcctgaactcctgtgactgcaattgaaaaaatttgactataggtattgacgcgatctgtctcctgggatatattagctggtgtgtgaggagcgaaccagcaaggacaccgagacgaaacacggccagtcgtcggtgtcctttctgatgtttgggtaggattcaggagtcaggagtcaggagtcaggagtcagaaagtaggggaggaaagatttttcctagtcaccagtccccagtcacctgttaaagtaagaatttttctatggcgatcactactccatcatgttcgacactggctgtcacccacgttgctatcgcttgtactggttctggtgcgcttcccattgcgacacctattcccgcatattccaacatttctacatcattaaagttatccccaatagtcattacttgactgctttctattcctaacatttcttctgcaaggtaacggacagcagtacctttgttaacaaaaggatttgctacttctaggaaagttgcgacagaagttgtcatgtataattctgcgggtgtgtattgtaaacgtaaatcacccatcatttttctaatcaaatctactttattacacaaggctaaaaccttagtcgggatgttatcagttaatacttgccgcaaatcacctacaggaagaggagtaacaccacagcgttgagaatagtctgcagtatctgtagttatttctcgcacgtagagttgatcattaatatagaaatggactgaaagaagcgatcgccattgtggttgttcaaagtaatctaataattgataagcaatttccttggttacagttaaatgacggtgcagtttaccactattgggatcttgaatccaagcaccctgataagctaccaatggtaaattagactgaatatcttgatgaaagcgcaaagctgaacaatacatcctacctgtagctatagctacttgaatacctttagcttggactgctttaatagcttgctgtacagtgtcactgacttggttatcatggccagcgatcgtaccatctatatctagtaccagtagcttaatatcttttttattttcagcctgattgttgatagatgtcataagatgagcagatacattatttaataatcgtcccagtaagagagtaacaggcgatcagcaatagttaaaataggctatgttcccaaactcgactaattcagtgatttcagattctgcaactacaaccaatcctactattatccttgtagatggacattctttagcttttcgttcctacttcgcttttgctaaaggtagagatggcggtctgcgtacaaaaacaggtattcctaccagcgtatgttttggttttattaaatgtttattagaagtattaaaaagcgaaaatccacaagcaatagcagtagcgtttgatttagcagcgcctacatttcgccatgaagcagatgataattataaagcgggaagagcagaaacaccagaagattttattcccgatgtagaaaacctcaatgatttattaacagctttaaatataccgattattacacaaccaggttatgaagcagatgatgtattaggaactttagccgaaaaagctgctgctgctggttatcgagtgaagattttatcaggagatagggatttatttcaactaattgatgaaaaaaaagggattacagttttaaattttagtcctgaagctctaaaacgttctaccaatagtatcacggaatttcaagcagcacaagttcaagaaaagttaggtgttttccctacacaaattgtagattttaaagccctttgcggggataaatctgataatattcctggagttaaaggaattggggaaaaaacagcagtaaaattattaaatacttatcattctttagatgaaatttacgctaaaatagatgaaataacaggtgcaaatcatcaaaaattaattgcaggtaaagaagatgcactgcattctcaatatttagccaaaatagttgtagatgtacctttagaagttaatttagaagattgtcatttaaagggttttgatactgctaatttaattcccattttagagaaattagaatttaagaaattcttagaacaaatcaacgaactccaagcaaaattcgggggagaagttacagaaatcaaaaccgaaactatcaaaaataaccagattaatattgcatctgaagaagataatgaagtatggttttttagtgcggaagatacagcgaatgctgaaaaatatcatcatgaaaaaatgccaattcggattattgatacaacagaaaaattagaggatttagtgagcattttagaaaaatgtactaacccagaaaaacccgttgcttgggatacagaaactacagatttagaaccaagagatgcagctttagtaggaattggttgttgttggggaacaggagaaaatgaagttgcttatattcccgttggtcataaaataggcaatagtggcaataatttacagttagatgtagtattatcaaaactacgtccaattttagaaaatgcagattatccgaaaacatttcaaaatgccaaatttgatagattaattttccaatgtcagggaattaatttaacaggggtggtatttgatactatgttagcaagttatttgctaaatcccgataatacccataatttaagtgatttatctttaagatatttgggattacaactcacagaatataatgatattgtacccaaagcagggaaaaaagaaccacaaaaaactattgctgatattggcataaatacagtagcatattattgtggaactcaagtttatgccacatttcaattagttgataaattgcgaaatgaattaaatcaaataccagcattagagaaattattgctagaggtagaacaacccctagaaacagttttagcagaaatggaatatacaggggtgagaattaattccggttatttacaagaattgtctcagttgttagaatcagatttagcatttttagaagcaaaagcaatagaaattgctggagaaacatttaatttaggttctcctaaacaattgagttatattttgtttgacaaactcgctttaaataccaaatattcccgcaaaattcaaactggttattctaccgatgctgcaactttagaaaaactccaagaagttgataccacaggtttggttgatgcgattattgaatatcgaactttagcaaaattaaaatctacctatgtagatgctttaccagcgttagtacatccgaaaagtcaacgattacatactgattttaatcaaactgtaactgcaacaggtaggttatcttcttctaatcctaatttacaaaatattcccattcgtaccgcttttagtagacaaattagaaaagcgtttttaccccaatctggttggttaatggttgctgctgactattcacaaattgagttaagaattttagcacatttgagtcaagaacctgtattaattcaagcttatcaaaataacgaggatattcatacagtaacagcaaaattagtctttgaaaaagatgaagtgacatcagaagaaagacgttttgcgaaaacaattaattttggtgtaatttacggaatgggttctttaaaattttcccgttctacaggtgtagataaaaatactgccaatgaatttattaagcgatttaatgaacgatatccccaagtatttaaatatttggagggtgtaaaaaaacaagctatttctcaaggttatgtagaaacaattttgggaagaagacgttattttgattttactactaaaaccttgaaagagttaagaggtagaaatttagaagatattgatttgagtaagttaaaaaatttgggtgcttatgatgcggggttattgcgttctgctgcaaatgcaccaattcaaggttcgagtgcggatattattaaaattgcaatggttagaatacatgaagttttaagaagatatcaagcgcggttattattgcaagttcatgatgaattagtatttgaaattcctccgcaagagtgggaagaattgcaattacaaataaagtcagtgatggaaaatgctgtgagtttaagtgttcctttggttgttgatgtgcgtgcgggtgataattggatggaaacaaaataggttttaggtgacaggtgacaggtgacaggtgaaagaaagaaggcaaaagttgcaaaattaattctttctcctaactcctgactcctgctgtattaattccggcaaaatttcctctggttatccagttctggatgttgccaagaataggcaaaatgactaactgcattaatttgaggtgcaaatctccttaaagctgccatttgttgttctaaaggtggacggccagttattggttctccccatttaccagctaaagcaggaataacttttgtacctggttgcgccatacttaaaactctttgcacttggtccataatacaattagcatttccacaagtcgcataggacataggatgccattctaaagtattaggaaatctatcccaaggttgtaaacgggaatcataaccttttcctattgtttgattaccttctgggaaaaatactactcccgctggaatattattttgtgtggctggataactagctagggcaacaaaatctaatataccttgcatggcgtgagcaactgccaaaagccataaatctgtttgtaaaattggttgtttatcgtttgctgtgagtaatgatttttctgcaactggaggaatacgaccttcccacattggttcatcttcttggggataaagttgatcaacttgtcctatatctcctgctgtgatgtatcctttacttaaaaaccggcgaattaattctagtcctttattatttttggcacgacgcaataaagcttcttgaattgccggagtaaataaccataaatcgccaacttttgtagctatggaatcagttccagcttgtcggggatagcgtacatagtctaataataagccatcaggacgacgacgcattatttcttgtaccatgcggtaaaaatcggtttttgcttgggtgttataggggtctacaaatacttgggaacggttatctacaacttctatgctagtttgaccttttccattacgagcgatcgcatcttttctactctcaatttgaccataagtgtagccaaaatttattgtaaacatccaagcataaacttttaatcctcttgcttgtccttttttaattccttcagctaataaatcaactttttcttttcctggagtgcgaactacagcaggccaaactgtgggattatttgctactggtaacaatacctgtccatcataaaatgcttctaaataaacttggttatagccactattgactatatgatccattatctgatcaattgctcctggctgagagtcacagggatacaaacgtaaccagatagcttgagtttgtggccaattttgacggcgacaattttgtaattcttctgcgtgttctttgaggattttttgataacgactttgagcatttctattgcctttaatggctgataaacgtagttcttctttttgtttaactgcttttggtgataattgacataactccattacttgtgctgctgctggttgagtgctaaagttaggaattaacatactactgctaaagaaaacagcaaatagactgcgacgcaataatcttggtgtgggaaagttgaaaagagttttgtacatattgcttaattaaccttaattgatctatcttttgctaaatttcttacttaattaatatatgacaacaggaaaaatttatttaaggagtcgtaggggcgaagcattcggacaataacctgtgatcaaaattgataatttatcggccgaatgcttcgcccttacaggaaaattgtgatcaaaattgataatttatcggccgaatgcttcgcccttacaggaaaattgtgattacaattgataatttatcacccgaatgcttcgcccttacaggaaaattgtgatcaaaattgataatttatcacccgaatgcttcgcccttacaggaaaattgtgatcaaaattgataatttatcacccgaatgcttcgcccttacaggaaaattgtgatcaaaattgataatttatcgcccgaatgcttcgcccttacaggaaaattgtgatcaaaattgataatttatcacccgaatgctgatgcttccagcacgcttcgcaaacgctcttacaggacaataacctgtgatcaaaattgataatttatcgcctgaatgcttcgcccgtataggagaaatattcatgaatctagagaaatttttgcataaaaagcaggccaagcctgctattaagaatatttgcaaattatcaacttttgcctaataattaaccaccacggttaacgactgcttcaacacgagcaaattctttttctaggcgatttttcaacttttcaggtatgggacggttagggtaggaactgtagtgtccagctaaagcgttcagggcggttctcatggttgtaaaggaactcaagccagaaacggcattggatctttgataacgtgcagaaaagtcatttattttttgacgtgcttctgcttgtattgctgctttattaggatcatctggtgataattctacggcttgttttaagactttgactacggccaaggtgtcttgacgataatctccggttaagccgtctggactgccagaacaacccattaaaccgatggtgactactaaaagtagtgccagcagacgcgaccaataatgcttcatatccattaattaaatacgtaaatcacagtccatcgtatcagggaataggggactggtgactggtgactggtgactgggtaatgggtaattacttatattttttatttttcccaatcaccaatccctaatcaccaatcacctcatataaagtattccgttgttgataaggtctgttgagggaggcgatcgcactttgcagggtttctacttccatgcacgtaccaccgatagccccggccattgtggtaatgtgttcttccattaatgtgccaccaatatcgttacaaccccaagttaaggcttctgtcgccccagctaaccctaattttacccaacttggttgatggttaggtatgcagtttcctaagaatatccttgctaccgcagtgagtaaaagtgcatctgctaatactggttgatctcttcctactcgacgacgtaaggatttaggtgcttcttgacccacaaagggtaataaaataaattctgtaattttggctgggtatcctttttctaaggctgtttgttgcagcgatcgcaatttttctaaatgtcctatttgctgttccggtgtttcaatatgccccgataacatggtactcgtagttggtacacctattttgtgcgctgtactgacaatttctaaccaagttgcagtatctatcttttcaggacataatacttttctcacttgatcatctaacacctcggctgctgttcctggcattgaacccacacccgcatcacgtaaagcttctatgacatgagtataggaaattccgtcaactctagcaataaattggatttcctggggcgaaaaggcgtgtaaatgtagctggggaaactcttgtttaatggtttctaccaatttaatgtaataaggtaaggatttaccgttaatttgcgcttgtgggtttaatcccccttgcatacaaatttctgtagctcttcgacgcactgcatctgtagatttttctaaaatctgcgcccaatctaaccagtaagcatccgtatcactatcatctcggcggaatgcacaaaaactacagtgctgttcacaaatgttagtaaaattaatgttacggttgattacgtaagtaacagtctcacgagcttgtttttgtctcagtttgtcagcagtttcccgaatagtatttacagattcctggtcagtttggtttaataaaactactgcctcagatggtgatatattaaaccctagcaaggaacgctcaagaatagaatccaaggttatattagtcacagctatttaaaattttattaatgtatgaataaattaaaagccaacttactattttaatgctttggctgtatgttgaattggtttttaagaggttttctaaaaagttgatggctaacgctacgctacgctctaggcgaatatacagcattttccggtgtcatgaggtacactatgggcgggcaagacttgtactgagcttgtcgaagtatgcccaccccacaagagtttcatgattatgatttgtacctcataaaaacgaaatctgctgtaaatcgctaccacacaaacaaaattcaccagtgaactaaggaaaaattaggggtttcaaacctgtataggcagctttggctgtgtagatgtaatttctcatcacccaagttagactttttagacatcctccaaacctctgttttattgtgcatgagtaccttttgtctacctaaataaataatttcagatatcaacccggattcctatagtttttgccaataaaataaataacataattaattttttagactaaaatatttgaaattttaatttatggacttcgatgcctatcattccctattaaacgttcccacgggtccattaaagattgcggaacatccacctagtgatgttgtagctagaaacaatgatcttctcctatctctggtaattcctacttacaaagagcgtgataatatcgagaatatcatcaatatcctcactggtttactagatgcagcgatacctaataattatgaattaattgtagttgatgatgacagcccagacctcacctggcaggtagcacaatctttgatatatgattatccgcagttgcgggtaatgcgtcgtcaagatgaaagaggactttcttcggcggtaattagaggttggcaagccgctaaaggtcgtgttttgggtgtgattgatggagatttgcagcatccgccagaagtattattacaactattacaaaaaatagaacaaggggcggatttggctttagctagtcgtcacgttgagggtggtggtgtcagtagttggagtgtggtgaggcggtttttatcccgtggggcgcaggttttagggttgattattttaccaggggtattgggtagagttactgacccgatgagtggttattttatggtgcgtcgaagtgcgatcgctggtgctacgatgaatcctgtggggtataaaattcttttggaggtgattggtagaggtaacgttagagaaattgctgaagcgggttatgtcttccgcgaaagaacagaaggagaaagtaaagtaacgtggaagcaatatgttgagtatattcaacatttaattcgtttacgggtatctactgacaagttaggtaaaatcagtcgcagaatagatttccccattggcaaatttatccgctttggtttagtgggtttgagtggggtgtttgtagatatggcagtgctttatttactcagtgatgcttctactttggctttacctttaactcgcagtaaaataattgctggtgaaattgccatttttaataatttcctgtggaatgatgcttggacatttgcagatgtgtccatgcagcaaaaaggatggaaacaacggattaagaggtttttaaaatttaatctggtttgtttagcaggattggtaattaatgttttggttttgaatgttgtttataatttcttgattcctaatcagtatattgctaacttgattgcgatcgcagtagcaacaatttggaatttctgggttaacctcaaattaagctggcgggtgacagatgtaaaataatcaatttgattggtgattggtgattggtgattggtgattggggagaaattccttaactattccctatttcctataaatggttttaaccaagttagagaaatagcaagatcgagaagagtaactgctaaggcaaaccagaaaatactctctgcggctaagattaaaaaaggtaaaattgtattattgaaactccaaccaaattctatttgagttaatccgcgtactaaaccaaaagcaaataccgcaccagatttaaggtgactatttttatctactctgatgatatagcgataggtgacaccaaatagaaaaccggaaaaacctgcaattacagcactaagtataaattgtaaattaatttgtaaattaatttgtgaattaattatttgtgaaatttgtgaaatttgtgaaatttgtgaaatttgtaaattaattatttgtaaatcaattgacgaaccttgatgaatattcagtataggaaaatactgctttagcaacaacccattaacaacagtcgtaactaagaaagcagaaccaacggataaactaccaataacacctgctttaacagattctaacctttcttgcatgagttccataaacctggccagccttctgtaaacaccaatgaacaatctaccgccttttcccggtatgataaacattagaaaccttttgcaattatttgaaaagtagaactatgattttgacactaggttgggtatcacttctggttgtgttcacttggtcgatttctatggtagtctggggacggaacggactctagaggcatcgtggaaagtccattactgagtattttggctatagttgccctagtgctgctagtgggagttacaggtggtgtagtctatttaaccttggcagattggcgcgatcgccgtcgtcgagaagacgaaacccgtgaacttaaacgcagcactgccaaacgtcgctgattttacagcccatacaaacacatacaaagctttatgtggggacatgattagattcgtgtctccacatattctatggcaacaggaggcaggacttttttattttggattttggattttggattttggattttggattttggattgtttttgttaactccaatctaaaatctaaaatctaaaatctaaaattttcttccccagtcaccagtcaccagtcaccagtcaccagtcaccagtcaccagtcaccagtcacctgtcacctgctatatctacttcccctggtagatccaaagcgattaataaagcctgtgctagatgtgccatcactgcgtcagaaagtacacctcgtaatcgcaaaaagcgcgttttagataatacccgcacctgatctgccattgcgatcgagtctttcctcagtccgccatctggtgctaaaattaaaacttgagtggggtaaacccgcttgccggtttgataagtcgtgcaaggtactgccaaaacaactgggctagataaattaattacgtcacgactgacaataattacggggcgagttcctccttgttctgaaccttcagtcatttctagacgcgcatcgtacacttcaccccttctcatcgtggagattcccctagctgcaacgcctcccattgagccgtagcaaattccgcctccattcttaaaacttctgcttgataatctggatctctggtcatttccgctaaagcggcatcaatttcggctcgcctttgtgctgctagttctcgcttcaaagcttgcaccacaaactcatttctacttttggctttcccctctaacacagctttatcagtcgcttctaacaattctttcgggatcgttaacgtcgtgcgaatagtttctactttcatggcgcgttcagtctgtgatgtctgaagtgatgccttttatgatatcgttttcggcatccattaggaactgtaaatttgtcattggtaattggtaattggtgattggtaattggtgattggtgggttattattctcccctacacccccaaacaaatttaaaccccccaaacggaaaatgtcaggggggttagcaattgcaaaaaaacaggctctatatccataaattaattattcacttgggaaaaataaccttggggcaatctacgatcatcggtactggaatactcatgtctggtttcgactcaagatttaccacgtttaagcgaaccatcagcatatagttctaggggtactaattcagttttgccattaacttttacttgggagtaaactactttgagcaaaggagagtggttttcattgtaacgtaaacacataacatatcctctcttgtctgttacaaatttttctggtcttcaaggcagttgatctctataatataaagatgttttttaagttgtttgtagtttgcattgccttgattgagtgtttttttctctttactttataataccaaagaaaaggttaaatttgggaaaaatagcggtaaatatcatgaagatttgaacaagttagcaagtaatgttgtcagtggaaattattagatatacttactgaaagcacaatttagttacccaaaaaatcatatataaataacaactggttatgatctgtaattccctcatgatttgccagttaattgattgcttgggaagaaaaatttacgtcacagttacagagtataattgatttataactttactgacaaactaagtaagtcggtacaaaaaaaacaagcaagtacaaaaatgtaaaattgctaaaaacctattcccttctgcctcctgccttctgccttgccataacgacaatttttaatgcctacctacttatgaaaacacccacagaactgccaactcgcttagattactactaccaacaaatcaaaaccattattctcgctcgtcaaaatcctatcacgggtttgttacctgcgagtaccgcaattaccgctcatggtgattatactgatgcttgggtgcgagacaatgtttatagcattttggcagtttggggtttagcactggcataccgaaaaatagataatgatcaaggacgtacttacgaacttgaatatagtgttgttaaattaatgcgtggtttgcttttcgctatgatgcgacaggcgcataaagttgaaaaatttaaacatacccaatctttgttagatggactgcacgccaaatacaacacagctactggtgatattgttgttggtgatgatgaatggggacatttacaactagatgccacatctatatatttgctgatgttggcagaaatgacagcagcaggtttatcaattatttttactttggatgaagttaactttgtccaaaatttagtttattacattggtagagcttaccgcacaccagattatggaatttgggagcgaggtaataaaattaatcatggtaaggcagaattaaatgctagttctctgggaatggcaaaagctgcactagaagctatcaatggactgaatttatttggtgtgcatggtagtcaagcatcagtaattcatgttttaccagatgaaatttctagagcgagaattactttagaatctttattaccaagagagtctgcatctaaagaagttgatgctgcattattgagtattattagctatcctgcttttgctgttgaagatgtacaattgagggaacgcacatataaggaaattattaataaattagctggtaaatatggctgtaaacgcttcctcagagatggacatcaaacaattttagaagatactcatcggttacattatgaaccttgggaattgaaacaatttgaggatattgaatgtgaatggccgctatttttcacttatttagtgcttgatggtatttttcgtcaagaccaggaacaagtgcaaaaataccaagaattgttagcagcattactggtagaaagagatggtttccagttattaccagaattgtattatgtaccagaggaaaagattgaagcggagaaattaaatccccattcccaaacaagattacctaatgaaaatatccccttagtttgggcgcaaagtttgtattttctggggcaaatgttgagtgaaggtttaatcgcagtaggtgatattgatcccttgggtagacatttgtgcgtgggtaaaaaacggcaagcaatgatacaaattgctttattggcagaaactgaagaagtgcaagcacaattagaagtatatggcattgaaagtcaaacacccaaccaagtagaacccattcaagtgagacaagctggggaattatcagaaatttatacgcaaattgggcgcaatgatcaattaggtttaacaggtcgtccggtgcgaaggttgcggagtttgacaacttccagaatatttaaaattcaaaatcaaactgttgtatttttacctgctttcttagatgcacagcagttttatttaacgctagattatcattttctgctggatcaaattagaggtgaattggcttatatccaaaaatattggagtgatttaggtcgtcctattttgacattgatgattactcgcacgatgctagaaacaggttcagaagcattattagcattaatgcaagaactgaaaaatggtgtttgcggtggtgtgcaggtaaaattaggcaagttaaatcaattaatgttgactgcggcaattcaaagaattgattttattacagatatagaattattctgtcctccagttaaaaatgcgagattacgttgttattacttggtttctcagcctgagaaaaattggcggttgggacatactcaagaatttcaaatggaatgtgaaactaacttagatttgttactaagttatttacgttcctcagaaaatatctatgaacaaattgaattactgcaaactttaaatcggttaaagggtttggattttgatactggttatggtgaagatggttatagtgtgacagtgggtgatttattggatgaagtttacactaaagcaggttatttaggtttgtgggcggtggtgcgtcgtgctgctggtttacggcaaatggtggatattggtttatcggatgcggtgacaagtattttggtaagaggtaaacaaattgctgtaggtagggcttatagtgaagcttcgttaataattgtaccaaaatcacatcatgaaattgccgagaaaattaataatttctgtcgggaagatatcagagacagggttttaactcaagaaattctcatttatttaggggtgttaatcaaaacagaaccagaattatttaaaggacttttaacactgagggttggttatttaattctgttaattactagcgaattagctcaagaattaggtgttacccaagacgaagcttatgatcacctgatgcagctttcaccttatgaagtgaaactgcgtttggaaaaagttttaacaagttatagtggggtaagtggtttattacgtcaacaagaatcactgcatattaagcaaaaagaaagtgatattgcttgggtagtgcaacctgtaattagtgaagatgaaattgccgtgactccagaaaattggcggagatttcgtcaagcggaaggggcaataaatcgagttcccaaggacttttttaaacaagtttggttgttaatgcaccattgtaaaggtttggtgattggcgataagttggaaagacggaatcgtttagaaagtgaggtgatgatttcggaaatgactgcgggtgaaagaaattttgccttgagaattgaacatttactcaataaaattgaagcgccagaatatcgccaagtaaatgtggaagcgttgatggagttaggagctatagctgcgaataaccctaatttacaaattcaagattatatagtattagatgtgttaattggtcacgcagtgcggttagcgtggttagaaaaaaatcctgaacggggcgatcgctatgatgaagataaaggtttagcatggcctcaattttacaacacttcacccagagattgcgctaattatattttgaaagccttgaagttcttgacagaatttgcgagggatttttaaactcaaaattaggacattaatccaaaatcatgcaacttctagttgtggctggtaattggtaattggtaattggtaattatcaattactacccagtcaccagtcaccagtcaccagtcccttattacaaggagtgtaaaaaatccgtgcatattcatacccttgaacaatggcagcattctcacgatttttctgtagatcaaaatcaggcagaaaaaaatactaaaattgtgatgctgctgacggcattaacaatggttgcggaaattgccgcaggaacgttttttggttcgatggctttgcttgctgatggttggcacatggccactcatgttgcagcttttggaattacgatttttgcttatcaatatgcacgcaataatgccaataatccaaagtatacttttggcacaggaaaggttagtgttttgggtggtttcgctagtgctgtggcgttggcagtgatcgcttttttgatgggaatggaatcactggggcggttttttgaaccgcaaaatattcactttaatgaagcaattggtgtggctattattggcttggttgtgaatatcgccagtgcttttttattgcaagatcatcatcaccatgatcaaggtgatgaacatcatgaacatcatgaacatcatcattatgaacatcatgaacatcatcatcatgaacatcaagatcataatttgcgtgctgcttatattcatgttttggcagatgcactaacttctgtgtttgcgattattgctttatttgctggtaaatttttgggttgggtgtggatggatgcagcaatgggatttgtgggtgctgcggtaattgctaaatggtcttatggtttggtgcgtgatacgggtttaattttattagatggatcaggtgataaacaaatcaaattagctattgtgaatgctatagaagaaaatgctgataataaggttacagatttacatatttggtatgtgggtcagcatcatctagctgctacaatttctttagttacccattatccacaaacaccggaatattataaaaatctcctcaaagatattccttctcttgctcatgttgctgtggaagttaatcattgtcaaggtgaaccttgtgtagatattcatgcagtctaaaatgctgattattgctgtaagttataatggtttcagttctaattattcatgaggtgagatgatggttattgctaataccaacccgccgattattaccccagagatcacaaaaactcactttactccagatgagtatagagagatggagaaaatcgctaaagaacgccacgaataccgcgatggggagattattgttatgcctggaggttcagaaattcatagtgcgatcgctagtaatattttaatttatttgggatttttgctcagagatactgattttcgtttttatggtggtgatttgcgggtttggattcctaattttaatcatggaacctatgctgatgttatggtaattaatggtgaaccagagtttaataataatcgcacggatgaaattctcaatcctctcctaattattgaagttctttcaccttcaacagaaggttatgatagagggaataaattcagaaaatatcgttctcttcctagtttttgtgaatatgtactggttagtcaagctgaagcttatattgagcagtattataaacaggaagaagaaaataaccatctttggcaattgaaagctaatgatcatattgatcagtcagtttttctgcacagtttaaatatagaacttcccatgaaagaaatttatcgacggattaaattttaaattaaatttaaaagcgatattttcacacacaacatctgataatatcactcatctagtagagtgcgttaagaacatttaacgcaccatgtatttcatgtttataaattgctaactgcttcggcaatttttcccgaaacaaaaggtaaaatttcccgactcttagcttgtgcttttccttctgtaaatactactaacaaataaggacgctgttctggtaattcaatataagccgcatcatggcgcacagaacttgtccaaccggcttttgaccagatttgactattttggggtaaaccaccgcctaaaaagcctataacttggtcttcttccacatcttggggtaactcatcagggttaagactgcgtttgagtaaagacatcatttgttgcgatcgcccactggaaaccgccacccctcccacgatactatgtaataacctggcagtggcattagttgttaacatatttctattttcaaacatttccccataaaacgccctttctctaccaaaaggaccatcaccccaagttttttgacaaacattaatatttgtcatttcttcccaacccaaagattgataataacggttaataatttggcgttgatatttccaagtttcaaaaggtcctataggtaattctggtccagaagtagtaccgctgagaatatcaactattaaactggtagcatcattgctggattcaataatcatatcacttaacgcccgttctaattccttagaggtgttagtcatgcctttttctaaccattcatgaacagaaactaaataaaataatttgacaacacttgcaggataaatacgttctccaccacgataattaaaacctctcacaccatgaccccaaaaagcgtcaggagtcaaagcgccaccagtatttacaggaattggaggatcataaacaacccaagttaaagcaatttgatcacggtttaaattaggaaaattagaaaaagtagattctaagatttcattaccgagattttctagttgttcgttgtgattgaagaaaaccatttgtgaataattccttgaaaatatcaaaatgtgaatttctttatttattctaacattaattgtataatagttcaggaattttagcatttatcaccaatcatggtgatttagatcctacatttcgaggaatgcgaccaagtttagcaaaaacctttgataaaatatatataatgaatttacatggtaatagcaagaaaaaagaagtcactcccgaaggtttaccagataaaaatgtatttgatattcagcagggagtcgctatttgttttatgattaaatatccccaggaggaaaaaatatgatccgcacccaaaaatttacagcaattattgagcgtgaaggtaatggttatgttgctttgtgtccagaattagatattgctagtcaaggtaattctattgaagaagcaagaaataatttgcttgaagccttagaattattttttgaagttgctgatccttcagaaatcgaaaatcgcttacatccagaagtatttgtaactcaattggaggtagcaattgggtgagctaagagtgttatcaggagaagaagtctgtcaaattttagcagcaaatggttttgtagaatttcgacaacgtggtagtcacatcattatgcaacttaaaactgatgaaacaactatcactgttcctgttcctaactattcagaactaaaaattggtactttgcaatcaattattcgtcaatcaggattatcacgttctctgtttgaggtgagctaacgatcaagttttatcataatttttgtatttgatattcagcagggagtcgctatttgttttatgattaaatattcccaggaggaaaaaatatgaaatggcgagacacagaaaacgctcaaggaacattatttatagaatgcacacccaacctatcacaaaaattcctcaacgctatcaaagaaaaattaggatataattatcctcagcttaatttgattgaaccgcaaaggacgcaaagtacacaaaggaaagagagtttcagagggtttttgatgtgactgcgtttatttcttgaaaattgggatgctccttataatttcgatgaaattatcgtaatttttggtttattgacttactctaatctacaaataggagactcttttttaaaccaaacatgatataatcatgtaaatccttaaatcctgaacatcctgattctgacaaaaattaactatataatcctttaaatccttaaatcctggacatcctgattctgacaaaaatatgtctttaaatttaaatttactaattccccattccccaaccaacgaatatcaatgtctagctgacctcaatttatatgatgctcctgaatgcgtccggttagcaactcaagctgctgctggtcgcaatttacgcattacatcaaatcatcaagatacagcagttcaagtttgtttatgcgaagatgattatccgggatgggttgctgttaatgatttgtcattattaaaacctgctaccacaccctacgaacttgcattttttactgaattggaaattaaaaaattgcttccagaggtaattgaatttactcaacaagcaatgcagcaaaataattattatttgtggggtggaacagtagggccaaattatgattgttctggtttaatgcaagctgcttttgtatctgtgggtgtgtggttgccaagagacgcttatcaacaagaagcttttacccaaccaattaatattaatgatatcgaaccaggggatttaatcttttttggaactccacaaaaagcaactcatgtaggtttatatttaggtgatggttattatattcacagttcaggaaaagaacaaggacacaatggaataggaattgatcaactttcggaacaaggagataaagttagtcagtcatactataaacaattacggggtgctggtagagttgtgaaaagctatgttagtcaattgataattgataattgacaattgataattatttataggacttacgcaagattggactgggaacgagataaacccaattttttgttaaaatcaaccatcagcgatcgcctatcagcaatgaccaattaccaactaccaactacccatcacccatcacctatcacccatccccaattacctaatgtatccgtagttgtaccgattaaggatgaagtagaaagtttgcctttattactagaatccatttctacaactttaacagctagtgagttaagttatgaaattatctgtgtagatgatggttctacggatggttcaccagaatttctcaaggaacaagcacaaattcgcactgatttgaaagcggtgattttgcggcgtaattacggtcaaactgcggctatgtctgcgggttttaattatgctacgggtaaagcaattgttaccttagatgctgatttacaaaatgatccggctgatatccccatgttattggcaaaattagatgagggttatgatttggtgagtggttggcgcaaaaatcgtcaagatggggcaataaatcggttacttccttcaaaaattgctaattggttaattcgtcgtaccactagcgtctatattcacgactatggttgttctctcaaagcctatcgtgccgaactggtggcagatatgaacctttacggagaactacaccggtttttaccagctttagcttatatcgaaggggcaagaatcaccgaaatgcctgtgcgtcatcatgcgcgacgctttggtaaaagtaaatatggcatttctcggacttttcgggtgttgatggatttgttaacaattctatttatgaaaaaattcctcacccgtcctatgcacgtttttgggttgtttggcttgttgtcaatggttacaggtggcggactaggaatttatttaactttcctgaaactggcttttggtgcagatattggtaatcgtcctttattaattttagcggttttattgttagttactggtgtacagttattttgctttggtcttttagcagaattattaatgcgtacttaccacgaatctcagggaaggccaatatatcgagtgcgggaagtagtggcaaaaaatgttaagtaacgtaacaatagaaatataaaattactaaatattacattgcatctgccgtgaaaaattttgagactattgacgctaatttgcggcgcaacctactaatattatttgcagcaggtttattattctggtcggctttagcttctttgttgccaacattacctttatatatagaatctctaggggcaacaaaacaacaaattggcattgtcatgggctgttttgccatcgggatgttggtatttcgtccccaattggggattttagcagaccgtcagggtagaaaaattttgttactgattgggttggcagtagcagcgatcgcacctttggggtatttagcagtaaaatcactacccttattaatggtaattcgtgcctttcatggtatcagtattgccgcctttggtactggttttattgccttggtgggagacttagcaccagaacaccgtcggggcgaaatcattggttatatgagtttagttaatcccatcggtgtagcactcggtccagctttagggggatatttacaagccacagtaggctacacacctttatttatcgcatctaccactttaggttttttaggcttactttgtcttttacccgttgttaacccaccgattattgaaaaacccaaagacgttactgatgataaattttggcaacttattaccagtccccgtgtccgtatacctgctatcgttttattactcattggcttatctttagggacagtacatacctttattgccttgtacattaaatccacaggagttgatttaaatgcagggttgtttttcacagccgccgctattgctagtttcagtattagattatttgccggtaaagcatctgataaatatggtaggggtttatttgtcaccttcagcctcactgcttacaccttggcaatgatattaatttggcaagcaaacagtgccttaatgtttttaataggagcagttgttgaaggtgcggcttctggaactgctattcccatgatttctgcaatgatgacagatagagccttaccccatgaaagagggcgaatatttggcgtgtctttaatgggatttgatgtaggactagctatagccggtccagttgtcggttctatagcccaacaaatgggatatcgcagtatgtttggttttgctatgagcttaactttactggctgtgctgatttttattacacagtcgagtaaaaatatctcccagtcgttccgctttgcccttggccgtggtgaagatgcttattctttgaaaagcaaggtgtagttatcaattgataattgacaattgacaattgataattgtttcattcaaggtttaaaacctcctctttcagggggaaaagccaaaaattccgcttttgaaatcctcttcctggaacggagaagtaattgtcaattgttcattgttaattgtccattattgaaaccctttcaggagtcaccaatcactagtcacctaaaaaaattgcacaaacccacttaccgagtttgtgcgatgattgttatttaacgggcgaggagggattcgaacccccgacaccgtggtccgtagccacgtgctctagtccactgagctacacgcccttaaccaacgaatcttataataacacacacttcccaaatgacgcaagaggttttttcaaattcttcccataattctcaaaatatttctcaactttctcatctcaccccccagggagaggcgcaaatggttgatgtgtctgggaaagtcgccactgtgcgggaagctgtggctactgctaaagtgcgaatgctcccagaaacgttagcagctattgaagcggggaatactcctaaaggggatgttgtggcaactgctaggttagcgggtattatggctgctaaacaaacagctaatttaattcccctttgtcatcccttacctttgcaaaagattgctgttgatatcacgccagatgcacaactacccggttatcaaatttatgccacagtcaaaaccaaggcggaaacaggtgtagaaatggaagctttaacagcggtttctgttgctgctcttaccttatacgatatggccaaagctctggaaaagtcgattcaaattgaatctattagtttagtcagtaagacaggtggaaaatctggaaattatcagcaattttagattttggattttaaattttagattgggtaattgctaattgctaattgctaattgggaaaaataacatagattacccagtcaccagtcaccagtcaccagtcaccaataataacgagaatgtgttaatatctgtaacaaattcacaaattcacaaatattaattatttatgcctcctcgttggccacgcaaaccagatcgtcaagatccagagttccgtaagttagatgatcggatgaattttgcttttcatgtagctgttgctgctactgttaattctgggttgtggtttttccacatcttgaaatctacatcctgggaatggttgacaccattaactctaggttgggtaggggtaatattgctgcatttcatttatattagtgcgatcgctaattactcagaaactccaccctcatcaacctgaagactgactgctaatgctggggcgttgtcaccgatggtagtagatacagtctagctaattgcgccataatatgaaataagctgaaatcaactaaaaatctgcgcccttgttttgtaatgaggttattttatggctacaactcctaccacagaaatactagaagccctagcagcagaaataggcgaaaatgtctatatagacattgctaaatggcatctttacctatctgatgccaaacttcataccgtcgttgctgaaaaattatatcctttaattgttgatagaaatgtcaatgaagacagagttttagaattattagcatccatccctgtgaaaattggtggtgggagaaaagaactacctttgattgatttattgccgctgcaatgtcaagtaagcttggttgatatattggaaaaatatcaacgggaagtttaagttattcaggagtcaggagtcaggagtcttaagggcgaagcattcgggcaaccaattatcaatttttatcacaggttattttcctgtaagggcgaagcattcgggcaaccaattatcaatttttatcacaggttattttcctgtaagggcgaagcattcgggcaaccaattatcaatttttatcacaggttattttcctgtaagggcgaagcattcgggcaaccaattatcaatttttatcacaggttattttcctgtaagggcgaagcattcggccgataaattatcaatttttatcacaggttattttccgaatgcttcgcccctacttcgcccctacttcgcccgtacaggagtcagaagtaaaattgacttgatttacctgttaatcgacgttattatcggttgtaaattcacacatccttcaatactaaataacataattaaaggaggatttttggtatgtttttacaaatcaaaaatagtcgggatttagtcaaaattgttgattttcaagaattaattgatcctaatagtgagattgtacacgctaaagatcaagaaggacaagaagaacaggaaacagacacctatcaaaaggaagatttggtttttccatcaggggaaaatttaccacgttgttggttagatgctaattaccaaacagcgcacgctgcatagtagaattaaatatcatggtagatattgtaggggtttagcaatgctaaacccctacatttttatcaattctcaattttgcatctaattaacagcagctttttcttctactgtcacactttcacctttagaaaaagctttaaaaatccaagctgtgaaaatatgagaaagtacacccattggacctgcaaataaacacaaagctaaagagtgaattgtccaaactccggttttttgaccttcccaatatatccatcttccgacaaataaatccattactagaaaatgaatccaacctgtagcagcagctttttcatctgcaaaaaatctagcaatatctgctaactgaggatttgataaagcagcggcattttctgggctaatactgctgacaaataaatacacataagcagcagctaaaaccacaaaaggaataaatgattccattaccttgcgggtgactttccagttaggtaataaaatcattaatgcccaaaagggtaaaacaaacaaattggcgatattgaataaatcggtgatattcatattaggtgacagttgacaggtgacaggtgacagtaggggtttagcattgctaaacacctaccgattcataatatattacaaagctactaattcagattctatttctgatgattgtaaatcacgaccgataaaaactaaacgggtttgttttgcttcttctggtttccaaggacgatcataaaatttttcaaatcttgtccctacaccttgcatcactaaccgcatgggtttattcgcaactgcaacaaatcctttaattctgtaaatttcttgttgttctgccagtttctttaatgtttcttgcagtttttccgggtcaaaggtacgatttaaaatgacgtgagttgaatttatttcatcatcgtgatcatgatcttcttcggtgtcgtgatgactaggacgatcatctaaattatcttcaactgcggattcaaatcctaacaatatagatgggtcaagtttaccataatcactagagacgattttcacttctctaggtaattcatttttgactaattctactacttgggatttttgttgatcatcaactaaatcagttttattcaaaatcactaaatctgcacaagcaagctgatcttcaaacaattcttgtaacggtgtttcatgttctagactatcatcttcttgtctttgggcagcgatcgcttctaaatcactagcaaatgttcccgcagcaaccgcagcacaatctaccactgtaattactgcatctactgtagcagcattgcggatttcttgccaacgaaaggctttaactaagggttttggtaatgctaaaccagaggtttcaattacaatacaatcaatactatcacggcgtttaattaactcctgcattgtggggtaaaattcctcttgcacagtgcagcataaacagccgtttgtgagttcaaatatattgttattattttgggtttctggattttcttgtatttcatcttcggggcaaatttggcaggattttaataattctccatctattccaagttcgccaaattcgttaactaatactgctatgcgtcgtccttcgttgttttggagtaggtgacggatgaggctggttttaccgcttcctaaaaagccggtgatgactgtaacggggatttttgttgccatgtttggtgtgttgttttgttatttgattttaccacaatatccagatccctgagtttttagattaatttacaatttattgacaggtttaaaaaagaagtcggggatcttgttttattgaaccacgaagacacgaaggacacaaaggaagaagagaataagaaagaaaaattgatttcagaagtgggggattttatctcatttctgagataatattagtaattgtatcttgtaaagattgattgttaagtctttgattcagtatttctcctctttgaagtatgctttttttgataatattccaatcaggtttgatgtgtaattctgtttctaataattgtttctcttctgtggataaacaatgaataatttcaactaattttttgactaattccctgttcatagttgtgattatcggtaaggaataattattgatatttatttgattataacgtaagttgctttatttaacctacgttacctataaaagttagggatattaatgttacttgattttaagaatatccaatttctatcatcttgaaaaattcctggactacttcatcaggattgttataacatctttcagcatcaaatctttctacaactttgataccgtttttcttgaaaatccgttctctttcttgttcttctactctgcgttctgcggtgtgatatggtccatcaacttctaaaactccccatttaccgttataacaaatgagaaaatcagcttctttattttctctacctttgggtgtggtaagtcgtgctaaggagttgggtacaaataaaactccagttctgtctaatgcttcagcaattttgatttctgtttttgagcgaaaacgtaggttttcccaagtgtgaattgttgagtttgaataaaattgaacgccttggttattgatattattatcactttgtgttctttgggtcttttctattgttgttgttttggttgaagaaaatttcactccttggttattaacagtattctcattttcgggagttttacgtagaattaaatctgtattttctattatatttttatataaactggcaaattctccagcgtcaaaattaccatttatgggtcgtctttcttttttctcttttttctccacattatcaaaatctaaatattcacaatcaagatatacatatttacaaattacttcgtctaggtttgtttcactattaatatgccaatcttttatatgagaacctgttaaagttgcattgtgaaaatttgtatgaattacttgggatctttctaaatcagcgccactcaggttagccctactcaggttagccctactcaggtcagtcccactcaggttagcccctctcaggcaagccccactcaggttagcccctctcaggcaagccccactcaggtcagccccactcaggtcagccctactcaggttagccctactcaggtcagcccctctcaggtcagcccatctcaggttagcttctgtcaggtcagcttctgtcaggtcagcttctgtcaggtcaggtgttggcccccacgaacgattttcatctctccacttattccaaacctccaccccttgattcagtattgctaaatgctctggatttgccataatctagtttttatacctaaaattcccaatattcagattttaacctaatttcattaagtttaatcaaaatagcgatcgcatttggcgttaactaggttttttagtgttttatatgacacaataacttatgttgtgtttttcagctactgatgttgactcaagcagaatttgaggaattgataaatgatagtacaaaacaaattgatgttgatattttatggattgaagatgaagaccattctcctaccgtagaatttcgtgttgagcttacctcaaatcctggttatcccatttttgtcaaaggtagttataacccgctaacagaaaaactgacctacgcactcatccatcgggctgctggtagaatatatgctttggatttaggacaagatcataaaaatcctgatggaaacctagtaggagaaaaacacaagcatcgctggaaagagttgtatcgagataaagaagcttatgttccaccggatataactgctcctgtcaccgatccagtcaaagtatggcaacaattttgtctagagtcaaaaataaagcataatggaattatgcaagatccaccgccattacagctagatttattcatctaatgttaagcccttgtgaagaaattgccagaacgattggagagttgtttacctgttcaacggtaaacgactatatccgtatacgtaccccatttctttatcctgacggtgacgttattgatatatatctaaaggaaaaagagggtcaatatatcttgacagatttaggtgaaactttacgctggctacggatgcaaactatatctgagaaaaggtcagaaaagcaagaaacgctgattcaagatacactattaactcatggtgtcgaaaaatacagaggaatgttaataattagaatacaaggaaatgaaaacttagcttctgccgtcacaactttatcgcaagcagcatttagagtttctgatatttggtttacatttaagactagagcttttgagtcaattatagaagaagtagcagaatttttaacagagaaacaaataccttttgaacaaaataagaaatttgcagggcgttctgggcgttctcgaaaagtagattttttcaccgaatatcgccaacaagtatcattaattgatgtattaagtacagcaagcgtggcagtaggtaatagtagggctgacaatgtttttactgtttggtcagaccttagctaccttcaagaaagaaattacaaatttatttcattatttgacgatactatagacatttggaaacttgaaaatattactcttctagaacaagtgtctaatgtagcatactggtcgcgcaaagctgaatttcaagaaatgctccttatataatatcatttttcataagtaaattaatgaaatttgtaaaacaatctttagaatactatttaaaccttaaatattctgtcactctttaccctgacgcagaacaaggtggatatgtagcagaaatcaaagacttacccggatgtctcactcaaggataaaccctagaagagataataacaaatatcaatgaagcgcgggaattatggattgaaacagcttatgaagcgggtgataatattcctttacccagtgaaaaaaatatcataaatgatccactagctgagtttattggagtagtagaaaatgggagtttagcgcaaaatatagatcaagaattatatgaatgaatagtcaattatttatggatacaaaattaaaacttgtctgatagtaagctgtgatgcagctaaattgtataatcataaatttctgaactcttgtggcacaggcatcttgcctgtatcatttatacaaattaaatgcacaacagcttatctgtaactgcatggatgggaatggtaaattctactttagtcataagattgcgtaatttatcttagtttaattgaatatttcccctgcgaacttctcgcacaacttcacaaatttcttctgttgttaatgggttaggatcatttactgcttctcttctctttcttaattcctgccaatctattttaggagcttttttaaacaaaataccatcttctgtgaagctaactgcatatttttcaccattaacaaattgttctcgaatttctggaggaagttctaaatttccttctggtgtgaaagtaatagtaattgttttttccataattacctcattacagcaggagtcaggagtcaggagtcagaagtaaaagtgaggtgaattgaactgactttattttacaggactgacgcacaatctctctagtgcgtaagtcctaatatagatgattttaaaatttaggggtaatctccctccggttgctttcatccacagaaaacaatcacagggaaattacccctaattcaatgcttgttaattatagactagacaatgaaaggcttttaatactgtcacctgtcacctgtcacctaattactcagcagtcaccaattctgtactaccttttgtccgcttacgagtcaaggtattataaaccatgataccgatcgctttaatcaaattaccttctaactcttggaacatcttcatgttcacaccaaaagcgtcgttagcttcttcgacaatgcgatcgcctgtagcatcatcaatgggcatttcatccaaattttgccgatatttggctttaaatcccttctcatcgctaatatctgcaaattcataaaaagctgtaccttcaccttcacccaggttcattgcagttacagcaatgtttttaagaatttgtccaccagacaagtcacccaaataacgagtataggaatgtgcaaccaacaattcgggttctgtagcggaaatttcccgaatgcggtttacataagtctcaccagcaggggataatttgatctgctcccgccagttataaccatagtagtaagctaaatcctgctctaaagaatgcttgcggttcagtgcaggaaaataaattttacccacaacagggtgatttttgtgcttttccatctcctcttccattgctgagtagatgaaataaaagttagcaaccagtttccggtatgaatttttttctaccactccttttaaaaagcacttgacaaaaccaacgttttctgccattgtatgcgctttttttgtacctactcgtaacttggaggctaaattactgctcatgctaaatttctctactttaaaaagtcaactgttgggatttttcacaaatggcgaaaaaatgccactaaaaggttacattagaactatttgatgagaatttatattaaaattcattaagttacattattttcgtatttatttataccttaactctggcaatagacatttattaggttataaatacaaagctaattgcttgatttagccaacaatgaggattttttatagtaaacaattaataagcacctgtaatattacttaacataaaatcgttaaagttcatagtcattcagaaaaaaattacaggtgtactgtttgttaataattcctcagaattgttgaacaggggttaaagtgttattctccgaaatgtttaatggtgtggagtgttgaaaaatatggtttcttctataactcggactcaaagcagtatatctgatggttatgtggctagtcttgcaagtaattttgttcctagtttgctatccttgccaaaaacaccgttatttggtacagacggcattcggggaaaagtgggagaattgttaaatgctcctttggctttacaggttggtttttgggcgggtattgttttacgtgatcatgctgcaaataatggtttagcaaaaaatggaccgataattttaggtcaagactccagaaattctagtgatatgctggcaatggcgttaagtgcaggtttaaccgccgcagggttagaagtttggtatttgggtttatgtcccactccttgcgttgcttatcttaccagcatcacagaagctatcggtggtgtaatgatatctgccagccataacccaccagaagataatggtattaaaatctttggggcaaatggtacaaagctgtcaaaagaattacaagggcaaatagaagcgggtttgcggggtaaactggcaactgttagcagtgtaagcaactgtggaaagcattattcaagaacagaattaattggagattacggacaggcattgcaacaaccattacagccacaagtaaatctgcaaggaatgaaaattgtcttagatgtggcttggggtgcggctgtggggttagcaccgaccgtatttacccagatgggtgcggatgtaatttgcttacataatcaggcggatggcgatcgcattaatgtcaattgcggttctacccatttagatattttagctgacgcagtgaaagagtataaagccgatatgggatttgcctttgatggcgatgcagatcgagtattagctgtagataacactggtagacaggtaaacggtgattacattctttacctttggggttgtcatttgcaagagcaacaaaaattaccagataacttgattatttccaccgtcatggctaacctgggatttgagaaagcttgggaaaaacagggtggtaaattaattcgtaccgccgtcggggatcagtacgtacaagcagaaatgttaaaaactgggggaatgttagggggagaacaatcaggacatatcctctgtcgtcattatggcatgactggagatggtttattaacaggattacatttagccgcagtggtgaaagcaggaggagtttccttagcagaaatggtagatcaaagttttcaaacctatccgcaactattacaaaacgtgagagtagaagacagagaaaaacgcttagtttgggaaaaatgcgaaccagtacaaaaagcgatcgccaaagccgaagccgcaatgggtgataatggacggatattagtccgtgcatctggcacagaaccagtaattagagttatggtagaagctgcggatacggaattggtaaactattggacaaaggaattagtttcacaagttcaagaacacatagcgtaaataggtgacaggtgacaggtgacagtatagctgatgctcatagcacaccagatagatgctatcaggagaaagaagaataaagaactaatttttcttcccccataccctacaccctgttccctttcaattgtcacctgtcaactgtcacctaaacagttatgttcaaaaccaagaaaaaaaccaagttaaatcaatttttgagttattacagcagttttcatgtatttagactacaccctaaattactttacttcttcctttgcgcctttgctcctttgtgtctttgcgcgaaacctaaatcacgatgtggttcatttacctgaaagatcgcacaacaagtaattcaagcatatcaagaaattatgccaggagtcaggagtcaggagtgagaataaagagagaataaagaattaatggaattgatatcctcagagttaagaaacttaaaattttgttgcaatctgcaaaatgtccataggataatagttaatttgtgtcatactgtcacagtaaaataattatcttttctaattacagggaatctagcatggctctccgtcttggtgatacagtacctaactttacacaagcgtctacacacggcgacatcaatttttatgaatgggcgggtgatagctgggtagtattattttctcatcctgctgactatacacctgtttgcaccacagaattaggtacagttgcaaagttaaaacccgaatttgacaaacgcaacgtgaaagcgatcgctctcagtgttgatgatgtagaatctcataacggttgggtaggtgatatcgaagaaacccaaaacaccgccctcaactacccaattttggcagatgcagacaaaaaggtttctgacctttatgatatgattcatcctaacgcggctgcaaacatcacagtgcgttctgtattcattatcgatcccaacaaaaaattacgtctttctttcacctaccctcccagcactggacgcaattttgatgaattattgcgggtcattgactctttacaattgacagataactacagtgttgctacaccagcagactggaaagatggtgatgattgtgtaattgttccatccttaaaagatcccgcagttctcaaagagaaatttcccaaaggttatcaagaaattaaaccttatttgcggatgactccccaacccaataaataatttttaggtagctatcagcagtcagcagtcagctaataacagcaataacaaagattgagaaatattaatttctggctgattactgaaattttagtaacattaatattcatgatcatggtgggttaaagattttataacccaccattttttatataataaaataagttagatcagcaaagtaggattaaagataatgctgtcatcacctatagtttttcaattaccatcatcagttaaaatgacagatgaacaattttttgatttctgtcaaattaaccgtaacttacgcattgagaggaataaatttggagaaatatcaattatgtcactagcaggatcagaaaccggaaacagagagattaatattctaggacagttgtgggtatggacagaaaaagatggtacgggtattgctttttcttccagtacaggttttaaactttccacaagtgcagaacgttctcccgatgcttcctggataaaattagaaagatggaatactttgacatcagaacaacagaaaaagtttgctcctatttgtccagattttatcattgaattaaggtcagcttccgataatttgcaaccattaaaagagaaaatggtggaatacatggaagaaccaggaatacaattaggattattaattgatcgtaaacatcgccaagtttatatttatcgtcctggacaaccagaggaatgtttagaaaatcctgaaaccgtaaattgtgatcctattttaccagggtttgtgttgaatatggcgaaaatttggtgattgtgattgttgctttcatggaaaatattaatattcattaatattcattgaacaaattttatttcatctttgggaattttgattctagaaatagttgataaacaaaaagtattataacctacgctttttgagctactttcaggaaatgatgcacaaatttttcaccaggggaagtgtaaaagattgtgaatagatgcaaataaaggcaaaatttgaaagggtagaactcagatagatttgaatatggatataaaacaaggatttgtaggtactattggtaacacaccactgatacggttaaacagctttagtgaagaaaccggttgcgaaattttagccaaagcagaatttctcaatcctggtggttctgtgaaagatcgtgctgcgctttatattatcgaagatgcagaaaaaaaaggtttactcaaacccggtggtacagtagtagaaggaactgcgggtaatacaggaataggattagcgcatatctgtaatgctaaagggtataaatgcctaattattattcccaatacccaatctcaagaaaaaatagatgcgctgacaacattgggtgcggaagttcgtcctgttccggctgtaccctacaaagaccctaataattacgttaaattatctggtagaattgccaccgagatggaaaacgccatttgggcaaatcaatttgataatttagcaaatcgtcaagcccattacgaaaccaccggtgaggaaatttggcgacaaacagagggtaaaatagatggttgggtagctgcaaccggaacaggtggaactttcgcaggtgtggcaatgtgtttgaaagaaaagaaccccaatgttaaatgtgtagttgctgatccgatgggtagcggtttatatagctatgtgaaaaccggcgaaatcaaaatcgaaggtaattctattactgaaggtattggtaatagtagaattaccgctaatatggaaggcgtacccattgatgatgccattcaaattgatgatcaagaagctttacgagtggtttatcaactattaagaaaagatggtttattaatgggtggttcaacaggaattaatgttggtgctgcggtggctttagcgaaacaattgggacccggacatactattgtgactattctttgtgacagcggatctcgctatcaatcacggatatttaacaaagaatggttagccagtaaagggttgtctgttagttaaagggttgataagatccccgacttctttgatgatcgtgtcaataaattgtgaatttatcgcagaagtcggggatctggggatgatgtttttgaaagttgatttacttaaaactgataaaatctaaaatccaaaatctaaaatctaaaatctaaaatcctatgaatccctacactattttttctcaaatcaaacttcaatgtgtgagtgatggcactataaaaccgttgttagaaaattgcgaaagtgctgcaaaaatcctagttttagtattgccacaactgggagattttgatagtttagaatatgcctggtggttacagcgagaagcgcaaaatttagcaaatcaaaaaattgctattcgtgcagtaggtattgggaatctcacttctggaagaaaattctgtgaatatacaggatttccccaagaaaatttatttgttgatgaaaatgctgaattacatcaaaaactgaatctttatccaggtttaaaagtttctgttcctggactttctcaaagtcagaaatcttggttaaatttaatgttaatgtgtgcaggtattggtagtcctggaacattaaaagaagtttttcggggatacaaaggagataaacaagcaccccaacttatagcagatgatgagatgattcaaggtactcctttaccagcttttaaaggttcgttttttaaactagctggaggtagtggttttcaacgtccttttgaattagctactctgcgactaaaaaatatggtagaagtattaaaaaattggtcaacttatgtgccaaattctgcttatttaactcaacgtggtggaacatttttatttaataatcaaggtgaattactttatgaacatcgagatccaggaattttaggttttgctgctaacatgagtcaacctctatcatttttaccaattgataattgaaaattgacaattgataattgttttattcaagatatcgcagattgcagattgatgaggtacagcatttaagtttaaagccactcaccaagccagttttcctcctgcctcctgcctcctgcctcctgctataattcaaaatttaggttattcgtaatgttaaatctaccaacagaagatcaagtaaaatctactaaatgtgtgcaggtgtgtcaacatcgtagctgtagaaaacaaggtgcagcagaagtattagcagcttttcaagctttaccgattccccatgtgacagttacagctagtggttgcttgggtcagtgtggtagtggtccaatggtgttagtgttacctgagatggtgtggtattgtcgggttttacctctggaagtacaaacactggtagaaaaacatttaataggtggtcaaagagtccacagaatgctatatcatcattttcatcctcagagataatgctgatgaaaaaatatccgaaaacagcatcttgttcacggaagagagaaaactgatggacattaagcagctacgccaagttttaaaattaaagtggttaacttactatcaagaaaatatttcttggttaacaaaaatgcaaatttggcgcacctatgatggtgtgagacgaccttcatctggttatattttagccactctctcggttttagaaccgcgtttacagcacatacttccttttattctggagttaaataataatcctgatcaaatagtcgctgctttagggttgaattttaatcctgatgaggagttgcgtttattagaattagaaaaatctttagctaaaaaccaaattgttcacaaaaattccgtgacttgttctcatacagatacacagataaaacaagattttcagtctagggttgaaccgaaaaaaaaacaggtattgttaagaattgttcccagtgttgaacacaaacagcaatctgtttctgcggtgacaattagcaaaccagtagatcatcattttaccgcagctagggaagaaatatctcagaaaacccatagattaggaattgggcgatcgccaaatatcaccgaaccaattcctatcaaatatcaatttacaggtcttcccgtcaaagaaatttcttatatttctgctactactaacgcccgcagtttacccgcttggatggatgaattttgtccaggggtaggtaggtgactggggactggggactgggaagaaagcagggggcagggtgcagggtgcagggggaaaggggaagttaataacccaatcaccaatcaccaatcacctataatggatattcatgagaaacaaaggggatggaaacaacttctccttcactgtttcctacttgcacttttaaccctacaccaccagctttagaacgaatgtaacctagtccaaaatgaccttcaggggtttctgtgtaactggtaagtttaccgactttttcatctcctatggtaatcacgcttcctggtgctgcgggagcgttaagactaattccccataaatattgttttacacctttataggtgtttaatctagcaatggtttcttgaccgatgtaacaacctttattaaaagatacagtttgccacaaaccgatctccaagggattatactcatcagtaatttctgcatcgggtacaggacgaccttgtaatattcgcaaagtttcccaatggcgatcgctcaattctaccgcatcatattctaatattttctcccacagtttttgtttttccgctacagggaaaatgagagtatatccagggatagctaacccactacccacggcaaaaatcatattatcaaccacaatgtgactattattgggtttaccaatcagtgaaccagcccccaatttttctacaatagcatcgctttggggtccgatgaggctaaaagttgcagtttcattagtgatatcagttaacgttaccttgtctgcaaaaaatatgtaacgatctaaccatgacatcaaaaattctcgccgatggggtgaaactaaaagtaacactgcatcatcgagaacataaccagttactaaatctatagttctggctgtggatgtaaccattacagtatcacaaccttcacctggtttgaggcgttgaaaatcattggtgctttggttgtgtaaaaaccgcagactgtcatcactagaaacacggatgcgtccccaatgggagcgatcgcacacagcaaccccttctttagctgcatgaatagctgctgcatttttattatcaattgcagatgttggcatagtaatcaagacttaccctattttcaggttttttacatcacaaatattaacaaatatagatacctgctgaccagtgacgttgataataaaataagctgttgtgcatttaatttgtataagtggaacaggcatcttgcctgttaaacaagagttcagaatattaggattatacaatttagctgtgtaacagcttacctgagatttatagagttaatccaaaatctaaaatttcaaatttcttaatctacgactctaattaagcctttaggttattcattttttcggtaaaataacttagatgtttaaaagttcacaggtttatcaaatatgacattagcggaaattggaattattggtggcagtggtttatacaaaatggaagctctgaaggatgtagaagaaatagaaatagaaacaccttttggctcaccatcagatgcggtaattatcggcactttagcagatacaaaagttgcctttttggctcgtcatggtcgtaatcatacgttattaccttctgaattgccgttctgtgccaatatctatgctatgaagcaattaggagtaaaatacttaatttctgctagtgcagttggttcgttgaaagcagaggtaaaaccattagatatggtagttccagatcagtttattgacagaactaaaaaccgtatttccacgttttttggtgagggaattatagcgcatattgcatttggtgatccaatttgtaaaaatttggcggctgttttagctgatgcgatcgcttctctaaatttacctgatgtcactcttcaccgtgaaggtaattatgtctgtatggagggtcctgcattttctaccaaagctgaatcaaatctttatcgcagttggggtgcaacaattattggcatgaccaatttaccagaagcaaagttagccagagaagcggaaattgcttatgcaactttggctttagttacagattatgattgttggcatccagatcatgataatgtcacagtagagatggtgattggcaatttacaacgcaatggggtaaatgcccaaaaagtaattcaagaaactgtaaagcggttaagtgaaaacccccctcaaagtgatgcccattctgctttgaaatatgcgattttgacaaatttagcaaatgcaccagccgcaaccaaggagaagttaagtttgttgttggagaagtatttatagggcattgggaattgggaattgggaattgggaattgggttattcatcctcccagtccccagtcaccagtccccagtcaccagtccccagtccccagtcaccagtccccagtcccctcacgctacctgaaaactaaaattcagacttgcccagttattcacatttaatacataagaatcagtagtagttccattgatttcagctttagctttagtaccattatgtaaatcttgcagtaaagcctgggcaacttctaaggtattaactaacgaaatgatgggctgttgatcagcggtgggatacctagccgttaccaaggctgctaaagtgtccgtaaaaggagatgtactcaaaattagttgatgttcacaaaacaatgctcgtgtaggcaacaaccagccaaaggtagtatcattttgggggaatttcagggtttgccctgggggaatgactatttcttgcagatcgggtttggtgtcagaaacacttgcttctggggacatctgccaaggataaaaagctatggcacttctagtattatttaaccccaccaacattaaataaatcgggcgatcgctcaaattttctacccggtactgcatcctactacccacgggaactgtaggaacaactgttcctggggtggtaaatgctttgttagttgtagtttccccactcagattgcgccatgtttgtcgctgcataactacacgaggcgagattttgttcatcatctctaaactcgctttcaccggtaaacgagaagaaccttcattttctgtcagtcgccataacttggcggctaacaaggtggaaaatttgggtgttaatctttgtactgcaactttaactgcttctccaatttctccagaagtattatttattagctcaccactgagagaaaaaagaccataacgactaggaacattttccactttaccaaatacgtaatcagcgccctgatctgctgaggcaatattgatcatgcgggtaatggctgcaaaggcactggtagcgtctacacgctcaattctttccagtcccgaatctaaggctactgttaaattaatattccggggtaacacgcgcaccgcttcttgtaccagttgcccaacttgtagagatttgctatgttcttgactagatatctgtgcttttgcagttaagccactgcgggactttaatattaactgttctccagtcggcaaagtcaatctcgaattaacaccatagtattgccaaacgtgcggggggattcctcctaaccataattgtactgttttaccatcgtcatccttagctttcactactccttcggctgtattgctttctataggaaaattctcattaattaaagcactttgaggatttttcttctcactgagtaaccctggtcgctgttcactacccagtttgtacatagaactactagcatgagagagaagaatttgtatagttgtggcgggggttacttcccatagatattgggttaaagcgtaggtaaataaacccgcactgaaaccggaaaacaataattctcccgctggttgctctggttgtgaagttgcttttagcaccatgacatttttagcaactgagttctgtgtttgcaggtggttgaacagatccagttctttgagtgctaactttgctgttgatggttctggacgggcgcgaaatcgcaaaccggcaggatgtaatgtactgttagcagagtagctagtatctaatactgctgttactcggtctgtggggagcgatcgcaataaacctaaaagattttcttctaataaatagttgacaaaattaatattttgtgtattttcgtcaactgggatcagggcattctgcaaattttctgggaaagtacccaacttgacacgactaccatagccgctaaagtggaaaatcacaacatcatcggcttttgcttgtttacccaagtgatctaaaatagctgcctcaataaattctcgactggcttgttcctcagttaaggtaagaatatctgaagttgcaaagccaaaacggtgaatcaaaagttctttttgcaattccacatctgtcagacaaccaccaagggcgggactttgtggatattgatttatacctattagcaatgccaacttgcggctattgggtgctgctaaagcttgataatagtgatttcccaaagtcaaccactcagcttgagttaaacccaatagtgccagtatagagccaattcttcctaaaaacgcacgccgtttcataaattagctgttaaccctcagtcgataaggtacagcttaaagggctgagggctaaagagtaaagtttgaaattagactttttgctactttttcagtctctttaaaccaaagctggttgttggatcattgcccgtgctaactcggctgccacttctggacgagaaaattctggtgggggtaactcaccacgacgcaacatttctctaacttttgttcccgataggtgaacccgttcctctggtttgctaggactggttttagtggtggccatttgtttggtgcgtgtgcagtagaaagcgtgttcaaacttcattggcagaatgcccagttcttctggcgcaaactcatcaaatatatattgagcgtcataagtaccgtagtagtcacctactcccgcatgatctcgcccaactataaaatgtgtacagccgtaatttttacgcactagagcatggaaaatagcttctctgggtcctgcataacgcattgccgctgggttaattgccagaattactcgatctaaggggtaataatgatccattaatatttcataacaacgcatccgtacatccgcagcgatgtcgtcttctttggttgcaccgactaatgggtgtaaaaatagaccatcaactgtttccaaggcgcacttttgaatgtactcatgggcgcggtggatggggttgcgagtttggaaaccaacgatagttttccagcctttttctctaaacatttgccgggaagcagcgggatctatttggtaggcgggaaactggggatgaggatcacgttgcagtaaccagatatccccagccagattcacagaaccttggttatatactacctgtactccagggtgtttggcttcatctgtgcgatatacatttacagcttcgcgttttttgtcgtaagtatatttttcgcttagttccaaaaccccaatgtactcgccattggggttatccagacgcactaaaccacctacttggagaggggcggcaacttcttctgtgacagatagtgtaatgggaattgaccaaacagtaccgttagccaatcgcatttctgcaactacgcgattatagtcggcttggttcatgaaaccagtcagcggactaaaaccaccgatcgcaatcatttctagatcggaaacggctcgctcatcaagggttactcgttgtaaaaattctgctttggaaagaaataattctctttgttcagttgaagcaattctgttaattaattctccgccgtggggggcgatcgcatctggttggtaactcaacgtgattccttccgtaatttataaatattgttattgttgcaatctatgtactaagttatcaaattgtgggtactttgtgttacaacttcacaaaaaaaattttctattgccggtcggaaagggtgtgattggtgactggggactggggactggttactgggaaaaatctttcctcctctactcccctacttcccctacctcttgaactcctgactcctgactcctatcccctaacgaaaagactttcaaaagcattccctaattatgctacctttgagtaagaaatatgagattgccaaatggtaatactatgcaaacggaaaaaatatctatttccttgccaacagctttattgcagtttgtggagaactacaaaattaccaaaggttgtaaatctcgttctcaagtaattgagttagcattagatttattgagatttcaagagttagagcaagcatatcgggaagcatcagcagaaattgacccagaatgggaattaaccctagaggatgggctgaaagatgaaacgtggtgaaatttattttgctaacctcagtcccgcagtaggatcagaaatggatacctgaacggttgctttaattaatattgtgtagtacaatagtattttagaaatatatattattcgctcgaaggaaaaaatttaagatactttttattactaagaatagttgctggaattatcaaaatcgaaggaaacaagtatgctcagttgtcatgatgttgcaaagtattttctatctcaagctgatgaagatgctggggatttaatttctaatctgaaactacaaaaattactttactacgcacaaggttttcatttagcactgtataacgaacctttgtttcctgagcctgttgaagcttggattcatggaccagttgtaccggaagtttatcatgagtataaaaactttggttctagtgcaattcccattcctgaagatattgatttttcgatatacgatgaaaaaactgttgatttactagatgaagtttatagcgtatatggtcaattttcagcttggaaattgagaaatatgactcataatgaagaaccttggaaagacacagatgtaagtgatgttattactcatgaatgtctaaaaaaatattttaaaactcagcttttagatgaagatgagtaagaaaaaaattaaacaaccccaaaaagataggggtaataaactaacaactccaaatgatcaaaaagaaatttctccagaaaaagctccacctgtattttctctacgttacctagagggtgaatattgtttaactaagtgtgagaaagatgatcaggttgcatttgctttaaaattgcatagactgagtaaattaacctggagtcaaatacactcgcaaggtagacaccaacttggttatgagaaaatttctagggatgctattaaagcaccaattcccaaatttattacagaagatgtcaattttattgcttttcgcttttccggtataaaagcaatggtaggctatagagatggtgctatattttatgttatttggttagatagaaattttactctttacaatcatggttaattgctgtttgcagatagtacattttttatctaacaattacactgtaaagatttgttgtgctgttaattgcaagttaggaaagatggaagaaacaagttgatcgttattttgaaacaattgcttttcatattcatcaccaactagggtacaaatagtaattgttggttgtttgggtttaccaatatattctcttcctccaattcccaaataatctacaatcaaatattcaggtacacctaataaagcgtaatcttcgactttacgggcgtagtcgtttatttacactacttaactaaactgttcaattatccccccacctaataccttttccccttcataccaaaccgcagcttgtcctggggtaatgctgaactgaggttcatcaaaaactaaccgcactctgtcattttctaaaggtatcaccgtcaccgctacaggttgggaacgataacgaatttgcacttctgcacggatgggggttgcaggttcagcaatggatacccagtttacccggttaactgtacattctccttgtgttcctttggtgcgatcgcccactaccacacgattattaactgcatctaattcaatcacatacaaaggttcagcagcagcaattcctaaacctttacgctgaccaattgtgtaatgatggacaccatcatgtttacccaaaaccttaccagtggtatccacaatatcacctggttttggtgctaaatatttatctaaaaatgcccgcattgaaccgttactttctaccaagcataaatcttgactttctggtttatcggcggtttttaacccatattcggcggctattttacgggtatcgcttttatttaattctcccaaaggaaagatcgaagccccaagtaaatcttgagacaaatcatataggaaataagattgatccttgttgcggtcaacggcgcgtaataattgataacgtccagtggtttcatcataagtaattcgcgcataatgaccggtagctatgtaattactttctaacttctcccgtgcatattccaccattggtccaaacttcaccgtcttgttacattgagaacaaggcaggggcgtaattcccacactataaccagagactaaataatcaacaatattcgcttgaaagacatcccgaatatcgacaatttcgtggggaacacccaattgttcacaaatactagccgcgtcgatcattccttcagagcaacattgacccttacctttcattaaccaaagggtcaaaccaattacatcatagccctgattgtgtaaaatagcggcagctacagaactgtcaacgccaccagaaagaccaacgacaacttttttcataatttacacttttaacagtgcttgctactgttcatctataataagggtttttgattttagcacaaggcaaacactttcccatagtagcataagtagggctttagcaaagctaaaccctgacaaaattctttcgttttggggtttcacccatctccgtaattttttattatcctgattaaaataatggctagtagaaaattttgagaaaccctggttacaaatatgtctcatttaataacacgtcaaattaccactgtacccgtaatttctttacttgtgggtggatgcttgatgcttacttgcgaagatagtctagcacagaccagattaccagaattgcaaccagcagtggagttttatcaaaataatcaaaactatcaaacttctcaacctacacaaattagtcaatatggacaaaactttgaaagatatgttgtctatgttgatagcgataactcccaaattctacaacaagtgcgtcaaattgaaagtagtgcttatattcgtccgtttaatggacgtaatattattcagtcaggtgtttttagcaaaccatctaacgcccaacagcgtgtgagagaattagaattaaatggtattagtggcgctcgcattctcagcttttctaacccagaacaaatctcctatttctctggtagagaagtaccttattctacgggagataattttcgtaatgtaaatcctaatgttcaaagagaacaaggtagatattactacgttatcattcccaccagcagtaataacttacccttgcttggtagagaaattcgacaaaaaatagatggtaatactaatgtttttatgagaactcaaccacgaggagcgcatatagctgtaggaggttttagagaacgccaagaagcagaacaatggaataattatttgcgaaatttaggttatgctaatgctagggtttattatggaagataggtgacaggtgattggtgattggtgattggtgattggtgattggtgattggtgattggtgattggtgatagaaaagaataactaatgactaataactaataactaataactaataactaataactaataactaataactaatcactaatcactaatcactaatgactaataactaatcactaatgactaatactaatgactaaagaacaatttgtagtcactgctgctcaaatgcgtgacattgaaggacgaatatttgctgcgggaatgccggttgcagctttgatggaaaaagtagggagattaattagcgatagcttcgctcgccactggcaacgcctacaatctatcatacctcttagccccctttttcaaggggggttggggggatctaatgtaggaattttagcaggtccaggacacaatggaggtgatgctttagttgtagccagagagttacattttcaaggttatcaagtttggatttatcaaccttttgctaaactcaaagaattaacttctcaacatttacaatatgcccaaagtttggggattccttgttatcaagaactggcagaattaccaagttgtgattttttaattgatgggttatttggctttggtttagaaagagaaattaccgggaatattgccgaagcgattaaccattttaatgattggaataaaccgatttttagtattgacttaccttctggtttacacacagatacaggggaagttttaggtactgctattcgtgcaaatcataccttttgtttaggtttatggaaacagggtttattgcaagaacaagcattagaatatattggacaagcagaattaattgattttgatattcccttagctgatattcatgcgattttaggtgaagttcccaaaattaaacgcattaccaaaaccacagtatttgataccttatctttacctctttcccctacaacccacaaatataaatctggacatttactattaatttctggctcaaaacgttatgcagggggagcaattttaacgggtttaggtgcgcgtgcctcgggtgtaggaatgttatcaattgccgtacctgaaagtattaaaccgcttttaatttcccatttaccagaagcgttaattatcggatgtcctgaaacggaaaccggggcaatttctcatttacaattacctccaaatacagatttgagttcatttaatgccattgcttgtggaccaggtttaacaactgatgctaccccaattattgaacaggtaattaatagtgatgtgccgttaattttggatgccgatggtttaaatatcttggcacaattagggactatttccactttacaaaaacgccaaaatacaacaattctcacaccccacacaggtgaatttcatcgtttatttcctgatattaattatcaagatagggtgaaagcagtacaaacagcagcatcacaaataggggctgtagtgctgttaaaaggggcaagaaccgtcatttctaaccctgaaggtgtcgtttggatcaatgcagaaagtacgccagctttagctcgtggtggtagtggtgatgtattaactggtttaatgggcggaattttggcgcgggttgttaataaacaagttaatattgaagatgtggtagctgctgcggcttggtggcattctcaagggggtattttagcagtaaaagaaaggacagaattaggggttgatgcgtttactttgacgcaatatttaatcagggttttaaagttaagtattgaagatattttgtaggtattagattatctgagtttatctgcattcaatggaaaatattgtataatattgataagtacccacaggaggtaaaaaatggcaacacctcagctaaaaagtaccacaaaaactaatctttatgaacaagatttttacctatggatagaaacaaccgcccaacagttaagacaaggagattttacagaagttgatttaggaaatttaatagaagaaattgaaagcatgggaagaagtgaaaaacgagagttaaaaagccgtttaattgtgctactaatgcacttattaaaatggcattatcaacctgaaaaacgtagtgcaagttggcagagtacaattactgaacaaagaatttgtcttgaagaattattagaagacagtccaagtctacaacctttattcacagaattatttgcagattgttataataaagctcgtctgaaagcatctcaagaaacaggaattaaactaaatttatttcctcaacagtctccttttagtttagatgaagttatgaatagtggtgtagatatgtagaatagttaaatgtgttctacctgaaatataaaaccaaatctaacttattttgatcaacaaccacaggaggttaaaaatgacaacacctcagctaaaaagtaccacaaaaactaatctttatgaacaagatttttacctatggatagaaacaaccgccaaacaattaaaggcagggaaatttgcagaaattgatttagaaaatctgattgaagaaattgaaagcatgggaagaattgaaaaaagaacattagaaagtaatttagtagtgcttttaatgcacttattaaaatataaatatcagccagaaaaacgctctaaaagctggctttcgactatctttgaacatcgccggagattaaataaacatttccaagatagtcctagtttaaaaactagtttaaaaatttttttttagaaacatttgccgaatgttatcaagatgcacgtcagcaagcgtctatagaaacaggtttgttacttgatatttttcctgtagaatctccttttaataccgatgaatgtttaaatcaagactttttacctgattaaatgtatgattattttaatgattattttataaatattagcccccccttttaagggggttggggagatgtaaaatcaaactagggtggatctaaattaaccccagaatttacaaaaagttccctattcaacttttcaattacataatttgcaactacggtttcagaacatttattttgccaaaaaattaatgatttatagtgcatttcttccatcagttctttattttccaacagattttttaacacctttggtaattcttgccaattcttgattttaatcaccggcgcaccttctaaataccatcgagaaggtaaagcttctgtgactaaaacacaaccatatttcatcccctcaaataaccgagtggtttcaaaagatgtacctctaggaacaagacagatttttgtatccatcatgatttcactatagctgcgttcatccgcttgagttctattgtgataaccaccagtaattgataattcaacgttaaattcaggatgtttttcttggaaactttttaaagttgataacatcaattttctagataatgctttaggagttcctaaccaagatttaaaagaccagataggatattgtctgtggacaacactcccggaaaaataagtatcataaagccgatctgcgatatttttgatgggtaaatccttggagttattgtaacccaagggaagatcatagataggaggaattagacctttacctaataccaaacttttgaatttatgccaatgataattgatccgacctggtacaccaactaataaaattcttaaaaactgaattaatgtcagtaagtttaacaatgaaggttgtacaatagggttacatccgagaatggaatttgtgcctacacacttaaataccgccctgactttgtgagcatatttgggtatacgataccattcatcacccaatacaaaaactaccacattttctccataagatggtagttcatcaatttcattccaagtgacataaaagactaaaccactgataagagaacttttttctattgcttgaaatactttaccgaaataagtagttaaagcaaagtcaatgggtggtttaggatcgtatatatcccaagcaacaggttttttgtctttagagatgtagagataatactgattagcaagagcagtaattacagccatataatgtaggaaggatttgtgagaatttacccaattttttgagataaaaaaacactaagacataaaaccccaaactctcaaattaagttggaggtctaagtattagctgtttatttctcagcggccttttctaaaatagccttgcttcaatttttccatactttcttgtgtagacaagacagttatacaaaatcatcatggaaaattcataattctttcgtaattaatttctcctgactcctcaaataccatgactcttcccaaccacccaatgacgacggaaaaagcgagataaagcagactcttccaaagataaataaattggtctaccatgaggacaagtctgggggttgcgggtgcgttgccaatcatctaataattgctgcatttctggtaaagtcatcggtgtaccattgcggatagcactgcgacaagcaacagcaacctgggcggtttgtaagtctcctcctaaacttaattctaataatgcttcggcgcaatcttcccgtgtttttaacattgcgggaactgtacgtacagcccaaagtttttccccaaaagtttcaatatctaagttaattctttgtaattgggcaacctgagaaggtaataattgataaagaataattggtgtttctacaggtactatttcccattcatcacagatgttttcatataaaactctttcatgggcaatgtgttgttctactaaccacattcctcctggatgttcagcaacaatatacatattgctcacttgggcaacggcttttaggtaattctgtgtttttgtatctgcatttttagaactaaagttataactaccttttttttctgcaactttaagtaagttacttactctagttgtgtgaactgaatcttttaaattagcttcagaaatatagaatgcttgattaattgtttcgctaattttttcttgccaagcattaatttcatttaaataaatttcggttttagctgggttacgattccagttgatttgatcaggggaaatggtaagatgtaaaaaacaaaccggatagcgatcgcgtggtaaggttttatgaaatgctgcaaaaattgtttgttctaattctggtgatttaatgattctgccattaatggctacttttacccagtcaggtttatgacggtgacatctatctggtaaaccaattactaagttaattgtagattgcggatttggtatttctatctttaattcttttaaatcacctggtttaatttgggtgagaatttgcggaattaatttacctgaacttgcagtttgacaaatagtgaaccattcccgatcattttgccaaacttgataagtaatatgaggatgacataaagcaatttgttgtatgatcccttgtacagctttcatttgctgtgtggcgttcggtaaaccttgacgacgtgcgggataattagcaaataaattatcaacagtaacaacagtaccagcagcgatcgctactacttctgttttaatcacttccccatcattgccataaacaacccgccatccttcatttcctcccaccggacggctaaaaatctctaaatctgctaaagttgctaaactatgtaacgcttctccacgaaaacctaaacttttaattttccacaaatcatctgaagaatgaattttactggtagtatgtgctgttgccgcttgttgtaaatcatctaaattcataccacaaccattatcagctacccgcactcgccattgttgtgtccataaagaaattacaatgcgcgttgcaccagcatctaaggaattttctactaattcccgaaccacagaagcaaaactatctattacttctcctgctgtaatcagatatacgacttctgtaggtaaagattgtattgtagatgccatgttccagaattgaaaattaaaaattaaagattaaaaattgtcgggatgtacagataattagtttacaatatttaggtttattttaagcttataaactgtaatcataattttagttaacatctctaaagaattttagataaattgtcaaaaaaaccgaattttcaaagtatttttgatagattgctggtaaagtcttaaactaaaaacgccaatgagtaatttagttgctgatgttaatgaattaatatcgcgtctagaatggggtcaacccgcctttacaattattgatgtacgcgatcgccttacctacaaccacggccatatcacaggtgctatttccattcccctcaacgacttagccgaccgtgcaaaaaccagcttgcataaacaacgccaaatctacgtttatggcgaccatgatactcatgctaatctggcagttagtattttaggcgctgccgggtttagagatgtctgtgttattcaaggtggcctagacgcttggaaaacagtaggaggcgcgacagaaggcgtttaacagttaatgaagacaacaggcaaaaggcaacaggcaaaagttgataaaaattaatcaacttttatcaacttttatcaactttcatcaattttatcttgtgttctctgcctttgcttcttcctcaatattgtctatgagaagtgacgcaagattggactaaaaacctcattattgcgtaggggtaattcatgaattacccctacttttgtgctgttttgcttaattcctgtctatatcaaaaccttagctggttcaggtttcaataaaccacttaacaaagatgcaggacgttgatcatgaggccaagcgaaagcatggcgaaaagcagcatcctgacaggcctgtaactgttggaaattaataatgtcgtaagtcaagagattttcatattcaaaaggtaaacggacattatgtaaacctgcgttatcagtacagatggcaatatcaaccccagtttcaaaacatcgatcaaaaaccaattttaactgccggatatcctgtaaagttcctgtttttaagtaagtcgtgggacaaacttctaaacattgccctcttctggctaaatctggcaataattgaggataaagtaaaggaatttggataccgtgaccaattcgcattaaataaggtaaaagttcgggataacaaccatctttggtttcataaagatgtccggtagtcttcaaacccaaagaacgggcatagttatataaactaatccattctggcattctttccccataaatgcgatcgccacctgccacatccaccgcacaaacatattctctattttgtgctgctaaatccacaatagctttatttacctcaaaaggtaaacgagagtgcatacagagaatttgactattaacaatgggatattccaaagaatgactcgctttacccacaatttccacaatttccgccatcttatcaattctggcgttttgactcagatgttcaggagtgcgtaaatagggagtataacgcaattctaaataagccaaattttcaaagatatacgcaccacgcaacaaacgatagataaagtaaggtaaagtttccacagtttgcacactttccactaaagtatgcaattctaaatactcatctaaagtattgcggggacgggtgtaaaaatcctcaaattcagaatattcagcaaaccgagaaattaaatctgtagcatggcgctgaaaataccgccacaacacacgggggacgacggaaccccccaggtgtctatgtaactcagcgtataaggccataatggtaacttttagataaaaattttactaattgtaacaaaatttataaataaaaaaatatattaatcaggacttacgcaaaagggaacgaaagtaggggtaattcatgaattacccctacgcaagcataaggttttcagtcacatcttccgtaagtcctattaataattttaccaaccaccagtacccagtcatcagtcacaaagttattgacaaaagctaaaaaaactgctaataattaatatttgtggaaactttaccctttaatataatctcttggctaacgtcattgtcataggcgctcaatggggcgatgaaggaaaaggtaaaataactgacttactcagccgctccgcagatgtggtggtacgttaccagggaggagttaacgctggacacacaatagtagtccaaggtcagacatttaaactgcacttaattccctctggtatattgtatccagataccgaatgtatcatcggctgtgggacagttattgatccacaggttttgatacaagaacttgaacaacttgaacaactaaatatttctactgctaatctgctaatttcagagacggctcatgttaccatgccttaccatcggttaattgataaggcatcagaagaacgccggggaacgcataaaatcggcacgactggtagaggtataggtcctacctacgcggataaatcagaacggacaggcatcaggatgttagacttgatggatccggctggattacgtgagcagttggaatggacaataaattataaaaacacaattttagaaaagctgtatgatattcctcctcttgacccccaagaagtgattgaggagtatttggactatgcagaaaggttgcgtccttttgtggtggacacatcaataaaaatatatgatgcagtgcaaaaacgacgtaacattttgtttgaaggcgcacaaggaactctactggatttagatcatgggacctatccttatgtcacctcttctaatcctgtagctgggggtgcttgcgtgggtactggtctaggaccgacaatgatagatcgggtaataggggtatccaaagcatataccaccagagtcggcgaaggaccatttcccacagaattagatggggaaattggtgatttattgggcgatcgcggtgcagaatttggcacaaccacaggtagaaaacgccgttgtggttggtttgatgccgtgattggacgttatgcagtccgtattaatggcatggattgtatggcactaactaagttagatgtgctagatgagttagaagaaatcaaagtttgcgtggcttatgaaatagatagccaacgctgtgatcacttccccaccagcgcccgtcagtttgcccgttgtcgtccgatttataaaaccttaccaggatggcaagtaccaaccactgaatgccgtagcttggaagacttgccaaagcaagcattggactatcttaaattcttagcagaattgatggaagtcccgattgcgatcgtctccttaggagcaagtcgtgatcaaactatcattgtggaagatccaattcacggaccgaaacgcgcactgttgcacgcagatggtacaccagtttaataattgacaattgacaattgacaattgacaacgaacaaccaaccactaaaacattaagagtagtatggcgatcgcattagaatctcacaaacgtccagaaggtagcaagcccaatgctttgcgccgttctggtttaatccccgcgaatttgtacggacacaacggtgcggaatcaatttctttagtagttgatgcaaaaaccgttgaacgcttgctcaaacaagctgctcccaacaaaaccgaaattgaactcaatattcctgaacttcagtggactggtaaaaccgtactccgcgaagttcaaattcacccagccaagggtacaccttaccatctcagtttttttgctgctaaagcctaaaagatggtgtgcattttatcttccatagcacttaaatagcacttaaatagcacttaaattttgtcataattgctgaatgaaccagggttaaacccctggttttttttgttaagctatcagggttaatatagcaggagtcaggagtcgtaggggcgaagtaggggcgaagcattcggaaaataaccttttcataaaattgataattggtcgcctgaatgcttcgcccttacaggaaaatagccttttcataaaattgataatttatcgcctgaatgctgatgcttccagcacgcttcgcgaacgcccgtacaggagtcaggagtaaaacccttattatcactagcttttagcttttgagaatgtcctaactactctgtctacagctatatcttataaaattatttccgctgatacttgtatgggttgacctgtgtttatctgcggctaaaaatccaacttccaaaaatccaacttccaacattcaacactggtataaatattatgacacaagctaatcttccagctttaattgaacaaatgttacaaccaggattttatcctcatggggtaacagaaccaattcaactgattcaaactcatgcttcttatgtgttactcactggagaatatgtctataaactgaaaaaacctataaattttggctttttagattattccacattagaaaagcggttacattgttgccaggaagagttacgtttaaatcagcgaggcgcaggtgaactgtatttgcaagtattagctattacctgcacaggagaacaataccatttagcgggaacgggggaagttgtagaatatgcgctaaaaatgcgtcaatttccccaagatgccttatttagtgaacttttttcccagggtaagttaaatgaaatgcacttgcaggaattaggacgggtagtatctgaataccatgcaaagtcccagacaaatgattacattcgcagttttgggcaaatctcagaagtgcggttgactattaatgagaattataaccaaactttaaagtatattggtggtccccaaacccagcaacagtttacagaaacaaaagcatatacagataacttttttaaccaaaatccagaattatttactagcagaattaccaataactacatccgtgaatgtcacggggatttacacctgcgaaatattgctctttggcatgataaaatcatgttattcgattgtatagaatttaatgagccgtttcgctttgtagatgtcatgtatgatgtggcatttacggtaatggatattgaagcaaaagggcggaaagatttagcaaatgcttttttaaatgcttatgttgaacaaactggagactgggaaggtttacaggtattacctttatatttaagtcgtcaagcttatgtgcgggcaaaagtgacatcatttttattagatgatcctagtgtacccgcagatgtgaaagaagaagccgcaaaaacagcatctgcatattatcgtcaagcttgggagtatactaaacccaaacaaggacaattgattttaatgtccgggttatcaggttctggtaaaagtaccactgctagatatttagcgcgtaaactaggagcagttcacttgcgttctgatgcagtgcggaaacatttagcaggtattcctttattagaacgtggtggaaatgagatatatacaccggaaatgactcaaaagacttatgacagattgttaacattgggaattacactggctaatcaaggttggcgtgtgattttagatgccaagtatgaccgtcaacacttacgccagcaggcgattaatcaagctactcaacatcaattacccttacagattatccactgtacagcaccgttagaagtattgcaagaacgacttgttaaccgtactggtgatattgctgatgctaccgctgatttattggtatctcaactcaaccaagctgaaccattcacagacaaagaacaaccctacattaaaatcttggatacaactcaaccactagaggaacaattaaaagaatttggtattgatagatagctagaatttgctttgattccttatttcctatttcctatttcctgaagtgatataataggataattaaaacgtaaatattcagccgtcagcggtcggtttccgttagcagcaggttcaaaaacacgaatttcatctggcaaattttcctcatcaacacttacagaatgtggcaatattatgatttgagcaagaatctgtctacttactaggtaaaagctgattactgattactgattactgatagctgaatgcttacattaaaactgcgaggtgaatttctatggtaactctagcacctactcacagcgacacttacaccaatagcctcatcctccataatatttcttggaatacttttgaaaggattttattagaaacaggtgatactcgcaagaacaggtttacttataatcagggaatcttagaaattatgactccattaatgccccatgaacataataaccgtttgttacaaaatctcattattgttttagttgaagagttaaatctgaacgttaaaagcacaggttcattaacttgtaaaagagaagatttagctaggggtgtagaacctgattctagtttctatattcaaaatgaaccaatcatgagaaataaaaccagtttagatttaacccaagatccgccacctgatttagttatcgaagttgattatgctatttcttctattgataagttaccaatttatttagctttaggtgttcctgaagtttggcgttatgatgaacctgtaatgcaaatttatagtttagctgatggtaaatatattcctggtaatagttcaccaacctttgctaatttatctttaaatacagaagtgcctcagtttttagcttctagcttagaaataggtgaaatggcaatgattaggaattttagaagttggataaaaacgcaagtagaaaatattaaataaatgtcagaattaggatatccaggatttgaggatttacaggattactattaaaaatagtccagaaaaatcgttattataaaagtgatataatagaataattaacaatgcgaggtgaatttatatggtaactctagcacctactcacagcgacactcacaccaatagcgtcatcctccataatatttcctggaatacttttgaaaggattttattagaaacaggtgatactcgcaataacaggtttacttataatcagggaatcttagaaattatgactccattaatgccccatgaacataataaaagattgatagaaaaactcattgatactttagttgaagagttaaatctgaacgttaaaagcacaggttcattaacttgtaaaagagaagatttagctaggggtgtagaacctgattctagtttctatattcaaaatgaaccaatcatgagaaataaaaccagtttagatttaacccaagatcccccacctgatttagttatcgaagttgattatgctagttcttctattgataaattaccgatttatttagctttaggtgttcctgaagtttggcgttatgatgaacctgtaatgcaaatttatagtttagctgatggtaaatatattcctggtaatagttcaccaacctttgctaatttatctttaaatatagaagttcctcagtttttagcttctagcttagaaataggtgaaatggcaatgattaggaattttagaagttggataaaaacgcaaatatcagagaatgtctgaatcaggatatccgggatttaaggatttacaggataattcgtaattattttgtctgatagcgaagcgtggcgtagccatatcaggatgtccaggatttgaggatttagaggatttataggatggttatttataaattgtctgtgaatatttagattttataaaataagactacaccaaatagtaaaagtataaaatatgtagtataattaacttgaataagtttgatattgaggatattcaaaaatgtatcaaaccgatccgcccttagcggccaaagaaacattacccacaatgtatgatctgcctagcgaagatccagaggagaaaggtttgccagatcaatttcatttattacaaccacaattattagcagatacatttcttcctcctcattataaacaagaggaactttttacaggaagtgacataaatctgtattttgattctcgtcatccattgtggtataaacgcccagattggtttgcggttgtgggtgttccttatttgtatgaaaaaagagacttgcggttaagttatgttgtttggcaagaatctgttaatccttatattgtggtagagttattatcaccaggaacagaaaaagaagatttaggtcaaatgttgcgagatgtggaaaaaccacctggtaaatgggaagtttatgaaaagattttaagaataccttattatgcgatatttgatcgttatcaatcagaatttaggatgtttgaattaaggggcgatcgctatattgaaactttgcgatctacaccttcagatgctaattctcgttcttggattccagggttagaattaggtttaggaatttggcaagggagttataaaaatgtacaaatgccctggttacgatggtatgatcaaaatggtaattgggtattaactcccgcagaacaggaaagagaaaaagcggaacaagaaagacagcgtgcaaaccaagaaagacaacgtgcagaacaggaaagacagaaaaaagaaaaattaattgcccaactgcgtgctttaggtgtagaacctgatatagattaaaattcagatccccgacttctgcgattaattataattttttagaaaatatgaaattaagaagtccgggatctttaacatctgatatattatttttttcctacttccttttcttctcctaaacgagtaaaacgaatttctattcttcttcttgtttgatcatcttgtttatttttcacaggtgcaatttctgctaattgtccatttggtaatattaattgtgcagcagaataagcacgaaatgataaaccttttaatctaccttgtttgttttgaatatcacgcaatattttcacaactgataacgcacgcattaaacctaaatcagcattagaacctgattgaagttttgtaactggaaatgtgccactaactactttttctaaattgacatctaaattactatttgctttaccattaggtgtagcatctgtatgtccaattatttccacaacgttaataccatatttgttgctggtactttctattgctggtactatttctctgaaaatatagcttaacatttgaggaggtatttctgcactacctaacgcaaatctataatcaccttgatctttgataactatgattggtggtgcatctgtgaggcgtttttgattatctaactctcgtttcaattcctctacttctctttctaaatctttaactttcaaaggtaaattgactgaatttttatcaggtttattttgaacattagttatttgtgatatgataatagtgagaaataaaaataacactaagatcataaacgcattggacattaaatcagtaaatgcttgccaaacgtttaactcttcattgtattcagtgtagcgtgaacgacgtgccataatttcatgcttttacattacaaaacaatattgataaacttatttggtttaaattcatgattcaggtgtctttattacctgtctgagttggttgatagaaactttagtatcctgtaaacttttattacattcttgaatatttttaatgattatctctaaagcttgttcatttatatttgtttgcttgttgataccctgaaggatattattatttactttttgatattctgaagttaattgagtgttgttattttctaataggttgatcaaatctactttaatagtctccatcttcatgctaaattgattagtagatccttcaagattgttgattaaagtctgaaattgctgttgattatgatcaaggttttgggaaagatgagaaataaagcgatcgcctaaattatcaaatgctaaattcatctgttctgtattgtatttgacagactctaataattgattcagagcaatttgttcttgagataagttagaaataaagcgatcgcctaaattatcaaatgctaaattcatctgttctgtattgtatttgagagactctaataattgattcagggcgatttgttcttgagacaagttagaaataaagcgatcgcctaaattatcaaatgctaaattcatctgttctgtattgtatttgagagactctaataattgattcagggcgatttgttcttgagacaagttagaaataaagcgatcgcctaaattatcaaatgctaaattcatctgttctgtattgtatttgagagactctaataattgattcagggcgatttgttcttgagacaagttagaaataaagcgatcgcctaaattatcaaatgctaaattcatctgttctgtattgtatttgagagactctaataattgattcagggcgatttgttcttgagacaagttagaaataaagcgatcgcctaaattatcaaatgctaaattcatctgttctgtattgtatttgagagactctaataattgattcagggcgatttgttcttgagacaagttagaaataaagcgatcgcctaaattatcaaatgctaaattcatttgttccgtattatgtttaacaagttctgcattatatttcacaaattccaataattgatttagtgaaacatctacatgacttaaactatcagctttatcactaacttttatttctacttgctcaagtttagtcatagcttcagataaactattagcaccttgttggagttgaggaataatttcacttaactgaacttgattattttgatgtaaccctaataattgaacagaagtttgattaacaactttaatatcctcccctaaattgattaaattattacttaaactctccatttgtgccaacaaatttataatcaaatcagttgtttcagccaaacttgcagcagattcagaaaatttttgttgtgtattacttaaatgctctgtagcatttgataactttaaaggaaaatcacttttattaaaattttcagccgcatctttaaaaacttgggatgtttgttgcatttccgtcatcgaatcttgcaaattatttattgaatatttaaactcatccgcagcaccagaaatagttccagcagcagcatcaaatttttcataaactcgtctagctaaatccatagtttgtttatttccatcagcaatttgttgtgctaccttacccatagatttttctaccgcttcgcgcactactcgaccaaaatttgttaaaaattcatcctgctgatctaccattctattaactattctatcaagacgagtatcaccttgcacttgtggaaaataaatattatctagataatcttccaaagaactaagcagacgatatttagcaagtccactattaaaaatgaaattgactaccgttaacaaagcactaaataataatcccgttagactggtagtaaaagcaatactcattccttctaatggtttctttaattcagcaactaaattactgacatcactagcattagtttgattaattgcttgactgagagtagataaattaatagtaatacctaaaaaagtacccagtaacccaaatgctaacaataaattgggtaagatgcgacataaataatctatttgttcacaggtgaaacccttgattttttcttgactataaacttgatcaattaatgctgttgtatttacctgttctaattgttgagatgcttgtttaaatctctcctctaatgtttcaataatttttaaccgtttcccaggtgcttgttttttaatcaatctttgaattttattactcaaatccattaaatatttgtaaagagatatcctaagaaaaatagttaccagagatggaagaatcacaagaacaacagtgataaaaattaaataaggtggtaggggtggaatcataaaaaatacctttggtagtgcggaaagatggttaaaagtgggtagatgtgaactacccataacaatatattttaggttagatatttgtcaagaattttttgcatttgtatctcataatattcttgaggaatcaagttattatcaaataactcttttaaacgcgctaattctgagcgtaatttatcttgattttgagtatcagaattatccagaggagaactagctactatttccccaacaagagctttttgattttcgattttatctctaggtggaagtgaattttgatttctatttttaaacattgcttccatcttcttccaaaaacgatttattaccccctctttaattgtaggttgcatattatctggtgaaacatagactttttggatatagggaaaattaggactatcttccggtatttttttcagtttatctggaaattgcctgagtttaggtagatattcattatcccataatgtgggatcattttgcatatcagaaattacatcatctaatatcttttgtaaagtattggccatattgcggttattagctaaatcttctaaagcttgcatccaatttgcactcaccgcagcagtgtaataactatctcggaaagagtcataatgttgaaattctacctcctgattttcctgattttcgtttaacaattccaaagctaaacagggataaaaaatatcctccagttgttcaattattcttgcatcagggggaatgatatcagaaaaagaagtgcgagcatcattgtgtaaaaaagatgtaccagaattttgttctctgatatatgggtttcgcattctttctagactactaattaatctcaatggaaaacctgcatactcattgacaattaaaatttcatcatctgcttgtattgcttttaaaacacttgaggaaattcctaaatcttgtgttagcagttttttaaattctgtcacatctgattcgtctgtatctttatatcctattaatttactacttttagcaggatcatctcgaaaataaggatcattcaaatttaaccgcagtaaaggttgagcttcctgcataatttgtgttaaccgagtagcacctgcggaggaagaatattttttcatgaagcgtttaatcacagaattaacaatattgctaccacgaaaagcaaatattttcacaactttgggatcaatttcctgttttatttgagagtatgtaactctttctcgattgagtaaaaatgccaaggatggatctttaccagttgcttcggtaatcgctgaacttgctaatactaattgagaacgcagatcattttccggtaacattgtttgatagcaaagttctatatcttcactatcaaaaatagcctccccactcatttcatcaaaattcaattgttttaattctcgttcctctttttcataagcactttgtaagtcttctatcaaactgctaaaagccgcaacttgtttttctctttcttgaatgtgcttttgtaaatgattaactattttcagtgtctcttgtaaaactgttaaatcaaaattatgcctgatcagtttacaaacttcctgaatagcttttttagattcatcttgaaattggctattttttaaattgccaatcagcataaatttattttccagttcttcaattatttggtcagtattatcccattttctttctacatcttctatgcgtttcattcctccacaatcagttatggattcttgcaaatctcgttgatatttatgcagttcatgttgcagtgcttctaaccaattacgggtatttctaatagaaaatttagcttctatgggtgtaagtagctgaatcaaataatcatcaatattggtattaagttctttggcaattttaggggcagattgaattaattttgttaaccaataaccacgaatactttccgtttctcctggttgtacagtacggaattgtttagtaaattctgtggctaactgttgcctaacatttgtccgatcatctttatttttacattcagagattaattttaataatttagtttgccaagttttcaaactattactaaaagtcttgctagattcttctacagactcggataatttattaattaatccatcacgttttgctagatcactttgccagtgattttgaatcaaaaattgttcaagtaagttgacaggatcaggactttgacctttaccatttaaccaaaatctaactaattctgaactgactttagttaaggctatttgaatgatcgtatcacggggaaaataaatggcggaaagtccaaatgttaagtatctttggctattaggacgggggtgtttatctggttgaattatgtgttgtaaaaaattatctcgatttcctttaactactgaaccaagttcaccagaaagttctaaggctattttatgggcaatcacattacatagtttaccttgggtgagtatttcatattctccaccagtctgattagatagcaaataagcataatcaaaaggtggacgtttttctttaataatggacagattctcaatatcataacaagctgcaaattctgtaccaggattactgtaatggtttaattcttttaatgcagcataagtattagcattcatgttaggagtattaccatacaattctggactaattactaaatagccaaaaatgcgagcgccttgatccccataaagatttcttaaactataagcaacatccaaaaacattccgcttcccgtaccaccacaaagagaaccaacaacaaaaatacttaatcccggttctattttaaaacctgattttagtaataaagattcgtgtcctctggtgcgtctttctgctgtttcaattgctgttttcaccttttgatagttgtgaaaaaatgctaatcttcctacaggtctaataccttttgctccctcttccactgctttaatattccgcaataactgaggagggaaccagatcccaatatgatcataaggtccgtaactattatattctgaacgtcgttctagtccgtccacaaacatggtgacatctttcgatgacatggtagcactgactttttcagcttctttaaaacttaaatccacaccatgatagctacttcctgttctaatacctgtaacttgggttgatgctttatctgtgtcaatatgaacaaaactgacaattggtaaattatttaaatctccataacggtcaacaattaaccgtctaattcgcattaaaacatctctaccagtaccacccaaaccgatacaaattgtacggttaattcctctatattgagtttcgtttgttgttgcttgattcatagtttttaccctgaatactattttttgattttgatggttatttcgtgttcgcgctggcgtttatctggacaatttaaggtaaagttaaaatttgtgatcagagttcttgattttacttttttgttgttgagttcaatcttagaatctgatgtaggaactagataaagtttttctcctttacgttctaaataagcttgtaattctccactgggacagtctatagaatctacacaggtaggatcatattcaccaattgcaatttttttattatttggtaatctacatatttgttcttcatgttctccattcgattcaaacttgactcgcacatcccattttttttgtaatttggcaaatttgaaggtactccaacaggcagcagccaatattaataataaaatgaaactgggtagccataactgtttcagcaaataaggattaactaaacaagtttcttgacctcctggtgctggtgtacaaaattcttgaaccgtaggatttaggtctattacagatagtgtataatctttattatcttgatttttaatgataagcgatcgctcttttaaaggcaaagtattcaaccaattttgtctttcttgactttccagggatgtagcaattctaaacggactatcacgaggggtttctatccaaacttctgacgtaattcctggctttgtaaataacggtgcatcagtaacccaaacaaccgactggggtttaattggttgatttttcgtcagccgattttgattaatctgtgctataccttgatatactgttaactctgccctttgaatatctgtaccataacgatttggatcataatttaacggaattttcgctaaaattttattaatattttctatatttttatgattaaaatatatcggtgttcccaatggattttctagagaaatcacatcatcagaaaccacattttgagcaaaaggaacaacataaacagaatctcccggtttgagactgtcttcaactatttgacgtaaccgaatacgtccttggtcatttaaacccacactttccgttacatcaatggccaacacaacatcacgtttaccccctcctaagagggacactaaccgcaaaccatccttttgtgtgcctgtcagtggttgtccaggggcaatttttgtcaaagtcacaaaccctataactcattaaatagtatatgtataaattttatatcacaaattacactacaaataaatagtaagtctagtttaaaagataagtcttatcatagtatttttactgtttttaatatacatacatttatatacatataaatccgcaaatgcaaaaatttaatattatatgcactctttctagtattaggtttaaataacaaaaatataatcagatataatcaaatattaacacctgtagcacaaaaatatcatgaatttttgcctatattaatatttttagtaactatttccacatcgctaaacctgcatttagatccccgacttctttgataaactaacattatttacctaagattaaactgagaagtcggggatctttgttaacattattaacaacattattctatcctcctaaccattcttccctagaaactccagcctgtcgtaataacctggataacaaacctacactaatatcaccctcatgagggttaggaataataacagttaaatcaccccgtcgcatttgtggatgtttccctccagcatagggtccttcaaaacctaactcacgtagacgctttactaactcattccaagaaacaggagttaatctaggcattttatacagattgtgtaatttgatttaaattaatatcctcaattacaggaatatctaaccccaaacgtaaacgcaaagccaaccaatcacttaacgcctctcttaactcacgccgacaaccttctaaagttttataatttgcccatacaccctgtaaacccggaatttcaccccaataagtaccatcatcttcaataatttcataaaccgccaattctattgctttatcaatataacttgccagcattatttaccatttcctttactaattattttcgcaatcaacgatattaaaaacttaatcgtaagtgttaaccatattttcgccacttgagaaacaaatcttacttattttagcataccaagactattaacaaaatatcaattaataaaaacctttcaaccaaaaattaaaaccctctcctcctctctgcgcctctgcgcctctgcgtgaaaaaaaacaacctcataactacttgaaaaaaaccacataaacagctaacctgcattagcatcgaaaacgtaattttcaaaaccatgaacacccacccccaaatacccccctatacctggaaacgccccatcggtttaggatgggaaaaaccctacaccgtccgctatcccagcaacctcgatgatggaccatttcacggaatgccattaggtggttttggtgcaggttgtatcggccgttcctctcgcggagatttcaatttatggcacattgacggtggagaacatacatttaaaaatgtccctgcttgtcaatttagcatctttacatcagacaaaacctacgcattatctacccaacccccagaagataacacattacaaacttgggaattttatcccacatcaaccacaacccaaaccacaggaaattatcatgcactttatcctcgcagttggtttgtttatgaaaatgtttttccagttcaattaacctgtgaacaattttcacctatctgggctaataattaccaagaaaccagttatcctgtagcggttttcctatggactgcacacaacccaactaaccaaccaattactgttagtataatgctaacttgggaaaatatggcaggttggtttactaatgttttaaaatctcctgatgtgaaaattagagatgatggcagtcctgtttatgaatatcaaccaaaatggggagaaagtaaaaataactataattggttagcagaagatgataagtttttaggttgtgttttaggtcgagttactaataatggaacgccccaagaaggtgacggaacttggtgtattgctactgctaaaaatgatcaatttgaattattctatcattcccgttttaacactataggaaatggtgaggaaatttggcagacttttagtaaagatggttctttagctaattatttggatgaaactcccgcagatgaaaatactcgtttaggtgctgctgttgctgtacgtttcactttacaaccaggggaaactttagaagttccttttgtgttaagttgggattttccggtgacagaatttgcagaaggtgtaaactattatcgcagatatacagacttttttggttgtagtggtgataatgcttggcacattgctacccatgcactgaaagaatatcataattggcgatcgcaaattcaaaactggcaaagtcctattttaaaccgagaagacttacccgactggttgaaaatggcgttatttaacgaactctacgacttaactagtgggggtactctctggagtgcagcaacggaaaaagaccccatcggtcaatttgcagtgttagaatgtttagattaccgctggtatgaaagtttagatgtgcggttatacggttctttcgggttattaatgttattcccagaactagaaaaagccgtaatacgtgcctttgctagagcaattccccaaagtgatgatagaactagaattatcggttattatctcaccatcaacgctgaaagtccccaagctatccgtaaagtagcaggtgctacacctcacgacttaggcgcacctaatgagtgggtttgggaaaaaaccaattatactgcttatcaagattgcaatttatggaaagatttaggttgtgattttgtcttgcaagtataccgcgattttctatttactggtgcaaatgatatcgaatttctcgcagaatgttgggatgcaattgtgcaaactttggattatgtgaaacaatttgatttagatggagatggtataccagaaaattctggcgcacctgatcaaacttttgacgattggcggttaaatggtgttagtgcttattgtggtggtttgtggttagcagcgttagaaagtgcgatcgctatttgtgatattctcaaagatcataaaaacacaacttcccaaaaatcaatctatcaaacttggttaaatcaatcacaaccaatttatcaagaaaaactgtggaatggtcagttttaccgtttagatagtgaaagcggttctaatgtggtaatggctgatcaattatgtgggcaattttatgctcgtttgcttagtttaccagatattgtacccactgataacgccctttctgctttgactaatatatataatgcttgtttcctcaagttccaaaatggaaaatttggcgctgcaaacggtgtccttcccgatggttcaccagaaaaccccaacgctacccatcccctagaagtttggacaggtattaattttggtttagctgcatttttgttacagatggggatgaaaaatgaaggtttgcgtttaactgaagcggtggttaaacaagtttacgaaaacgggttacagttccgcaccccggaagctatcaccgcagcaggtacttttcgcgctagtacgtatttacgggcaatggctatctgggcagtttacctatgctttaaataatgtataagagggaataggtgacaggtgacaggtgacagtaagaagataataggagttgagaaagaagaaggaagaatttatttccctccccatcaccccacctccccatatcctttggtaacatttcgctcaagcacttatgcagaactttacgtaaaaattttagatttttttaagatttgtcgtaaataaacatcttttatagttaaaaaatgtatcagcagaaatgtgattttattttctggttatttccggaatcctgagaaaaaaacagtaatagtaatagttgaaagttctcaacccctatacccatgtttgaaaatacgcaatgaacacctgtttcatcaacaaagtctatagataactactctttttctcagaatgcgaacatttttgtgccaaaggatacataaataattcaaaattcactttgaagcatcgaggacaacccacttaaaacttatctccaggaacattggaaaaatgaacattcaatataaaaaccgtaaaacctacctcaccctgatagaattagctggcattcagaatataaaagttactctcatgtcagatgctatgaggttatgcgcttaattgtgttgttgaaccttgactgaacaccagccaggtagtacaaaatttagtacaaaacaaaatctaggtcaatgtagggtcagcaaaagcagcagcaacgattttgattgtttcaggtttacaaccaactgcaccgttactcataaaaaaagagttccagtgctagggatttatattatagctctttggtttctgattggcaagtaaaaaccaatgtgaattactgcccaaatctcaaaatttgtatatcaccaaattcacctactgaatcacataagtatcaatttttcagaatctctaaaacacaaactcatcataattaacgatttacatttacacataataaaattgacatgataatttttctccctagcaactgagttacttgacttcacaaaaactcaaaatttttactcagctaaattcacaattctctgatgacgcttaatttatattgagcggtttgattacatgattaaatgcaggtttaatatattactttttctcttaacacacccgcttatgggtgtttttttatgtgtaactttgtgtgataaagacgataaatgtagtatatcataaaatagtatcaacaacaacttaatttttagaagatcggacttattgatatacaattattactatgtatttaccagccgccattaagaataagtgtaaccctaatgattctcccatcagacctaaaagaaaaacatataacaatatataatcactaaacttctagagtgaaattgatgaaaaatccggtattgttttttgacaaaattctctagaatgcttaatttataaaggtttttaaatttagttaatagtaagaattggcagaaaaatcaagataatcaactttgataccctcataaaatgaggggtgttaccccccatttttttgacaaaaatgggacaaaagtgaaagttgcacattgcctaaatgaacattctgagatattcagtaaatttaacttataagactgccaaagtggcagatgacattaaagaaaaaaaatagtataaatacgaatgtagcttttaagaaggcaatatgaatgctcttcttagctgactggaaaattatgaaactttactgaaaagacttaataattttcggcggctagttatacaataatattcagggaacatctattgaattacagcttgtggaatttttagaagacacaactgcatctactaaacccgctgaattacagaaagatggtaaattttttcctttctttcaggagtcagcaaaaatcacagaacacaagtaaccaatagcagttgctttcaccagcaaccacagcgacgaggttacaaaactgtacaacagggtcaatacagcaaagcagcaaacagacttgattaaaaacagtcaggttttcaatcacaggtcaggtcatgaaacaaatcatcaggtcaaatgcagtcgaaacaccaagcccacgaggtaatttagggatacaacgctctgatttacattttcgtcaggcatccggggaaagtctcgtactttcaccaacggtaaatttatcagtcctaccccaaagtagtgacgtattaattaaaaataaaagcaacaagtcaacatcctgggagaataaagcactttcagcctttgttgatgtagtttgggagaagaaattagattttttacccagagttgtgatgtgggagtgtataggcaagatagcacaagtcaataacatcccaggaaagcaaatcacaacgcaaatcacaactttaataactaagacactggggaagataaaagctagagcagaacaagcaaccccaagcagcttagttttgaaagttagtttatggaagttgctcccaaacctacagacaacgaaccagttagcagtaaaaattgccaaaactaaaactttgcttcacagtatctggatgcagcgaacacaacagagcagttttaggaatagcttttttgcttttaattacgggaactgctgagaagttgtaaaatttctggatgtgcctgtggaaaaggtgaatctatatttttcaacatttgctactggtctattaccaatatattcctgtaattaattcaacaactgtttcacaaatagtcatcaaccaaaccaaaattactgggtgaaggtacgatatcacttcctgcgatcaactggtaaatgttggtgtggtgaactgatattgcagtttgtgtattgcagtttgtgtattgcagttgtaaatagcacttgacaataacactcgaagaaacttgacaatttacctcattgaaataaaactcaaacgtactatgaatcaagacatttctggaaatagtggactccctgacaaaaaaatcaatcctgaacagtttgaccaagtaatagaagcaattctcgctggtaagtattcttgggcttgtgtgttaatgttgcggtttgttggttacaatcctttgcattacattccttaccgtacttataaccgactactcaaagaaaactctcgcaatagtcggtctaaccctcaacagaatgaaaatttgaaaattgctccatcaccaacagagaaaaggtcagagagtcatgtagcacctagcagcttgagcaagaaaattaaagatttagcttatctggaagttgctggtaagcaaaaagtagaagtccgtaatagccatagggataagaaatcggcataaccgataatgatgatagttaataatctcagaatcgaagttcaaggagtcaggagtcaggaggcaggaggcaggaggcaggagaaagataaatatttcctgtttccctagtcaccagtcaccagtcatctattacctacctttgggaaatatggctaaatcggtttctgggtcaaaaaagtggagtttttcagaaactaatgataaccaaagttgctcacccaaactgataaatctatctggaggaactcgtacttgtaaagtttgaccatctgtatttggtgaatcagggtcatatattcttacagcaagaaaactatcgtttcctaaattctctactaaatctactttaactggtaaatttttggtagctggtacacttaacatgaagtgttctggacgaatacctaaaattagagtttgtccatcgtatttttgtaatgcttttccccatacatctgggagggtaaagcgaaaattagtatgggtaattaataaaggtgcatgaaattctactgggataaaattcattggtggtgaaccaataaattcagctacaaagcggttagcaggataattatatagttctaaaggaggggcgacttgttgaatttgtcccccatacatgatggcaatgcgatcgcccattgtcatagcttcagtttgatcatgggtaacgtaaattgtcgttgtccccaactgacgctgtaatttaacaatttgggtgcgggtttctgcccgtaatttagcatctaaattagataagggttcatccattaaaaatacttgaggatttcgggcgatcgctctccctaatgctaccctttgtctttgtcctcctgataactgtttaggtaggcgatttaataaattttcaatttgtaataattgggcaacattcagcacttgttgttctattgtgcgttcttttggagaaagataacgcagtcctttgggtagttttttagtcactcccacaagtagattttctccccatgtacgaaaattacgggtagaaattgtttcaccatttcccaaacgacgacgtaacccaaaagcaatgttgtcataaacactcatgtgggggtaaagggcgtaattttggaacaccattgcaatatctcgcgctttggggggtaagtcattaattaggcgaagccctgcgggcgtgctggtgctatcgcccacccaaatattacccccagtcatcacctctaaccctgctattagccgcagcaaggtacttttaccacaaccagaaggtcccaccaacaccataaattcaccatcagcaatggttaaattaatgcgtctgaggacattaatactatctgcaccctctttttctggtgatgactgctgtgtcttcacactttcccccttccggggagggaaacttttataaacgttttctaatacaacttgtgccacaggtaattactttaatagtgatttatctgtacaagcgggactttcccacctctctagcagtatagtattccttgatgaaaccaggagtaagcttctacaacaggttctcttgtgtttgttccaaaggggcaaaattttggacaataccagtacagattcaacagctaaatttattttaaagtcccaacatatcactatattcagtcagccccaaggattctatccaggtaaattagtgtttttaggaggaattttacactttacctctatttccaaattactttcagcactaccttctgtaataaaaggaatgccagctttaccacctattttcatcccaaattttaaggttacttcctcaatttctgctgccccaaaatccttaaaagcactgatagcgtacatcgcataaccccgcatcatttttttcgcttgttgcaatttcaccagtgcgggattgtctcccatgccaatttcacccgtgtcataatcataaactgggctaggtagagaaacttcttctttaccttttgactgaatatagatttcataagattctccattttcttcaaaccggagaatttctagttgcgattctgacatagataatgtttactttttctaaagttttaacagttttttgctcaataaccgttatcctattggtatatatgacatcttaaatcgagatacttgtcaactgcaactagatattttttctctatgactcgatatgcacttgtaattggtatttctcagtatagttacttaagccaactgccgacaccaaccaatgatgcggaaacgattgcccaaatattagaaaaatacggcaattttcaacaagtgagacgttatccttatcgttgtcatatcgagaacaataaccatcctggaatggtaaatcaagcagtgacgggaatctcagtaatgcaacaattaaaggagtttttatcagaacaagcaaaagatagcgaagcactgatttattttactggacatggaattgaagttaaaccttatttgggaagacctgaaggttttttagcagcatcagattgtcaagtagaaagagatggtagtcggattattggacaaaaaaatggtattccctttagcaaactgaatgaagaaatttgtaattgtgatttaagtaatttagttgtaattttagattgttgtcacagtggatatttgattaaaagggagttattagaaagtagttttacctttagtgctaaacaagattattatctacttgcaggttgtcgggagtttgaacaaggaaaaattattaaaggtgaatctcacagtgtttttacaggtgctttgattcaagcactttcagaacaaaatgctgattctaaaagatggattacaggcgatcgcctatttgatgctatcagtcgagagttacatggatcagttcaagaagcaattcgttttggttggggaaagtcaattcaattattaacctatcctcccaaagaaaatgatgtagaaaatcttgaaactcctctaaatctagaaaacccatatttaggattaaagtcctttgaattagagcaagcagcactatttcacggcagagaaaccgcagtcagagcattattagatcgtctcaaatcttctcggtttgtagctgtaattggtgcttctggatgtggtaaatcttctttagtaaaagcagggttattaccagaactaaggaataattattttgctggtagtggtaactggcaaatagaaattttcacacctggctataatcctcttgataaattaaatgaaattttagatcatcatccaggcaatcaaccttatatcttatttattgaccaatttgaagaagtttttacccttacccaagatgaagaagaaagaaaaagggttattaaattaatttttgaagaagtaaaaaatcaagaaaaacaaactcgtgtaattatcgccattcggggagattttctagataaatgcgctgaatatgccgatgcagcaaatttaattaatcaagatcaagtaacatcttatcttgtacaacctctctctctaaaggaattagagaatgcgattgaaaaacctgctcaattacatggtgttagctttgaatctgggttagtatcgaaaattattcatgatgtagctcaacaaccaggtgcattaccattaatgcaatatgctttaaaggaattatgggatgtttgtttaaaagatgaatctcacgaacatcctcagttaacttttgcagcttatcagaaaattggtgaagtcaaaggtgcattagaaaaaagagcaaatcgtttttacaatagtctaacttctgaagatgataaaacgtttattcggcgtttatttgtgatggagttggtacatttaggagaaggtaaagaagttaccagaaaacgagcaacttgggaaagattaagagatatagctgtttctgaatcacaattgaataatctcattaatcgtttagtagcagcgcgtttaattgtcaccactgaaaaaaccatagaagttgcacacgaagctttatttagcgaatggtctttattaaaagattggatcgcagaaagtcgggatgatattcgtttaactcaaagtatagaaagttcttgtcgagaatggcaagaaatttaccataaatctgatgatgctttacttacaggtgcgagattagctgctattgaagaatggaaaaagagaagtttacaaaaactccctgctcaagaggaggagtatattagtaagagtatagaaaaaagggataaagagcaaaaggaaactattgctagaattgaacgggaattagagcaagaaaggcaacttaaaaaattcgcagaaattcaacttaaggtagcacaatatcaaaaaaaactcactataattacaagtggattattaatatttgctgcatctttgggattgttttcatatagaattaatcaacaaaaagaacaggaagtgttattttctgttgtaagtttactgaatcaagctaaatcagataaacatgatcaacttggagctttactcaaaagtattacaacattagataaattaaacaaaattagtttcaaagatatcgaaaacaacaaaatcagagataacattaaaactatagtatatggagttaaagagcgaaatagattagaaggtcatcaaggaactatttgggatgtaaaagttagtcaagatggacaaactatagtttctgctggtgcagataaaactataaaagtatggagtatgaaaggagaattattagctacatctcctgttcaatcagatgaaatatctagtattaactttaatcataatgatgaaaaaaccattatagtttccacaagttacgatggatatgtcaagctatgggaaatagacgcaaaaaacaggaagataaatcaaataaatgaattttatagtagtttaacttaagaatgagacaaaaagagtataagattgaagagagaaggtatgggagtagaaatcatggcttatagtttagatttaagacaaaaagtaatagattatatagaaaatggtg

SEQ ID NO: 13 - DNA, 93394 bp, Sphaerospermopsis sp. LEGE 00249
  LEGE00249_22
taacacgaataactttcttccttaacatgatctcgacctcaatactataatcatagcataccacgaggagatttgtggaggttttaccagaaatgtttaggtatatagcctacagtcccaaccccagatttagtggccgtacccgtagtcaattcatcaccattatgaataatctcaaattgagttatccccaaaagatgaatgcagcagtaccggcaaatgaatactgtggtgatttcattctccaagatagcttaaatcagtccacaactttagcaaaagcagaacaagaacaaatagaactaaccgttatggcaaatacagaaatatacaatgattactttgctatgtatatatagcggcaggtgaaaatggaattggtgaaatgctttcccataatttttgctttccaatagctaaagtagttgaaaaagctaccgcatatcattaaaaactatcttcgatccagcagcagtaaaagcagtgcgatcgccaagttgagcataaccaaaaacggtcattcctgctgcacatcctgcttgtacacccggtacagattcttctatcaagggtttggtgcgttatgctgtcgctaacacaccctacatatcttttcataaatcaaatattagtcctatagtttggttattacaaatactattgctattacaattattttcatgtcatcacgaaacttccaactgctctatttccgcactctgtccttgatctaattctggtaaatttttacccaaaattacaactgaaaccatcattaataaactcgttaccataatcacactgatcacatttggatcatcaaaattgcttgtacctattaacaaagcagcagcaaaattgcgttgtgcagttcctactcctaaaactctttgagtatcaataccaggtcctcccaataaataacctacagtaaaagaaaatacaataaaaatagcacaaacaaagattacaccatttgtcaataaaacaataatttccccaaagtgaactatcaacctcactcctaaacctaaaagcaatccaaaactagataatttggcggtaattgcttgtaagctaagggatatattttcagatttggacttaattaataacccaattcctaacggtattatcatcatcaatattaaaggtttagcaatatcccaagagttgacttgtacaccttgcaaaaccaaaggtaatacaatcggcatataaaaaacagtacctaacattaacatcatcatcaaccctgtagaaaaagctaaattccccttcactatttgggcaagtttaggtaaagctggcggacctgaagccaatgccataatgatcaaaccatctttcacaggttcattaacaggtattactagcagcagtaaatagacaaaaactggcactaaaacaaaatttgttagtagcgataaaacaaccaatctgatattaagaagaggttgccaaatctgttgtacagttaactttaaacctgtaccaaacatagtagcaacaacaaatgcgaggaatgcgattttgtcaaggatggggataatttggtgcatagatttcttatttcgcgccaagtcgcagagaagcaaagacgcaaagaagaaaacaagaagtgagcatgatttttaaaatatactctcaatcttgctctccgcgcctctgcgcctctgcgtgagacaacaattacttcaaattcaaagtaagtttctgtaaattacctgtgaatgcaaatggtacttgataggtttccacaataggagtacctgtatcttgaccgacatcaaaagtttcatttaatgccaaacggtagggtaaagttttttcaattctaccctcagctacctgttgatcattaatgaataacttgccaattccacctgcaccaactccaccaccgtcataatcaaaattaaatttaattgttgatttaccaggtgctaattttgcaggagattgaatagtgtaccgttcggaattagcaaagttgtaaacgtaggttggtttactatcttctaggaaaaatccccaacccgcaaaacgtccaccttgagttaataacacaccttctgcaccattttcaggaatgtctacatcaacagtaatactaaaggatctattttttaaacttggggcgctaccttcaggaatgctaactccaccagaatagtaagtaaaagttgtgcgtcctgcggcaggggaaggacgacttttgacatcaaatctttcagaaacgcgatcatctaatggtaaaactttgtgtttacgagcttctgataaaaacaacttttgcagtttttctaatttctctggattttcagatgctaggttattagcttcgctaaaatctttctcaatgttgtatagttcccaaggatctttctcgaagtctgcattaattgtaccctgccaaggtaatcggggatgacgcgccgcagctatccatccatcatcataaatcgcccggttgccaaacatctcaaaatactgggtttcatgtttagaatcagcttcaggatcatcaaaagtgtaaactaagctagtaccttcgattttctgttgttttaccccgttaacttgagtaggtgcagtaattcccgcagcttcaaaaatagttggcgtaatatcaataacatgatgaaattggctacgaagtccgccttgatctttgatgcgatcgccccatgcaataatcaaggggttacgagtgccaccaaaatgagacgctatttgttttgtccattgaaatggtgttgtaccagcccaagcccaagctgcatgataatgattgaatgttttaggactacctaaatcatccaaagaagctaataattgttctcgactttcaggtactttattgaaaacttttaattcattgacgctacctgctaaaccaccttcggcactagcaccattatcaccaacgatgtagaaaactaaggtgttgtctaattcaccaatttggtcaatggcatcaattaatcttcccacttcatagtccgtatgtgccaaaaatccggcaaatacttccatttcatgggcatagattttttgatcctctggagataaggaatcccatgctggcaattctaccggacggggggtaagttcggcattagcaggaattacacccagttgtttttgacgagcaaaggtttcttctcgtaatttatcccagccttggtcaaattttcccttgtacttgtctatccaggctttgggagcgtgatgaggtgcatgggtagcaccggtagccaaataggtaaaaaagggcttgtcaggggctatagactgttgagaatgaatccagttaatggcatgatctactaaatctggagtcaaatgataatcagggttattggttggtggtgcaactcgcttagtattttctaccaaagccggactccattggttagtatcaccacccaaaaaaccataaaaatactcaaatcctaatcccgtcggccagcggtcaaagggtccagccgcactggtttcataatctggtgtgttgtgccatttaccgaaagcagcagtattataaccgttctgccgtaatacttccgctacagtagccgcactcttgggtaaaattgttgtgtaaccgggaaaaccagatgctaactctgcaactacacctgtaccgactgaatgatggttgcgtccagttaataaagctgctctggtgggtgaacaaagggctgtagtgtggaattggttgtaacgtaatcctttttcagctaaacgagttaaattcggggtatctacgagtccaccaaatgtactcgcttgcccaaaacccacatcatccaataatactaataatacattcggggctttttccggggctttaatgggtgcgggaaaatctggttttgaatctttgtaagttaagccaatttcaccatcaaaagacggtggacgtactggtaaaacctttgatgtcgcagctaaggcggggcttgttaccatcaacaatgtgatgagaaaagatagagacagcacccgcaaaattgaatgtaacatacaatatccttgtataataaatctgcaactttgcgtctttgcgtctttgcgtgaggcttaatcttttaacgaaccacgaaggacacaaaggacacgaagattaagaatgttagagagagattttgcgttagtcttgtaaattcttcaccaaacgaaacccgatatgggttgttcccgtatcagtagattctgattcccgtgcggctggacgataacggctacaatagtttggcgcacataggtaagaaccacctttgatgacatgaaggtcagtttctgtaggttttttagggtcaaaactttggttaacagatccccgacttctttgagaagtgggggatctatcgttgaataagtcggaagtccattcccacacattgccggtcatgtcgtacagtccataaccattggctgggaaagaacctacttttgctgttcctacataaccatcagttttagtattgaaaaaggggaagattccctgccaggtgttggcttttttcactgaatattgattcccccaggtataagttgctccatccaacccaccgcgagcagcatattcccactgtgcttctgttggtaatgattttcctgaccattgggcgtaggctacagcgtcttgatatgcaatatgaacaactgggtagttttctttgcctacaatagtgctatcactaccaaagggatgctgccaattagcactgggtgtccaatgccaccaactgagaatttgaacttccttcacaccttgttttggcatttgaaagaccattgatcctggtaatctctgctcatctagtaagtcgggaaactgttcttttgataaaggtcgttctgcaactgttacatagttggtggctttgacaaattcagcgaactgagcatttgtcacttcgtatttatctatgcaaaatgatgtaactgtgacattttctgctgtttgctcttccacaaaaccagaatcatctgctcccattttgaatgtacctccagaaatcattaccattcctggaggacaggggttaacggcaaatgctggtgaattagtaaatagcgatatcagtgcaactacttgaatgagtagcaatattaaaaaccgcattttacgttttattaagctcctgagcgatcgcttgtagaatcactgggaggttcttctttaccacttctgcaactgaccaagttatcttgattgagattattggcagtcaatacatatactggaatcaagatgaaaattgcagcagtaattaacaaaattgcatatctcatggatttatttttcacctcttctcttttctaagttagtttctcctctccagtagccactggtaaatctttgtgagtgctatattctgtccaagaaccttcataaattctaactttgggataattaagtagatgctttaaaaccacatattgtaatgtagcttctcgtcctgtactacaagaaacaataatgtcattttcaggagtaatctttttatctgccagaatttttttaatttcatctaatgactttaatttgtgaggatttttagcatctgtaaatgttacccaaggaatattccgcgcaccaggaatatgtccattgcgtatccaaatattttcctcaccccggaacaatttttctggtctaggatcaataaaaacaactcctgatttaccaatcagttttttcacatcacttaaattcacacgcactgaagggttatctttaactgtgaatttaccgactgagtatttaggaaattcttttgtgacagcttgatcggttttataaccagcataaccaccatctaatacagcaatatctttcaatccagaacgttctagtaaataagcaaccattgttgcacctaaaacatctctaccatctgaatatacaagaacacgactattatttgttacaccagaattagcaaatatttctcctaatttttgattttcccaatattgtaccggtaatccttcttttggacccctaaaagctgtatcagcaatgttgacagcattaggaagatgtccttctatatagtcgagaggaaaattacgtacatctaaaattctaaggttaggatctttggcgttttcagctacccaatttggcgaaacaaactgaatattggcgcgagaattagctgataatactggcaaaggtaataagggaatacttactaaaaatgcaaaaaacactgtcaccagagcaaataacttaggttttttcaaattctttaaagaaaaacttttaaccatcattttcacctttatttctatttcatcaaaatcttcattacttagtgaaattactttaattaacaggaatgttaaagtaatctcaaaaaccgcattctacgcagttgttaccgttaaaccaagaattttagcgaatctttctacataaaattctgtaggattagcaacttgttgaatagattcccgttgacgtaaattctcccaccattcctgtaatttatatgtttctgtgggcaatgtaaaattacggaatttttctaaaactggtaatctttcaaaccaaggatagaagctgatatcaactaaactcaaatgttcgcctaagaagtaggaaccattaccagaaagtttacctaatccttcttcttcaatatacaaaagagactctaaaaactctctctttccctgttcttgttcttgggtatctttaccacgcaggaatttattaaaagctggaactaaacgggtattagcgtaatctatccaaattcttgcaactgctttttgagcaggatcatgaggtaacaaagctggttcgggaaatacttcttctaaatattcattgataattgcggattcatatatttcgacatcaccatgtttgatggctggaacttttccatagcgagaaacttgggtaaaagcttctggtttattctgtaagtcaatttcaatcggtgtaaaatcaattcctttttccagcaacactacacgggttctttgggaaaaagtagaggctttagcaaaatacagttgtaatgtactcatttagtcctttccttgattgggatttgtttgattttttagttaattagggcttgctcatagcagagcgtggcgtaagccataaaagtattctcgtatagacaggtaaaagacaagagtttgggctatctgttggcaacaaatttttccctatttcacgctcactattttcaattttgctactcctatcttgaacaaccttgcacctcattgttctatttttcgcctcaatcctttgatttatcgttttacatttattccacatcccctaattacaaaaattgcaatttgaatgacagtcaaagatagaagtgaaattgcttcacttctacgagttatattcttttgactggcaaaataccagaggtcaacattaactacggtttgttggtcaatttttagtagtattctaagagtatttcatagtttttactaaaaaacaagtcttttagcaaacatttttctcaaaatgtagagccaaaatgcccaacaatctaacacttgtccataccttgcttttcttcagtaccgcgttcattgccgggtcgtttagcgaacttccatctgttaagttaatgtctcataccaatacttttcgattaataaagctttaacaagtaattatatctttgcagctaattaatgaataaattaaatacatttaatcaataaaaggacatgacaatatatcttgtggaaatatcccaagaagaacgccatactgcacatttatcccttgttcaactgtgtcgatcgcagtgataatgcccaaatcaccattaaatacttcccgttgataatcattagtctgctgaatcaccctgtcacctacctgcaatgtcatcccacctctggtaatctctaccttgtcgggacttttagggttaattaattcctgcaagacattattgaggttgcgagtacccactaactcccgtgtcatgggacaaagcactggtacatctgtagctgggttaaaccctaaccggggaatcaaatctgtaattaattcacaaattgtctgtataccgtgttctggttgaaactgaactttagactaaaaacacaaaatgactcagggaagctgagttgaaaaaaagcaaagttcttacaggcatcccttgatttttttgcggtccctttcactaacgatcgctctcttttagtctaaatttcagtaatgatataagctgaaattaaaataagtgaaacttaattataagaaaataggctaaaaacccttaaggcttcgctgtgagcatcagccgatagcgtagcgtggcattagccatatagttaagttttggatctgggtggcaaaacttgaccttccttcaggcaagggacgacagttgcttcactcagggaaaccctttcggcagttccttctgggggaaacccccaagaccggactgcctcaccaacgcactgcctcacgaaagccatttgaagcgtttacgcttcagtaacttgtgatataatcgttatcacgtcagacagtatgtttgtaaaattgtaataacccaagttgctagttatgcctttaaaggctgaaaaatgggaactgtcagcagatataggaagaaaaatcctagatgatactatcgaaattgattgttatcctgaatcctattcctaactatcaacttgggttaataataattattgtttttgcagaaagttaaaacctgaaattaaatttaggatggctgccatcagatgaattccccatctttttcaaattattggaatgggcgctttataggtgataaccagcgataccggatcgataaacctctagctgtcggtggtatgggagaggtattattggccacggatacccgtgtaggtcaacaggtagtattgaagttactcaaagatacgctagtagcatcccaagagatgaaaaagcgttttgaacgggaaatagccgtgtgtgcagctttgcaaagtgaccacattgttaagattagtgattgtggggtaactccagaaggatatcccttttatataatggagtatttgcgcggtcaaacattacgacaattgctactgcgggaaaagcgattgtctgaagaaagaaccgtcagtattatttcgcaagtgtgtcaggctttacagatggcacatcaaggagtaactctacaaaaagatggtagcaatgaacatattcaggtgatccatcgtgacctgaagccggataatatctttctcatccctacagatttgggagagtgggtgaagatattagattttggtgtagcgaaaatccgtaatgattcttctgaacagagcaatttaactactacttttatcggcacatttcgttatgccgcacctgaacagattcaaaacaagcaaaatttagatgccagggctgatatttacagtttgggcattatcttgtatgaaatgttaagtgcagcagatccctttggtttcagcactaaaggtaataatatcagtgaagcttcctgggttgttgctcatacttatgaactaccaaaacctttgcgtgaacaacttggatgtgaaaacatatctgccgaaatggaaactgcagtcattaaatgtctgcaaaaagatccgaataatcgctttgcatcagtaggtgaactaaatcaggcgttgcaagaggttattaaacccacccttggtaccgctagtaccataaatgaaactattgttcagcctcaacctgattttcatcaggaaactgtctctaaacccttgcaaacattttatacaagcgcatctgaagatgagactattctactgatcccacaattgccaaatcaacagtcaaataacgaaacagtaccccgtcccctacaaccaaatcaaccacaaccaccagaagggggtatgttccaagatcgtccttcaccctatgcaaacaacaataacgaaacagtaccccgtcccctacaaccaaatcaaccacaaccaccagaagggggtatgttccaagatcgtccttcaccctatgcaaacaacaataacgaaacagtaccccgtcccctacaaccaaatcaaccacaaccaccagaagggactattgtccaaccccaaccgtcatcagaaccaaagaatcatcaaaatccagcaaataggccaatcaacaatgaacaagccagcaacttagataataccttgtatcagccacgacctgtagtttctccaagtcgtaacaatataccagataacacaatctttcaaccaaagccagaacagttagttagccccagaagttcccacagttttgggcaaaatatttggattggattaggaattgtattagcttgtttgacaggaatactgatatttttcttgttctcaaattctggttctcaagatttacctggtgaacctaactcaactcaaagtaattaatataacctaaattactagttaggaataggggtcaggagtcagggaacactaagaaggcaagagacaagagttgattttttccaattacccattacccattaccagcctcaacagatgtgatccgtggaactcatcaaaaaattatcgacaaaagtctaattacctttccaagactcatccagatattctagaaacatctggattagctaccaggcaaacactttaatgcttatctttgttgtacaaacattagcagaaattctagctggaggaacatcacttaccagtacggagcaaattgactttagtcatcctagccatcgtcgggaagagggtgcaggttcgactctcaatttgtatgtttacgacttacgtgagagtaaacaaatacagcattctggtagacaagtggaacgcaaactcaccaacgctctgcaacctgccacgatcaactggtctcctatttggtttgatgtctctatattattaacagcttgggatagaactgctttaggtgaacatcacttgttaagtgaagctttgaatgtactgttgcgtcatcgccctctgcaagaggattttttagttccagaattgcggggttatggcaatttgaccatgacagttgcgcttgatccaccgattgaggttggctctttatggagcgcactcaatgtacccttgcgtgctggtttgtatgtgacggtgacagtaccctgggagccacagtcgatgcctgtaccattggtttcggaaagaattttcaatttacaaaaccaattttatggcaatggcaatggtaacggctctgttgctactaaacgggtagcgatcgctggcatggtgaaaagtgcggtagctaatcagcctttggtggatgccaaagttgctgtcgtcaaaactgaaaaatctgtattgacaaatcaagaaggaattttcttttttgaagatttacgtataggtaattatgttttgacagtcaattgtcctggctatttaccgcagaatgttaatgtcttggtcgatagccaaaattataccttcaaagaaatcttactaactcctgaataaatttgggtgtttaccgattaggagatgcttttatggccagacttgattactttgctcccggtgtctatattgaagaaattgaccgtgggagcagaccaattgaaggtgtgagtacggcgatcgctggttttgtcgggtttacagaagatgtgcgtgatggggctgaattatttaagcccatgttaattactaattggacgcaatatcttaactattttgctcgtcctaattctgatggtttcactgattttaacgcctacttaccttttgctgtttatggctactttatgaatggtggtggtcgttgctgggtaacaagcattggtactcagttaccaggcgcacctaaaccctcaagcccagaaccagccattctcacaattactggtagaggtaatcgtccaacactccgctttgctttgcgccctgaacaagcagccagcggagcagtcaatattttaattaccgatggtggtcctcgtcctttaccagaagggacagaaggggaagccccacccaatactggcgagtatttttctgtgcagattcgccggggtgatgaagttctggaacaatacgagaacttaaccatgaaccgggaggccgcagctcaggtagccacctatgcagtggcggctttaagaaattctatgtatattcaggtgcaagatgtgtctcaagctggacagcctttatcgcgccgtccggccaatggacaatatgaactagcaccaccgattgtagctgttcccgtcgatagattttccagcgatttagaaggtatacgtgatgatcgtacaggagtaagggggatttttgaaatagatgaaatcactatgttggcctgtcctgatttaatgcgggcatatcaagcgcaagtgctaaatttggatcaagtacacggcatcatggaattgatgattagtatgtgcgaaggttcagccagtggtgatattcctaacccacccaaccgcatggttttgattgatccgccttcagatgcagtcaaaccgcaacaggtagtggaatggttgaatagatttaaccgccgttccatgtttgctgcactttattatccttggatcaaagttgccaacccacgcgatcgcggtaatccgattcttgtacctccctgtggacatatcatgggagtttgggcgcggactgatgaaaccagaggtgtttataaagctcctgccaatgaagtacctagaggcgtaatcggtttaggttatgagaccaacttccgcgaacaggaattattaaaccccttgggtattaactgtattcgcaccttccccaatcgtggtatccgcgtctggggtgcgagaaccttggttgagccggataaaaccgaatggcgttatatcagtgtacgacgattgattagttatatcgaaaaatccattgaattaggtactcagtgggtagtctttgaacccaacgatgaagatttgtgggcgcgtgttagacgtactgtaagtaactttttagaacggatttggcgggaaggtgctttgtttggagcttcaccacaacaagcattttatgtcaagtgtgacgaggaactcaacccaccagaaaccagaatgttaggtcgtctatatattgaggtcggtgtttgtcctgtcagacctgctgaatttgtcattttccgcgtcagtcagtggaatggaatcgcagatgaagagtagcagaaaatccatcttgaaggtttttatatcacttattgcacaggaggttaaatcattatgccaggggaatttttaacggcttgcaagttttacttcgaggctgacggaattactgataaattcatcaaagaaattagtggactaggtgttgaaagtacaccagcgcaagatatccacggctcatctaagtctggtaagatcatgcggcaggcaacacccacagtagtaaaatttactaatattacattgaaggtaattgccactgatgatatagacttgtatcaatggtatcagaaatgtaacgaagatatgggagatcccagacagtgggcgcaaaaccggaaaactggctcagtagttgcctatgatcagcaaggcagtgaaaaagctcgttggaacatagttaactgttatccctgtaaatacacaggtcccaccttaactgcatctggtggagatatggccaatgaaactattgagttagttcacgaaggcgttaaacgggtcaaataatggtcaaataataaatttagcaacaatcaaaagtgtcacaaacagcaggtcaagttccagaaattctgacagcccatcggttctacttaggtctaacattagacggtcaacaagataatgttgatggtttctttttagagtgtcaaggctttaaaagaactcaagatgccgttgaaattgctgaagttacccccaataaatggggtgcatcagataaaggtcaagttgtcagaaccaaaattcctggtaatgtcaaaagtgggaatatcactctcaaaagaggaatgaccaattctctagctatctggaagtggtttgaagccgttcaagaaggcaaatgggctgatcaacgtaaaaatgcttctttgactatctataaccaatctggcaaagaacaagcaagatttgaattagctggtgcttggcctgccagttataaaatagccgatgttaatgcccgcagtggtgagatagaaattgaagaaattgaagttgcctatgaagaatttaagcgcgtaaaataataggcaaaatatgtttgcaacagagtttgaatttacactgcctaaagggtatctagactcggaaggcaatctgcaccgtaagggtataatgcgattatcaacggctatagatgagatagcgcctttacgtgacccccgtgtcaaagctaacccagcctatgccacaattatgatcttgtctcgtgtgataactcaattgggtgctatatctgaagttagtcctgctatggtagaaaacttttttgcccaagatttaaattacctgcaagacttttatcgtcatatcaatggtttgaacggtgaaacttccttaccacaggagaaaggaacttccccataaccactgctgtataattaaatctatgtaattaaatctactcaatcatcaggaaaaaccatcaggaattatgccccggaaacaagacaccctctatactgaatttgacttcactctgccacgggggttaatggatagccaaaaccgtgtgcatcgccatggaaccatgcgtttagccactgctaaagatgaaattttggtgcagaaagagcgcaaagtccaagaaaatccaggttacagcgttttggtgatgttatcccgcgtgattacaagattaggaagtttaaactctgttagctctgatttactggaaggactgctcttacatgacattgcctatcttagagaattttacaatcgaattaatcagcaaggtaatacccatatccctacccagtgtccacactgtaatactcaattttcggtagagttagcactagcgggggagtcataagctacccctctgatactttgtatgaggaggtagcttttattgcttatcactttcactggtcacaggatgatattctaaatttagaacacaattaccgtcagcgttgggtgacagagattaataaaattaaccaaaaattaatatgaaagtcaaaatagcctatttaaccacagacaatgaagtaaatgaactcgatttagtggtagcaactacaccaaaaggagagtttatcattggtcgttctcctgattgtgacttacccttagaaagtcctgatgtcagtcgtatacatggtaaattcttggttcaaagtggaaagtattattattgcgacactggcagtaggaatggttctatagttaataatcaattagctgtaaaaaatcagccatatattttaaagcacggtgattctatccagatcggagattattttctgaagatggaagatatgacacctgcggcggaacaattaccagaaaccgtgtttagggttatagacccggcgctgttttccagaccaatatcaccagaagttaatgttgctaacattaatgagccagcaccagaagtagttagcaacttaactgaagaagtaattagtccaattcaggaagagaagacaacacctgaagttgatgatgttgcggctgcacaagagcaagaggtaataactacacctgaaagtcaaatattacctgaaagtctaatagtagaagaaaaaacctttatccaaccacaggatattgttactccagcatcggaaacagtacctgatgtgactacaaataaaagtgatgaagatgatgaagatattgatttaagtacaccaatagcagaagcaagaccctttatccaaccacaggatgttgttactccagcatcggaaacagtaactgatgtgacggcaaatgaaagtgatgaagatattgctgcttcagcatcggaaacagtacctgatgtaacgacaactgagagtgaagaagaggttgatttaagtacaccaattttaccggaatccacaattgtacaaccgcgagatattaacattcaaccagtgtcatctgagagtgatgaagatgttgacttaagtacgccacttatacaggaattcacacaggaattcacaattgtacaaccacgagatatcaacattcaacccgcaataactgagggtgatattgaaattggagatttagatacagatgatggtgttggggaagaaaatttagcagttgagagtgaagttcaaccagcagcgactacagataatgatgtgccagaagtggtaagtgatgttgatgtagaggcaactgaaactgtatcagagacgttgaaggaatcccagattgatgtgatatttgcaccacatgataatattcttcctcaagcagaagttacggaaataattggtagtgaagatagtgatgaagatattgaggtgagtagtacaaccttacaagaagttaatcgagaagtgaccgaactagaggttttttctaccacagacaacttagaaacaccagaaacagaaacatctatttctacagcagaaatcattgaaaaaatatcagtaacagaggtggtttgtacagcagaaaacttagaaacagcagaaaacttagaaacagaaacatctatttccacaactgaagttggtgagaatttagtagttgttggtgaaaaattagcaacagttactgaatctgaagaattacaagctgttgacgatatagaagcaaatacggagagaaaagatagtcagatgagcattcaaaaaaatatagtcctcattgctcacgaaagcaagaaatatgaattagctgagttggttgctaaaaataaagagtttttctctcaaagcttgaccattagctggccttctgtgagtgaagttttaaagcaagaagctggtctgactgtgagtgaagaaattccttctcccactgctgggggatatcaaaaaattaatgtcctgctaggttctggaggtattttagctatgattttcctcagagattttctcacacctgcacctagtccaactaatgaagaaactttgttgaaaatatgtaatatgaatcaggtgttggtagcaactaatttaaaaacagcagaggcgatcgtgtattatctgaaaaacattacagattcatagatcaatagttacaaaaaacggttcttcggtactttttatggagaacccagttcaaaatcattaaaatccttattgtgcgggcatttcattcaaaatatgggcattatagtttataatcattgccccgtaaggattttgtgataatcaatcctcaacctccataaaaatcattaaatcaatattttgagataacttgcccaaattctaatatattttgggcaatttttatcgcagattttttaacattcagcacttctgacacattagatatctccctaaaaaataaacacattggtgtgaaatatgaatcacttaccattaaatcgtttattggaactagcaaaactcttttttaaactaggtgttatggcaagcaaatatagtgtaattcagtatgttcctgatccaatcgcagatgaacgtatcaatattggtgttattgcttttgataatcaaaatattcgtgtacgctttttcaagaattggctaagttggaaaagagtgcaaatttttggcatggaagatattaaatttctcaaagattttgctcgtcgcatggagaagaatgttgaagaaggatatttattttccgaagataaattaaatgaagtgagctatcaagaaatcatctcgaaaatagcacaagaatggataaatagtattcaaattacagaaccacgaggttcattagataatgttgatgatttaatagaagatattgctaatacctatttgcgtgagcgtgaaataacgcccaaaccaaaaccaaaaggagtgaaaacttcaaaaagagggacaaaaattgtcagtttcaatttatatccacacatcaaacagaaattgggagagaaaacctaaaaattcttctcccttctctcctgtaacttaaacataatttctgcgtgcatttcacgggtaataggatagaaaaaagtcaaaatcaaacccaaaattaaacagattgttggtactggaccgactataattctaatagcagacaatgcggaatcgggttgtattggtgtactttgtccggctatagtttcccgaaatccagaagcttgtaaagcattaccaactataaataaaccaaatgctaaaccaaacttctgtaataacaccataaaaccataaaatactccttcccttctttgtccggtttgcagttcatctaattctataacatcgggaatcatagaccaaggaattaaataagctgtggaaactccacaaccagccataacagccataaaatacattaaacctatttgatttgcttgcagaaaaaataatcccgcagcagcaataatccataaagtcatacccaaaaaataaacgatttttttaccaaatcttttacttaaataactccaaacaaataacattaataaagcagttccttgaacagcaattaatactgtaggaacttgagaatctttgagtttcatacagtagatgacaaaatagggaatgactgtagcggtgatttgtacacctaaccaagaaaaaagataaatggcgataacgaataaaaaaggtttgttactgaaagcaatcttgatttgttctataaaaggaatttctgctggttgttctagttgaatacgtttagattcaaaagcaagaatccgcttccttgttccatagacgcaccaatataaggataacaccgaaatcacagtacatattgctgctaaaactaaatattttaaatatttttgttgaggatcaggaaacattgcaaaaataatttgcgcgaaaatcaatgataaaatactgccaccaatagaaaacgtaaaccgaaaactatttaaactcgttctttcatcataatcttgacttaattccggtgtcattgccgtatatggcaaattaacaatcgtaaaaaaagcctgagacataatcccaattgctacgtaataccaaaacaaaggccaaatattactactttgattggcagtaaattgtggtacaatccattgtaagaaaaagaataaaccaaaaggaattgcaccataaaacatccaaggtaaacgacgaccccaacgccgagattgagtcttatctgttaatacccccacaatcggatcattgacagcatcccaaatcttaccaatcatcaaaatgctgcccgccaaaccagggggaataccagctacattagtaaaaaacaacagtaaataaaagatcgcaatattagaagtaatcgccggacctaaatctccagcgccataagctagtttagtcttcaaatctaatttttcattgttcataattacttacactcatattaagatagttgggatttgcttgctgtgctaactaaaaactacttctctaagtcctatgtcagacctttacgtttcctggtcagattatcaccataaaattgaacaattagcagttaagatttataaatcaggttggcaatttaaccaaatagtctgtcttgctaggggtggactgcgtgtaggagatattctttctcggatatacaatctacccttagcaattttagctacatcatcttatagtggtgcaggtaaacaggaaagaggtggtttaatcgtttcccctcatttaacgatgactactgaaagtttaggttcgcgggttctgttagttgatgatttagtagattcgggtatcactctaaaagaaactatttcttggttaaaagaatatagccaggttgcgattgaagaaatccgtactgcggtaatttggtataaagattgttctgtaattgtcccagattactacgctgattatttaccggataacccttggattcatcaaccttttgaaatctatgaacatataaccccggaggagttggcggaaaaagtaagtcagctttgttgatactatgacttaatcgtaaagcgatcgcctaaacctttgagtgtcatattttgggcgatcgcatcatgggggattaacagctttgctgtatctatgtcacatactttaaatcctgattatgcgagaaaaagccctaaaaaattccttaaatcgccaaaaacatctatcattaacagtagaggtacactgcaactatcaggacaatcatactactgacaccatgacaatagatatacgggctttttataaagcaactaaccctgctcgcacacttgtagccaagaatccagaagatcaaaaagtttatattgacttttcagaattgcgtggtgagaatattattaccacacttctggatcaaattacattttttcagcccgatgaacctacctgtaatctatttactggacatattggttgtggtaaatctacagaattattacgcttacaggtagaattagaaaaagcagatttccatgttgtttattttgaatctagcgaagatttagaaatcacagatgtagatattgctgatgtgctgctggctattgctagtcgcatcagccaaaatctagaacaactgcaactagaagaaccgaaaaaatttaaacaattacttcaaggtgcatggaatatattaaactctgaagttacaggtgtgaaggctaaaattgctggtcaggatttagggtttaatgttgacggacaaaagttttctctgtctttgggtattggtgaaatcactactaaaattaaacaggactctacattaagaagcaaaataaatcaatatttgggaccacaaaaaagcaatttactacaagcaataaatcaagaacttttagaacctgccatttctaaacttaaacaacaaggtaaaaatggtttagttgtgatagtggataacttagaccgcatagacaatagcattaaaccctggggtcgtccactattcagcaaaccccaattacaaataattttcatctaaaagttgttctaaagtataaggacaagattcggggaaatcaattttaaatctagttttttgcctaacatattttaaagcacttctataaattttttctaattcactattaagataattttgtaaattattggttaataatctttctatttggttacgaaaactaataatttctgtttgccaatgattcccattcatttcatattcctctgtccaatagtgtaataataaaagatgtctaatgatttgttctaataaactagcaacagcgtttttatctcttctacccaaagcttctaactcctcaatcaaattatttaagtctaaatcttgaaagcgtttttctttgagtaaagcaattgtttcttctaaccataaattttcatctatttcatatagagattgtaaatttgtgttgatgttcataatttacctcttttgggatgaattagggtttgctgaataaacctaaaaccttgatatatcaaaggttagaggctgataaacacagaaattagtgcaagggttttgaagggtataccggaaaaagtgtgcattttttgggatttcaagagatggcaaagaaattttcaaatctcctcctgactcctgactcctgactcctgactcctgactcctgactcctgactcctatgccctcacggaaagactttctcagcaaccccgaattagtaactatcatttttaactattatttttgcttcggttttacataattatgtttattttaccgaaattcatgaattgtttacattaatttgcagctacttcagctacttatttaagtttttctgtttttggcactatacagctttactagaacaccgattcaccaatcgtaagggcgaagcattcgggtcataacctatcgctgaaaccagttcatattctgtccgaatgcttcgcccctacactgaatcgacgctctagaatgaggtacaaaattatctgtgttcatctgcgttcatctacgtttaaattttgtctgatagcatagcgtggcgcaagtgtcaggatgtccaggattgcctcctacggaggagctacgctaacaggatttacaagatgtagtttaccaattacccattaccaattacccattaccaattacccattacctaccttcaaaacaaccacaaccaaaccggcaaagtaaccaacaataccataactcccattgctaaagcagtcacagccaaatcacgatctaaatcaaaggtttccgctaataccacagtagcaaaagccggaggcatggccatttgcaaaactactacctgtgctgcttctccagtcacaccaaaaaaccgtaaactactacctaaaaccaaaggcactaataacattttgataaaaatactgattgctgctggtttgagtttgtacaaagaacccagatgcgccaacctcataccaattaaaatcaaggatgatgctaaagcaacccaagctaatgtattcaagctaaattctatcagtggcggaatactaacttggcgaaataataacccaaaaccaaaactccacagggcaggattgattaatatggctttagccatttgttgatgattttgggcagtgttgctaaaacgggctgctagtaatacacctaaaccataagcaccgaataaagtccctaataaatcgtaaaataaagcccaggcgaagtattctttgccgaccattgctaaagtgataggaaagcccagataaccagtgttacctaccattgaagctaaaattaaactaccttgggttgagggttgggggtgagaatttgtcaaataggcttgacctttgatcaccaaccacgctaaaaatgctcctagtaaaatagctaaataggcgatcgccggagcaatccaaatctgtcctgatagatcggtttgtcttaaaaaagcaacaatgctgatcggtactcctacccaaaacaaaaattcacccaaacgagtaggaaatatggcaggtaatttgcgtcccagcataactcctaccaggactaatcctaccaatttgacgtatagttctaaaagatttatcaagattttgctgaaaaacagatatgtaaaataatacctattacgttgatttttttagtgagactttgtgattaaatgtcagcattcagctaacagtagtcagcagtcagctttttccagggtacttccaaactcacatttgataatctactgattgatcaaacattcccatctgtacttcctgactcatgactcctgaattgttacgtttaaatgttataccttatttaccaatctaaaatataaaatctaaaatctaaaatccaaaatctaaaatccaaaatctaaaatccaaaatcttatattaaacaggagtggactcttgaaaaacgctggatttgcaggaaaaccccaaaactcatcaccatcaccaggtgacgatattccagcagctttgcgcgatactcctgatagtgaatctcagatgcgcgtacaaccgctggttttaatgattgggggaatagtcggatttatggtgatggctgtaggtagtggttttttattttttattacagcacctaaaaataatgctgattctcaatcaacacctgttgtttctacacctacaccaatcaaaactccagcagttaacaatgatgtagtgttgggacatttggcttatcctgaagcaccagagtcagaattgttaccaattacagccgatggacggattagattgcgacaagcagccgcccaaagatttcaagctatggcacaagcagcacgtagcgcaggtgtaattttagtacctatttctggttttcgttccgtgaaagaacaggaacagttattttttactattggcgctcaacgtaatcaaacccctgcggaaagagcagcattgagcgcccctcctggtcatagtgaacatcatacaggctatgcagtagatataggagatggagcagtaccagcaacaaatttacaaactaattttgagaataccaaagcttatcaatggctacaagctaacgctgctcgttttggttttgaattgtcctttcctcaaggcaactctcaaggtgtgagttacgaaccttggcactggcgttttgtaggcgatcgccatagtttagaaactttctacaaagccagaaatgtcaaaccagtacagtaggcagaaggcagaagatgtatcaagtcaaaattcaaaattcaaaattcaaaattcaaaattaataactttctttaccaatcaccaatcaccaatcaccaatctattgctataaataatatgtgagtaaggattcagggaacagggaacagggaaaaaacatttttcttttgcctcctgactcctgactcctgactgatgtgatggttattgctaggtttttatttatgaataatccactttatgaacaggattttgttctctggacagaacaacaagcaaaaactattgaaaataaagccttagatgccattgactgggtgcatattcaagaggagatatcggccttggggcgtagtgaaaaacaagcattacaaaatcgcttagaagttttactagaacatttattaaaacggtgttatgtaaacagtatttatgataatcgtggttgggaattaaccattaaggaacagagaaagcaaattcgacgtttagtaaaagtctcacccagtttaaaaaactattttacagaaattttcccagaaacatgggaagatgctttatcagatgttcaagatatctatcccagtattgcctttcctgaaaactgtccttttcccgaagatatggatagtttattaactgattccttttgggaaaaataaaataaactaatacccagatccctgacatctgagatcaattcctaaattattaatcctaaattattaacacgataataaaagaagtcggggatcttatcctgtcacctgtcacctgtcacctattccctcatgttcacagatatagaaaaccactgggcaaaagcatctattgtcactgcggcggcaaaaaatattctcaaaggttatccagatggaacatttcgccccgatgcacctgttacccgtgcggaatttgcagccattgtgtatacaggtttacccaaaaattcctcttctcgcccagcaattcaatttacagatgtacctgctaatcattgggcagtaaatgcgatcgcctcagcatatcaaacaggttatctctcaggatatcccaatcgtacctttaaacctaatcaagcaattccccgtgtacaagcattaacagctttagtttctgggttaggttatcaagtcacaggagatgcgatcgccaccttaaaaaaatattacaatgactttgggcaaattcccagttatgccatgaatgcgatcgctgctgccacacaaaaacgcatcgttgttaactacccagacatccaacgtttacaacccaacatcaacgccaccagaggcgaaatagcagcctttatttgtcaagtcttagaaatttctactgtaccttacaaatatattcccggtttagaattatttgtgattcctccacaatttgataatgctgatccttttgtggcagaattggtaagagtacagaaagataatcaatggggttatattgacaaaagcggaaaatttatcattcctccaaccttaaaagaagcaaacactttttccgaaggattagcattatttaggaatcagtaattagctttcagctatcagctttcatgttgaaaattattgttagatgttgaacatttaacttgcatactatctcaaattaaaactcttgtggggtgggcatcctgcccgccctgtttatgcaaattaaaggtttatcaacttagtaaatatatcttggaaaatccaaaatctcaaattttcctctcctaactcctgactccttatttacaacctaaaattgaactatggaaattcgcggtatttggatcacggttacagacagtaatgtgttagacaaaagagaaaatatccaaaaagcaatggaatttctcgccaaaacaggatttaacgttgtttttcctgttgtttggaataacggtttaaccatctatcgtagtcaagtaatgaaaaaactaataaacatagaaatcaaccctcgctttgacggtgaagataaaaaccgtgaagataaaaagcgagatcctttacaagaaataattgaagaagccaaaaaagttgacatcgcggttattccttggtttgaatacggttttatgagttctcatgtagccaagagatccaaatttaacattattgcaaacgaaaaagattgggttgctcgtgatatatttaacaacgagctaattaaaaatgaattttgctggttaaattccctagatattcaagttcaagaatttatattaagtttatttttagaagttatcaaaaaatatgatattgctgggattcaaggagatgatcactttattgctttacccagtgaaggaggttatgatgctaaaactcttgcacgttatcagcaagaatttcagggtcagggtcaacccccaaatacatctaaagatcctgattggttaaaatggagagcagatattttatcacattttttcaatcgttttcacagagaaataattaaagtcaatcccaatttaatcatttccatgtctcctagtgtttttcgttggggttatgaaaactatttgcaagattcactaacctgggttaactggagactattagatttaattcatccccaagtttatagagaagatattaaagcttatcaatcggaaattacccgaattgctcaatcacaatttacccaagaacaactatcacaactaattccaggtattactatttatagaaaaaaaccatattatatgattaaaccagaagaattaattaccgccatagaaactaaccgaaaactcggtattcaaggggaaattttatttttctatgaaggtttaacgcaaaatgatgagcttttagccaaaacactgcaatctactgtttattctcaagcaccaggaaaatttgacatcaaagaaattaaaaataaaaatagcgtttttacccaagaaagactaaatccctataactatgtcaatctatctactaataaagaaattgaaccagatccccagttttcattaaatttatttgatagaattgaggctttttctcaaggtatagccgcagttagaattggtgaaaaatggggttatattgataaacaaggtaagctaatagggcgcattgaatatgatagtgctgcaccattttccgaaggatcagcagtagtgaaacttaaagataaatacggttttattgatatgaatggcaaccgtattacagatatcaaatttgatgatgcggtatcttttgctgaaaacatggcagccgtaaaaataggtaatggttggggatatgtagccaaaacaattgatcaaaaaggacaatttacaattcctgcaaaatttgtagaagccaaatcattttctcacaatctagcagcagtcaaaataccagaaacgaataaatggggatatattgataatagtaatagaactatcattccctttaattttgatgatgccgatagttttgcaaatggtgtagccgcagtgaaagttggtaatcaatggggatatattaatcaaactggttactttgtgatccagccacaatttgaagaagtgggtatttttgtagaaggattagcacctgcaaaaattaacggcaaatggggatatattaataaattggctgagtttagaatttacccagaattcgattttgccaaacctttttctcaaggtttagcattagtcaatgttggtggtaaatggggatatattagtaggtgactggtgactgggtaatcaattttatttttaccaattaccaattaccaattatctatcaccttttttatactttcctggagacttgcgggcaaaataatcctccatgatttccagaatcatgggtgcggccacactaccaccaccaccaccagaatgttcaccaaaagccacaaccaagatttctggttgatcagcaggtgcataagcaccaaaccaagcatgattttgtttgataccacgacgattccaagcttctgctgtaccgcttttaccagctactgggggaatatttggttgattcaaaactttacccgtaccctcagataccacttttcgcaatccctcacgaagaactttaatagttactggtttcatatttaaagatgaacgccattttttagcatccccatcatctttcagtaaatgtggttgcactcgataaccaccattagccggtacagcaaacattacagccacttgtagaggtgtagttaataaagcaccttggccaatggtcatattaatagtatcgcctatagtccaaggcattttccaggctttgcgcttccagttatcatcaggaactaaacctctagattcttctgtaacaaaatcaaaaccagttctttcaccaaaaccatatttacgagtccattcaattaaagtcggaccacctatacctttaccaatttgataaaagaaagtatcactactccactgcatcgcacccacaaaacccaacggaccaaatcccgcatgattccactctccaaatcttgtgccaccgataaccaaataaggataggttggtagaatcacattaggagaaaatttacctgattctatacctgctgtgttggtaacaattttaaaggtactagccgggggaaaagcacttaaagcccgattaactagaggatatccttcaccttgcacactttcccaatctttttgagagagtttttgtttagaaaaaatatttgggtcaaaggttggatgggataccatcgctaaaacttcaccattgttagggttaagtgctacgattgccccattgcgtttacctaaagctttttccgctgctttttggatatttaaatctatagataagtgtaaatcattaccagcttttgcctgtttttctcccaacactcgcaacggtctaccagcaccatctacttctacttgctggcctccccattctccccggagtgttttttcataggctttttcgacacccatttggccaatgacatcaccgagacgataaccttctgactttttcttttttagctgttctgctgtgagttcgcgggtatagccgagtatatgggctaattgtctaccatcaggataataacgtacagcttcagtattgatttctacatttggtaattcgttttcatattcctttaaggctgtgacttgagcttcatttaagtcacgagcaatgcgaatcagagaagaagaattagctccagctttttctagtttctgttccatttcctcttgcggaatatcgaggatttgggacagacgcggaccgacaattgaccacgatggcttagtatgtgccattggccataggtgaacagagtgaggataacgagtagtagctaacagtttgccattacggtcaaaaatgttgcctctttccggttgtttgggaatcatgcgaatccggttagactctgccctttgccggagttttggaccttcaatgatttgtaaataagctaaacgagcgcctattcccgatatcatcagcaaagtgaatagtattaagaatagtgactgggaaccacgcccaactgtgcgggtatttttttgataactcagtagtggtggtaatatagccataagattaataaagaagtatgaaatttatattatctgtaaacaatgcttttagtcgctatccggcatcgagttcaaaacaatggcattgggtttatatttttaataagtatatttttaacaagggtgttgttgccagatacaataaacaaaagtctgatttgtagtctatttcatagcctacatagctaaccaggtttcacaaaatcaaggcattctactgaagactatggctcaaactgtgatgcaaactcagaggagtgtaaccaatttccagccgcttgatgttgaactgcggaacgtattcaagtttttcaaccaagaaccagcagtacatggtgtggacttggatgtgagacagggagagttctttagtattttaggaccctctggttgtggtaagacaaccatcttacggttaattgctggctttgaaagagtggacgcaggcaagttgttgattcaaggcaagtccatgactcatgtacctccttaccaaagacctgtgaatactgtatttcaaagctatgctctgtttaatcacttgaatgtgtgggaaaatattgcttttggactgcggttaaaaaaattatctccatcagaaattaatagcagagtcacggaagctttaaagctggtgaaaatggaaagtttgcgatcgcgctttccttctcagctttctggtggtcaacaacaacgagttgctttagctagagctttggttaaccgtcccgctgttttactcttagatgaacctttgggagctttagatttaaaactgcggaaggaaatgcaggttgagctatgcaacatccataaagagttaggattaacttttgttatggtgactcacgatcaggaggaagcactcagtttatctgatcggatcgcggtgatgaatcagggcaaaattgaacaagttggtactcctcgcgccatttacgaacgtcccgaaacagcttttgttgcagattttattggtgataccaatttatttagcggcgaaattactgccattgatgccgagtatgttaaagttttgactaaaaccggattttctattgttgctgctcgtacaaaagatacaccctgggaattattacaggcggtagttttaagtgtgcgtcctgaaaaaattcagatttctctttatcatcccaatctacccacaaattgctttgaaggtcggttagttaatatcatgtatttgggtactcatgttaattatgtcgtggaattagctaatggcatcaatgttaatgttttacaacctaatacctttggtagtttaccagaccggaatacacctatttacatttggtgggcagaaactgactgtttagctattagtcaaacatcaaaggtgaattaagagtaaaccatgatgatgacaataaccaggagaagggaatttattaaaacaatggcgttgctttctagcttgtctttaagtagttgtggctggagattagctaatgtcagcgccaataattatactggttcagtttctgggaaaagtgatgaattgtatttatatacatggagtcaatatacggatcaagaattactatctactttcactacccaaaccggcatcaaggttttggcagatgtgtttgattctaacgatgtgatgctggctaaactccaagctggaggaggtgctagttatagcgttatctatccatctgattatatggtacagaagatggtagaaaaaaatttgttagcagaaattaatcacgaactttcaatagggttagaaaatttatttcctcaatttcagaatcctacttatgaccataacaaccgttatagtttaccttttaattggggaacaacgggatttatctataactcggaaaagctgaaaactccccctgaagattgggaatatctttggcaaaatcaagagcaactttataaacggatgactttactaaatgatgtgcgggaggtgatgggagcaacattaaaaatgctcggttattcttataattcgcaaaatgccacagaaattaaagcagcttatgaaaaattgcggtcattaaaaccagcgatcgccgcttttgatactgatgcttggcaaaaccaaatattggcaggagatttattattagctatgtgttattctgccgatggcgtgaagatatccaaggaaaatcctaaacttaaatatgtaattcctcgcagtggttcttctctctggacagatactattgtcattcctaaaacagcgcctaatattcctggtgcttatagttggattaacttccttctgcaacctgatgtagctgccgaaatcagcaaaagattgaaaattgctactcctaatcgtgcaggatttgaacaattaccaaaagaaattcaaaataatactagcttatttcctccagaatcaattttaaataaatgtgaacgcctcacacctgtaggtgattttgaagcagtttatgagcgatattggactcaattactagcttaaatacagcatattcaggagtcaggagtcaggagtcaggagtcagtagtcaggagtcagaatatttgtttgtagcaacaatcatccagaagcaagttttttcatcaacaaccaatgactcgaaaaatctaattcattctaaatcttgtattctgtatactgaatccttactgaaaatccaaaatccaaaatctaaaatctaaaatctaaaatctaaaatctaaaaattggtatcaggctgtgtctattcaacttcctaaatttcccgtagcatcccctagcaatattgctaaaaaaccaccacaattatatcgtcattttgtccaatggttgcctcctttatccttacttgcaccatcagggatttggttattactgttgttattgctgccaacactgataattttgcaattgagtttagttaaggatatcagaccaggtgatcttgtcaatcctaatggattggataactatcttcgtattttagaaccgctgtatttacgagttatcttcaattccctgtttttggcaattaatacgacaattatttgtttaattgtgggttttccagtagcttattggattgcccaaatgtcaccaaaacggtggcgaactttattattattaggctttgttttgcctttatggacttcttctttactgcgttcttatgcttggattactattcttcgtcctactggattattaaatagtttacttaccagtataggtttaccagctttggaattgttgaaccgaactccagcagttttaattggcatgagttacagtttattaccctatatggttttagtattgtatgcttctttagaaaaattagatcgacgtttattagaagctgctgctgatttgggtgcaaacccagtacaaacttttttgaaagtgacagtaccccaagtttttcccggtattgctgctggttctttgttggtatttattacagcattgggagattttattgatccagaattattgggtggtgcttccagtatgactgctgcaaggttggtttataatcagtttctcggtgctactcaaaattggggttttggttcagctttgagtatgactttgattttggtggtgagtattgccttagcggtagcttaccattcgcgcagcgtgccgaaggcatagttatcgccctggtgattaaatttggtatttagggcttgctgaataaactcaaaaccttgataaatcaagggtttcaggtggaaaatcaggaaatcagtgcaggatttttcaggggtatactcctaaaagcgtgcattttccgggtgaaatttcaaagaattggttactaacagatcacccaaactcttgcctattccctattccctattccctgccttaacgaagagactttttcagcaaaccctatttagtttcaatcacaaaaatatagtcaaacatagtcaattaccaattacccattacccaaagtcattacacataaaaacaaagcctcagtccattcaaccacagcaccgtaagtatctccagtgtgtccacccagcttatagttaaaccaacaagggactaaaagagcgatcgcactaccccccaacaccataaatacagataacaatagattttgggaattaacaacccaaactaaaatactcaaacccaacaataaaaaccaactcggtaaaatatctgcataagaacgaattgcctgtttatgaaatgcacctttaccagtaggtttcagatagggatatcgcaaaatcgctacttgttgtccccaacgtccccaaccacaggccgccattaagattaaataacggttttccgaaatatccattaaagctgcggttttcaacaacaaaatagcgatcgctaccattgccccaaaagcaccagtagcactatcagccattacctgtaacctcttttcaggatcacctactgctaaaccatcagcagtatccattgcaccatctaaatgtaaaccacccgtaattgcgatccaggtaacaaccaccaaagcagtccgagttaatacggggatatgtaagtaattaaaaatgaaatctaataaacctaacattcccccgatcatcaaacccacaaccggagaaaaaacagcaacattgccaaaatccaagcctgagatgtagggtaaaggaatagatgtgtaaaatataatagaggctattacctgtaataatttaacttggcaaaattgccatagttgcaaaatatatcccatagggaaaactcaacttcagatggggaataaaaacttactgtaaaaagttataggaaattgaggattttccatagacgatcgctatataaagttgatattttggaaatgtagggttttgtccagtgaaaaagctaggcattgacttttcatctgtgttgtcactcaccttccctcaatcgctaatactctatgagttatcatctacccaatatcaaaataccagccccgtgtattgtcaacaccggcgtgattgtaaataaactcgacatccgcagactcttaacagatttaggtcgagttcactacatctacagccaagagaacaagctactgagcgaaggtgatggggatgtgatggaagtatttgcccatccgcaaaggtctacaatagttgctaacaacgctctgtatctgaatatagatagttttgattatctagaactacaacaatcacctgaacaagaaacatactttgatttattccaagaagagttttgtttgcgtctgattccactctctacacctttacaagaaagatgcgatcgccaatttaacgccggtgcaatagaagcaatgatggatcaggtgttatccgctcgatgggatgcggaaattgatgacgattgctctgattgtttctaactccaaaataatatacccacagcaacgatactatatagcagggtctcacccccaatttttggaagatggggagatggggagatagggaggttaataacccaatcaccaattaccaattaccaattacccattacccattaccaattaccaatgtccaaattctcttttcaactcctagctacctgtagtcaaaccaaagccagagtcggtgtgttttctacccctcatggtattgtggaaactcccagatttatgcctgtgggaacattggcaactgtaaaaactattaccccggctcaactcaaggatacaggggcgcaaatggtactttctaatacctatcatttgcacctgcaaccaggagaaaatattgttgccggtggtggtggactgcataagttcatgggctggaatggtccgatgctcacagactctggcggttttcaggttttcagtctcagcgaaatgcgaaaaattacagaagaaggtgtaacgtttcgttcgccccatgatggacaaattattaaactaaccccagaacgttccatagaaatacagaatactctgggtgctgatgtgattatggcgtttgatgaatgtccaccctatcccgctacccgtcaagaggtggaagcagcgacggatcggacctatcgctggttagaacggtgtatagcagcacatcaaagaactgatcaagctttgtttcccattgttcaaggtggtgtatatttagatttacgcgcccgtgctgcctcagagttggctaaattagatatgcctggttttgctattggtggggtgagtgtgggtgaaccaccggagttaatggcacagatagttaaagcgacaacacctttgttaccagcaaataaaccccggtatttgatgggtgtgggaacttataaagaaatggctattgcgatcgcttctggtatagatttatttgattgtgtgattcctacccgatgggcgcgacatggaacagcgatagttaacggtgaaagatggaatctgaaaaatgccaagtttcgggaagattttacaccattagatgaaaattgcccttgttatgcttgcacaaatttcacccgtgcttatatttcccatttagtgcgatcgcaagaaatcttagcttatacattattaagtattcacaacatcaccgaactgatccgcttcacccaaaaaattagagaatcaattttaagcgatcgctttgttgaagacttcggacactggctaaaagaggaagaggtgacaggtgacaggtgacaggaggcaggggaagcaggggaagattaataacccaatcaccaattcccaattcccaaaccatgttaatatactcctcaaatatgaaagctgtgttggattattaggtggatagaaaaaaacatggaagcagcacttttattagcaaaactgcccgaagcgtaccaaatttttgatcctttggtagatgtactcccagttattcctgtattcttcctgttgcttgcttttgtttggcaagctgctgttggtttcaggtaaattaatctggtttcaattttttggacagggattatacacctgtcctattttctcaagatttatttttaataaaatttgtattttttaatgttttgcaataaattcacccaattaagtaaaatactgtaacaaccactaactaaaaattaacaaaaatttaccactcacacaggaaacaactatgggaaatattaagtttgtcaacgagaataaagaagtaattgcggctgatggtgcaaacctgcggctcaaagcaatggaaaatgggattgatatttataaattttggggaaaaatgaccaattgcggtggttatggacaatgtgccacctgtattgtggaagtagtagaagggctggaaaacctctcaccccgtactgatgtagaaaagcggaaatttaagaataaaccagataactatcgtcttgcgtgccaaaccctagttaacggacctgttagcgtagttactaaaccttaacgaaggcaggaggcaggaggcaggaagaggcctattgtacggggggtgaatgtgatatattagtcttgagttcaagaagcgtagatcctttgaaagtggtgaaagtcctgatctgagagtgcggagagttagaattaacctaaccatagctcctgtgtggcaggaaatcctataaattagacgaaataaaacattttcaagagtagctaatcaaatcagaactgaaaaaaggtaaaattagttcggaaatctatctcagattagaaaccgaatagtgcggcttgtagttagccctgtaaggtgtaagaccttaccaagctagaaatatttgactatatttttagtaactataatgctattctaaaattgttgactgaaaatcaatttagagagaggctatcttgccatgcaagttaatgacctgggctttgtagcaagcatcttatttgtgcttgttcctgccgtatttttaataattctttacatccaaactgccagccgcgaaggtggtaaaaactaacagtttggtaattggtaattggtaattggtaattggtaattggtaattgagctagtcctaagctgactattttatagataaaactgtacttatgttgacaagcattgacataagtgagttaagaaaatcacccacttgatatataatcctacgatatcaagtattgaattaagactattgccaacgcgaaaaccaagcgatgatagcggtagtctttcttgtaaatcttaacttgagaaatatcgcgtctggctaaggcgtgcaagtctactgagggataactgctcccccgttgaagtagaaagtaaagtctagctttgtctaggttttatatagcagaaagaaagcaaaaggcaagagaaaaaagaattgaagaataaagaattaatttttcttcccctgcttcccctgcttcccctgcttccccagtcaccagtcaccagtcaccagtcaccagtcaccagtcaccagtcaccagtccccagtccccagcccctatttatgcaacagtcctagccaacaatactggacaagtggcattaacacgcacatagtcagataaagaagcgccaacaagtcgatccaaatctacaaaactcttagcaatagatggccgacgatctggagaacctaacaacaataagtctacattgagttcttcagctaaacgacaaatttcttcacctggtttgccactacttgttacacaacgcacagaaacaccttgtctttccgctgctgttacagcatttcccaacactgtatctttttctggtttaatatcagcaatacctgataatttactgcccaagtctgtattgatattagccaacattaactgaccaccactaacatctctgagcaaaaataaagctaagttcaagcaattttgggaagcatcagaattatctattgccaccattacacgcttaattcttttgacataaatgtcatctttaaccagcaacatgggacgagaagacaattggaaaacatactgactgacagagttagctaaaattgattgcagtcgtttcagtcctcttgaacccatgataatcaagtcagcttctatttcatcagcgacttgacaaactacatctttgggatctccttggcgtaaaatagaagaaacccgactgggatctaaatccaaagactgaattgcattagctaggatcttaccaccttcttcccatttatctgtcattgccgcagcagtagtttgtgaaggtacaacgtgcagaactgtaacttttgcagattggatagatggcagttctttcaatgtcttcatcatttcttctgcgtgtcctagtccagagacagccagcaaaattttttgtatcattgtcggtaattgttcttaaggtttctttgggttgcgctgccagtaccgagcatcagaactgatgttctcaatttatctgaaaaacctagttagcaaatgaacgcaaataaattttagttattagttattagtcttgagttattagtcttgagtcattacaaccaaaacttaccaatgagtagaaaactaataaaactttaagtttgtttgcgcttagttactgaaaattgcccccaggtttttcctagattcagcatactctcaatttagcctaattaagtgtacgaaatataatgttatttattatttttaatctatattcatttttgttgatgagaaattagtaaagaaatacaacagaaattaaattctcactatattaacttttctgaggagctattcctaagctgacaatcttattgtcaaaatataattattttgacttattctgacaaatatttacacaattgagttaataaaaatagtgtttttattttttcagttaaactgtagaagtacccaagcaaaattaatttaacatattgatattgagtgaaaacaaaagtgtctgtattctttaagtcctgtttcccgttccccgttccctgttccctctcctaactgtaaaatttattttatttattttacacaaagtaaaaatattaggaatgttgggtttccttacgtcaacccaaccatagaatcttttaggtagcagccaacaaaccattatgcttaagtaaagcagttgtttttggttcacgaccccggaaggctttaaaaatttccattgggtgcatactaccacccatagctaagatcgtatctcgatagagcctaccagtatcatgtattgccacttcatcttctaaatccgcttcttcaaaagcagcaaaagcatcagcacttagaacttcagcccacttatagctatagtatccagccgcatagcctccttcaaagatgtgaccgaaagcacataaaaaagcatcctcaggcaatggtggtaaaacagtagtagttttggcaattcgttcacggacatctatgggagtttcatcaccaccaggacgatagcggtaatgtagttccatgtccacactgctgaggtgaatttgccgtaacattgccgaaccactcatgtaattacgggctgctaacagcttttgataataatgctctggtaatggttcacctgtttcgtagtgtttagccatactgaataaggtgggacggtcataacaccaattttccataaattggctaggtaattctattgcatcccactccacattattaatacctgctgcgccagtataatcaaccttggtgagcatatggtgtaaaccatgtccaaattcgtggaacaaagtttctacatcatcaaaagtcatcaaacttggtttattatccactgggggagtttggttacaaatcaaataagctactggtaagcgggtgctagttataccccgttctgtgattttgctgcgatgaatacaagcgtccatccaagcaccaccacgtttttcggcaggacgaatgtagggatcgagataaaagtaagcaatgggagtaccatttttatcagaaatttggaaataacggacatcctcatgccaaactggagcttgaccatcagcaggtgtcacagtcacaccaaatagccgtttaattagtccaaataagccatcaagaacttggggaagggggaaataaggacgtaattcctcttcagtaaaagcgaatttggcttctctttgacgttctgcccaaaaactgatgtcccagtgttgcaaatcttccacttctgctgctttctgagatttagcaaaagctttgagtgcttctaaatctttaacagcagcatcataactagcttgacgcagttcttctaacagcttttccacggctgggacatttttcgccattttactagctaaactcagttcggcaaaattctcaaagcccagtaactctgccaattcttgccgtaactgtaaaattttttcaatgagagggttgttatttaattccccagaggaagcacgggtaatataagctttgtataatttttcccgtaaatcccgactggtgctgtgttgcatgaagggaaaataactgggaaaatctaatgtgatgtgccaaggtccattttctggagtggcctgttcttccccggcaatgcgagccgcctgagcagctaaactgattaagctactgggtaaaccgtcaatttctgctttggttgttaaaactagactaaaggctgaggtagcatccaaaagattattagcaaaatctgtagccagttctgctaattgcatttgaatcacattaaaacgctctcgtgcttctccttccaaacccacaccagataattttgcatctcgaatcgctgcttctacaatgcgttgctgggcagattctaaggtttcccaggtatcactggcacggagggctttaaaagccttgtaaatcggtttgctttgtccaagggtgttaataaattgtactacttgtggctgaaccttttgatatgctatacgtaaatcagggctatttttgacacccattaaatggttgagtataccccaactccagtacagcttttctgttaacttttctagaggttctactaaaccagtccatgtaggctctacattagtttctaatatagctagttgttgttgcaattctgttaacagatgtttaaaagcaggttctacttgctctggtgtaatatctgcaaatggcggtaaacctctgccttggattagggggttttgagaaaaaatagcagttgcactcatggttttatgttagtagccgatcaataggcagaacaacaatgacttttatttatataactaataatgtaacgtaactacacaatttagccttgctagaatggcattcttataaatttctcaaaatcagccagaaaggagaagcaaaattttcccagtatatagataaggcataaataggttttttcatgattttacagggataatttaccataatcagtgttttagtatttacaaagtcataaaaattctgctttctgttttctttacacctgtggttgtattgctgacttgtatggatgcattagcagcaattaaaaccaaaaaaattggatacaaacaaggaaagacagttttaaaaggttatttggcttataatgaatcgctcaagaagaagcgtccaggtgtgttggtggttcatgaatggaatggtttgcagtcctatgctaaacaaagaactgagcatttagcaaagctgggttatgtaggtgctgttaataatagcagctaacgcctgacttcaaagccccgcaaaccttttgggtgttcatactcaactgtaacttcctttaccattgccgcaggtggtcctgcatgacaccaacgcaccatttcctctacaatttctttagcaccctcaaaaactgcttccactccactatctgggagatttcgcacccaaccagttaaccccaactgggtagcagtatctacagtggcgtaacgataccccacaccttgaactctgccagtaatgaagacatgagcgcggattagttttggtagtggtgttgtagattgcataaaaaagtctggtttcaggagacagtaagcagaaattaacagtttctagtattttacgatttcaggtttactttttaatctgcaactttgttggtacagttgggtttctcggttgtcactgataaatctttaatttcacccctaaaacgctaaaatcttctaggttactgactgagtttacaactgacaactgacaactgacaacaaaacacggacaaaattaaaattacttatgtctaacttgccaccactcaataaagaaacaatttgggatattatcaacgataaaattgatgatactactgttaaccaattggtatggtatcacttgggttatcgttatgatgctaacactgaaaaatgggatactagccaagtagcaccagaatgggtggctgaatatccagaacctggtaattttattgagtctcgcccagcaacaatgaaattaactcgttctattccccaagagaataaacaactgctcaaacaaaaactaggttttaaaggttacaaaatcggagaatttggtcctcggcaaactcgcagggcaactatggcaggttggttattaagttatatgatgatcactactggtaaaattgaataatataatatttggtgattggtgattggtgattggtgattgggaaaaagcaaccagttaccaaaagctgattttgatataattgatttttaataaaatttcctagaacaccgattcattaatcgtaagggcgttcgcgcagtgtgccgaatgcatagcattcggaaagaatatcaattgtttcaacgataggttatcacccgaatgcttcgcccctacaagatgaaaacagattacctgacattactgaatcgacatacataaacatagattttttcctaaaaatctgcttttttatagattcatgttttttgatttttatgtattgttgaactagatcacaataatgcacgtaattacttaatggtaattagtgattagtcaagtctcatcaaatctaactaatttttcaggttttcatttttctgagaactaattactatttttctcaatactggatattctgaatactagatatcctgacttctctattatagatacagcatctcaattaaaacatagcccgaaagagcgttttactcctgactcctgtacgggcaaccacggggggttgccactactgactcctgactcctgactcctgatgtatcttgtatttttcctgaaaaatgtgtatagtattcctttacacaatcaagcggattacacaagtttagagttttacaccatgatcaacaaattaattaacactaatattaagagttcgcacgttttattaactcctaatcaagttaaagaaaaattgcctttaactaaatctgctgaacatacaattttgcaattcagacaggaaatagaacatattcttgattttaaagatagcagaaaattcattgtagttggtccttgttctatacatgatcctaaagcggcgatagaatatgctgagaagttgaaagttctagctgataaagtgcatgataaattgttgctgatcatgcgggtttattttgaaaaacctagaactactgtaggttggaaaggattaattaacgatcccgatatggatgattcttttcatgtagaaagagggattttaattgctcggagtttattattaaaattggcagaattaggattaccaacagcaacggaagcacttgatccgattattcctcaatatatcagtgaattggtttgttggtcagcaattggagcgaggacaactgaatcacaaactcaccgcgaaatggccagtggtctttccatgccggtgggttttaaaaatggtacagatggtaatattaatgtggctttgaatgctctcaaatcagcgcaaactccacataattttttaggaattaaccaaaagggacaggtgagtgtatttcaaacaagaggtaattctcatggtcatgtaattttgcggggtggaagtcagcctaattatgatccggaaaatgtgaaattggtagaggaacaattaaaagccgcaggtttaccaccaagaatagtcattgattgcagtcatggtaacaccaataaagattatagattgcaatctgcggtgttagaaaatataattcagcaaatagttgctggtaataattcaattttgggaatgatgctggaatcaaatttatatgaaggtaatcaaccaattacaggaaaacgggaagaattacaatatggtgtttcagtaactgacaaatgtattagttgggaagaaacagaaagaattattttggctgctcatgccaaactcacgtaaagttaggaggcaggagaattttagattttagattttagattttagattttagattggattaatgaaatacaatccaaaatccaaaatccaaaatccaaaattgtatccccaatcaccaatcacctgctatagtaattgtttgttcaattgctggtagataaacattgaaaaaatctgtttctacgtctaaaattaaatcttcgcttgctcctttatgtcgaatagaaacattgttgtctttcttaatgatcacaatcgaaccatctatggcatctcttaataatatcatttctgtttctgtaggattatccaacaccacaatattactacctttgtaaaccattccttctgattctagagtatcttctgcgtattcagcaattaataaatcaagctgaggatgacgcaacaaagtttgtatattgcgattgtattcttgactccaaaatttttggcaacgattgataaatattccctcacgacacacagcacctattttcatttgtggatgttgtaaaagaatctgatcaattattgcttgtaattcaaagctagtaattttattaaacgtaataattggtattctggcatcttgggcagatggaaaaaaggttgataaaatatgggcaggaatatcaacacttgcaccaatagcggggttaaggtgcataaaaatacctggtgcagcgttaatttctaagatggcaaaattaccattcttccaagagtgggaaatatttttagtaatcacatcaatgcctaaacaagtaaggcgaaaatgttgggcaatctcttctgctaagataatattatcaggatgaattttattggtagcattaatgctgataccaccggatgagatattagcaactttggcaagataaataatgcgatcgcgttcaattatactatccacatctaatctttgttcatataaatatctttccatagcatcatcaatgactatcttactcatggatgatgtgggtgtatctctccgttctggtttgcgattttcttttttaattaattctctaattgttgaatatccattacccacaaccgatggtggcctacgttctgtagcagcgacaaatttaccattgacacacaataaacgaaaatcccttcctgatatactttgctccacaataattctaattgattcatcttcgggaattgctaatactgcaaaattataagcagatttcaattttctagaatcattgatattaggagttacaccgattcctttatgacccactacaggtttaattgccactggataaccgatttttctagctatatctaacgcttctgtttctgaagttacaatatcaccctttggcacgggaaaacccaatctttctaaaaattctttacaatcatctttgcgggtagtaaattcagaatctagatgactatcaatatcaaaagttgttgctactcctcgcacttgttttttaccataaccatattgcattaatccttcttcccataaatagcaagtaggaataccttgttgatatgcagcttgccataaagcataaactgttggtccaccataaacagattctcggaacttattttgcaatttaattaaccgttcctcaaagtggaaatactcatctttagtaatactttccaaccaatcccaaaccaagtacactactgctcttgctgtgccttcatgtagtgcttgaatggcaattcttacataggaatgatatgctgtgatactccaaagattcaggtataaacctatatctaatttgctcacttcggaaacaatatgggcaaataaatcagcatataattgatatgtttgctccgctaagtgcggataaaaatcactgataacatcaatataatcctctatcggtagaggatcttgaaattcagtcaaggcaaaatcaaatactagcgcccctgtatctaaataagggttgggtccaatataatacttgaagttaaaaatatcaaatacatcagttcttctagcattgatgcggatgacatcggtactttgctcttgaaccattgattttcgatttattgacaatttttgaggttatttagccaagttcaacttactcctattatgaataagattcagctatctcagggcataatttccatttaattaaagtttctgaaatcacgcttaagagaatcaagataaaaataatactggggatagatttaataaagttgctttttcaataaaagaaaaacaggtaattcagaagatatcttagttatgaataacacacattctgctctcagaaatgaagttagagaattggctgaggaagcatttcaccgcaagttaatttcaggatatggagatgggcaaaatatgaatgaataccaaattgtttatcaaggaaaacctagacatatatcgttagaacaagctcggctttttttgatagatttaatttatagacaccaaattcattaaagaatttatagacaccaaattcattacagctattttcaggtaaataaaccacattttgatttaggtttcgcatcaacaatgtaggggcgttcgcgaagcgtgctggaagcatcagcattcggacaattaattatcggtttttacctaagactatcatccgaatgcttcgcccttactatggtctaaagacatgaaaactgctgtaaatagggcaggcaagatgcccaccccacaaaatatagctcccccattatgttgatctacctataattgccaaaattggaaattattgctatgattatctacaacaaccgcagcaacaaaattatctgctggtagtaattctttcaattgccaatttcctgaaacttttaattgagcaggttttgtaggtgttaattcaattccgatttgttctaattgaattaaaccatctcccgtggcttttaaataagcttctttacaagtccagtaacgaaaaaatacttgttgtttttgttcaggtgtaagtaatttaattactgcatattcttggggtaaaaagaaacgtcgagcaagattttctaaatcagacattgggcgaataaattctaaatctaccccaattaatctttgataacttacgccacacaaacccaaatcttgcgaatgtgacaaattaaaaaatattcctgaatcagcaaacttagctgctaaaattggtttgccccgttgttgataatcaaattctacttgagacggttctacacctaaataacttcctaaaatagtccgcagactaccacgcccaacaataaaacgctgtcgatgttcaggaaaataaaacctttctgcacgagcaacttcatcactagataaagtttctctgaaagattgtatctgtgattcagactgctgtaagtttattttccagatatgcacatcatcagataacaatactaattttttaggtgcaggtagccagtttgagagaaagttattcacaactaattcacaactaaaaagtttgggttctagataattaattcttcaaaaaatcaggtatgtttgatcaatactacctgataaatctaagcactacattgatgaaagaatagggtctaaaactccgcctttgaaagcgaaaatttttgggagatttatgataaataccccttataataaataacagactcctgtcttctgccttctacctcctgccttcattaattcctatccattctaaaatacgattccaagcccaccattgatcaggatcttgggattgaatttgacactttttactacttatataacctgcatgaccaccgtaggatgtaagtaacaaatctatagcaggatttttggcactggcaacttttaaatcatcaacaagatcgggatgaaataagggatcatcagcagcataaataattaaagttggtttttgcaacagaggtaacagatgtaaaccactgctggtctgataatattcttccacagaactaaaacccaagcggccaatgacaagttcttcatcaaatccccaaatgctatttgctctttctattgctgccgaatcaaaagaattatcatgagtataatgtaatttccaggctagttttttcaattctccagcaatgcgggattcaacatacttaccaaaagggtgagtgactaaataagtgagcgatcgcaacgaatctaaactaggacaaatcactgctcctccagcaatgtctatatcttgtaatttaaaatcttgtgctgctttgattccccacagcgccaattgtccccctagagaataccctgtaaaccagcattttggaggacaacccattgctaccgtttgctgggcaattctgacaaaatcttccccttcatacaacccatcagaagttaaagttggggataattctgccgttttaccatgcgcccgccaatcaaagagaaccacagcataaccttgagagtatgctttacgtcccaacaatcttaaaaaccattgttgttctaactctcctgtaataccataagtgccaataattgtgctgtgggcattttcgggtatggcaacccaaccgaaaattggtacatcctgccctcccgtaaatacgacctgctggtacagtggttctggatgtggagttgtactttcccaatcacgtcctgcccataaagcagtgtaagcagtcatggcagcaccatttcgcaagaaatagggcggactgtaggtagagttacacaccatatattaattttcgtgtaaattagtattgttttcacaatctctaattttaatatttatgttggattttaaatctttttttacaatcgaaaaagtaatctttgtatctctcaaaggttcttaatttatccttaaataaagtagtcataattttttaataatgcccaggattcttgtcatagatgatgacccagcgatttcagaacttgttgccgtcaacttggaaatggctggctacgatgttagtcaagctgaagatggcatcaaaggtcaggcgctggcgctccagttacaacccgacttgatcatgcttgatctgatgttgcccaaagtagacggttttaccatttgccagcgtttacgtcgggatgatcgcacatctgaaattccggttttaatgctgacagcattaaaccaaactcaatataaagttgagggtttcaatgctggcgcagatgactacttgaccaaaccttttgaagtagaagaaatgctggcacgagtgcgggctttgttacgacgtactgaccgcattccccaagccgcaaaacacagtgaaattcttaactatggttctcttaccctcgttccagaaagatttgaggccatttggtttggtgaaactgtaaaactgactcatttagaatttgagttgcttcattgcttgcttcagcgtcatggacaaacagtttctcccagtgaaattctccgagaagtttggggttatgaccctgatgatgacattgaaactattcgggtgcatattcgccacttgagaactaaactcgaaccagatcctcgccatccctgctacattaagacggtttatggtgcaggatactgtctagagttgcccagcgcaccaccatcaagtgagcaagtcctaagttgacaatttcatagacaaaactatacttatattgacaaaaatcaatatatttttaggaaaaaatcaactacttgatatataatacggtgatatcaagtattgaattgagactattgccgacgcgaaaaccaagcaatgatggtggtagtctttttcagaaacttaattggaacacaatcgcgtctggctaaggcgtgaaagtctactgagggataactgctcccatgctcccgttgaagtagaaagtaaagtctagttttgtctaggttttatatagcagacagatgtaatgagtgcttagttttggtaactggtgactagggactagggactagggactggggactggggactggtgactggtgactggtgactggggactggtgactgggaaataaattttattttttccaatcacctattacctagattttatatcggcgatcgctatcaggcaatcattcaaaggaagtagagaaataaatttactatcattcaagatgattaaagttaattcaatatttctctacccctgggtttttctaatcttctgaccttggtaatttagaattgactaaattggtaaattctgccaaagaagtaatcgtcattgttgatatcagtagttcttctaaagcagtgatatcatcaacgttctgaatatttttgctcagtatttcggggacatcaccaaacttgacttgcagaagtttaatgatatcttgtttgcgaccttttttttcgcctctttctaggaaaatttcttcagtgggtgttaaaaaaggcatttctctctccttttcatactcggttattttcgtgagcaatttttgttgtaattcctgacttaatgacatcattttgtcaataaatctaaacaggttttcaatgtcatatctgtttaaacctcgctcatataaacttctaattaatgtccatttccactgctccctatctgcgagtttgttggtagtagttttggtttttaaatgtgccattactaatatagcaaatagattgctgctttgctctagttcttcccatttgtagtctatgagtttgactgtatcaaacttacacacaacctcactcttacctaaaccgtattgataactattaggtcgccatgttttgctttcatctcctaatatggctaaactaactactggtttatggtataaatcaaaggaacggtagttatagatatacattctttgggaaaattcttcatcgtattgactttgtacttcgatgtgaattaatatccaaatttctgtgttatctagtaaccacacttgatataatttatcagcatagcgtttttctgtgttagatgtagctgtaatttgttctagttctttatctagggaaattggtgttttactccagtctatttgttggtaaatttggggataaaagaagttgataaattctggaaagtatttttctattgctcctttccatgcttgatcataattggctgttatttggttcatgtttaggttttttagttttttatttgctggttaattgtattttaatactgatgtattaataattatttttattattttttaattattttattttggtggaggtaaggtaaattatgggtagtatagcgatcgcttcagggagttaccgctaacgcatttccaaagtatcactaaatcgcccatcattgataaattaaaaatattgaattatttacatctgcaatttatttacaaaaagcgatatctttgtaggggtttaacaatgctaaacccctacccatgttctgatgaaataggttaacttatgaaaatttattaaaagttaatatatgtgttgggtttcgtttcctcaacccaacctaccagatattattaaatatctaactcaatttgacttgcttttatttctttttgtttttctgcactttttaaaacttcataagctaatgtcatagttagtctttgtttattttcaataatatcttgcacagtaacaatttgaattttatcacaactatgaggcatgagtttattttgataaaaaccagcagatttggcagtttttaacatatctttggtaggatcttctaaggtgataaatatggcaattctggcattttctaaggtcattgttcctaataaatcgcggatatctcctgattttaccttcccagatttaacttgtaaaatgattttttcttgttctcctttatcaccgtaaaaataaacgattccgtctactccttgatctgatccttttttggtgttaattattcctcggttatttgtataggttaaaattgcccatttttcaaattctttacgggtgcgatcgtcttttttatttgctaatgctattgcgctttcgatatctttgggtataccatgtaatttaatggtgtctaaaactcctttaccaaagctgtcttctaatctttttaaaactaaacttatactttgataagtgatgtctattcctatccattgtctgtctaatttttgagacactgcaacagttgtaccacatccacagtaagcatctaatactatatcattttcgttggaactggcttttattattctttctaataatgcttctggtttttgtgttggatatcctaaagattctgattgtttttgacctaatggtatcacatctatccacagattatctacttctgctcctgaataaccttccataaaattctttcttctaggctttccatttttagtaaaaaataactttccttgtttatctaattcttcaagtttttctcgattcatcatccaaccataattaggtaaataacctttatattcgtaacgtaaattttctcgcgccatcattgcaggtaattcaattggctctgacttatatcttcgaccttgttcatcaactttattatatattttttcaatatcatcttgatttgataatttagttttaggtgtttgaaaaaaatacttgcttgatttgctataaaaaaatataatgtcacaattatttgcataacgaagcatcttatattgtgatccttttttggtaaaatttcttttccatgttatttcatttaaaaaatctccaccttgagaacaaaaaacagcatctaaaactaactttaaataatgactagcagtaggatcgcaatgtaaataaaaactacctgtaggttttaaaactcgatgaatttctgttattcttaaagtcatactcactaaataagcaagtaaactacctgttcctaaaacattacttaaacctgtaattaaagcaatacattgttgagtaaataaaccatgataattactggtgatttcacttaatcctttaatagcgtgatcatcccattcccaagtatcaataaatgcttgtgcttgtgctttatcttctgaaccaatgttattataaatttgattataattccgcttagaattaaaaggaggatcaatataacataagtctactgattcatctttaatatactttcttaaaacttctaaattgtctccataataaagttgattaaccatagtcttcctcaaagcattgtaattgaatacaccttgattaatcatttttatagattgttacttttttgtcacctcagaaaatccctgatattccttgatgtataattaagaaatattacaaaaatacctgaaaatacctgattttttggaatcagtctaagttataatacttgaacagcttataaaatctggtagggtgcgttagactgcatcaatcctgtaaataagcggattcttgatatctgacacatcttacaactaattaatagaaggttgatgtaaatttaagcctttaataaaacgaaaatctttaacatttaatgtatataaatcaatctgattaactaatgctgttgcagcaattaaagcatcaggtatacttaatttatgactaagagagtaattttccattagtgtaataaactgagtagatatcatgacatcaataggaaaaatatggagtaattgtaaatgggttttaatttttttcaactccaaattattaatagcaccataatataattcagcttgagtaatagaactaatagctaattgattaattccctgaaaccgcagttcagagataacttgagaattgtttttataaaattctatgataatatttgtatcacataaaatcatttattttctgttctccatgcttcttgacgaatggattgagtgctaatatctctattttcccaaattccggctaaatcaaaaaattcttgttcactatcagctatattattgttatcttctactacttctacagatttgacaaaatctaaagcagaaataatttttagtagcatctcggctttttctttatcagcaacttgaatgattaattgttgcatatttttataattaattctatgattattatacattatttttctggcttacgtctagctataggaaaaccattatttttatatgggtttaacaatgctgatattacttgatgtttaatgaagaaatatcaaaaaaatacctgaaaatacctgattgtttggaagcaatataagttataatacttgaacggcttataaaatctggtaaggtgcgtcagactgcatcaatcctgtaaataagcagattcttgatatctgatgcaccctacaactaatcaatgaaatccatagatgaaattcgtcaacaactgcaagcaggaaattttgagtttacccgtcatggtttaaaacgtttagttgaaagaaatattagtcgttcagaaattatggaaacaggagagaatgcaattatcatagaagattatccagatgataaatattctcctagttgtttacttttgggattaacaattaataatcgtcccttacatttacaggtatcaaggcgagaatctgatatattgactattattactttatatgagcctgatccaaaagaatggattaattattgtcagaggaggtcataatgttgagttgtcatatttgtggttcagaaaattttactcaagagttagtaaatgaaacttttgaaattaacggtaaactaattttagttgagggtattcccgctaaagtttgttctcgttgtggagaaatcacttttagtagtgaaactgcggaaaatattcgctcactgctgaatagtaataaaaaatctcataaaaaaattgagattgatgtttttgctttttctaagtaactgataatatcaatttataacatctagtttttatgactattacagaaattttgcaatttgtagataatttaattttcacagaaacagatcaacatttagatgatctgcaaaaaagaattattgaagaattatttaagggtaaaacttataaacaaattgctgaactttataattatgatgaaggttatattggtgatgaaagtagaaagttatttaaaacattatcggataagttgggagaaaatattaataaatctaattttgcttggacactggaaagagttataaattcaaaaattgttaattctttaaataataacataaatctttgctctaataataaaaattcaataaattatcaatcaaataatattaaaaattcccaagaaacagaaatacaaaaatcttcttaccatgatttaactttatcaccgagaattattagattttatggaagagaaaaagaattagaatatttatctaattgtattctcaatcaaaacacccctttaatctccattttaggtttatcaggaattggtaaaactactctagttaaaagatttgtagatttcaacttagataaatttgaagtcataatttggaaaagtttaaaatatcccaaatctctaaattcactcattgatgatttattgcaagtctgtaaacaacaacctgaaaaaaatctagatgataaaatcaaacaactatttaatattctctctacacaaaaatgtttaatcatccttgatgatatccaaaatatctttacacctggtgaacttgcgggaaaatatcaaccagaatatcaagattatcaacccttattcaaacttgttacagaaacccaacatcaaagtaatattatcttaattagtcaagaacaatgtccagaaatggaatctttagatccagaattatatcccatcaaatctttagaactctcaggtttatatcattccaatattctccaaaacacaggattaaaaaatcaggatagttggttagatttaattaaattatatgcaggtaatttaatgtttttaaaaactattaccgtcttaatcgctaaaaattatgatggtgaagttgttgaatttttagcagaaaatacattacatattacccagcaaatgcagtctcattttcaagagacatttaaccgtttatcacctatagaaaaacaaatagtattatatttgagtagatttgaaaaccctatttctagagaagaattaagacaaacgttaatagaaaccttaaatttatcctcagttgattttaataacggtttacaatctttacaacaacggcatttagtaagtaaactgaaagaagataaagtgatgttttcattatcttctgtttttcgggaatatgtgagaaatttctcatttccataatcaaaatcaggattgacaagattagacaataaacagaattgattttcaccttcacatcctgtaaatccttaaatcctgaaaatcctgattctgacctatttagattttatatcagcgatcgctcctctagccatagatgcgatcgccttatctgtcgctttcggtaactgatagtatttacctcccgcagttttcgctaactctttggcaaaaccagtagaaacaaacttactttctgtatcaattaccagtaattgcatcccagatgctctaattctcgctgcaatatctagcaattccgctttgatatccggtttttcccctggttcttggggttcacctaaagaacgagataaaggaatattaccacgaccatccgtaattgccacaatcacaacctgaccgatatctccgcccatttgagcattaacaccaattctcacggcttgagttaacccatgtgctaaaggtgaaccaccaccacaaggtaatttttctaacctgttttttgctaacgcaatagaacgggtaggaggtaacaacacttccgcttgttcaccccggaaaggaatcaaagcaatttgatcacggttttgataggattcggttaaaagctgcattactgcacccttggcagattgcatccggtttaatgccattgaaccagaagcatcaaccacaaatacaactaaagcgcccgctttcctaactaaccgctttgtccgcatatcgccctgttccactattacctttttattcggctgtctggtgcggcgtgctttttgatacggggctgcggctcgcaatgtggcatctacggctatgcgttttactttacctttgggtaacattggcttgatgtaacgtccccggtcttctgagaagattaaactacgacttccagatttaccttgccgttgggacatctgagcaaaatataatacatcagaatccagaattaccccttctgggtcaaatacaaactcttcaggaatatctgggggttcttgttgttcctgttcttcctgttgttcttctttgtcttcctgttcttcctcttcctcttgttcttccgagtcgtcttgactttgtggtggtgggggtggtggaggtggttgatctgggggtggagtttgaataacggtggtacggggaacgatcaccaactctaccgcacgtcgcaagtcttcagcattaacggtattacgtccttctaaagctgctgctgctttggcaactctgacagcaaatagttctgctcgatgtccttctactccagcgcggatacattcattaacaaggtatgtgatctgttctaaagaaatgctgacttcttttaaccattcccgtgcgagaagtatttgggttttcagggagtctatgtcttcactgtactgttgtagaaattcttggggagaacgggagtaagcaatggcctgttctactgcttgcactctttgatctaaacccagaacaccatcagcagaaagggcgatcgcaattctatcaagtaaatgctcccttaaagcgccttcctctgggttgtaagttgcaataaacaacggtttacagggatgttgaaaactgataccttcccgttctatctggttgcgtccctcagataataccgctaacagttgattactaatttggtcatctaataaattgatttcatccacatataacacacctctgttacaggtggccagtaaccctggttgaaaaactgtatcaccctgttttaccgactgttccacatccacagaacctaaaagtcgatcttcggtgacacccaagggtatttgcacaaaaggaacgggttttacttctgtttctatttcctgtctttgttccgctaacagtttatcatcccattcttccgggtggtttggatcacagttgctaatggaatctttcacaacttctataggtggtaacaaggcgtgaatggcacgcgccatcacagatttagccgtacctcgacgaccagcaattaccacaccccccaaaccgggatctactgctgttaacagtaatgctattttaatcgcttcttgaccgactacagcagtcaatggaaaagctgttgttgttggggttatcgtaggcgctggcattttgtttttattggttattatattttttaggatagcatttttatgtctcacgcaaagacgcaaagacgcaaagagaagaaggtaagggtttttttattataatgttttgtgtatttcagttattttgtttatttccaggtaaagtgttatgagaacaaaagttgttattatagattcttctcatactcttagaggtatgctcaaagattatatttttagtagagtaccactgtcaaagaaaacaattatttacctttggtaaaatggagattatagatatggtacaacaactgacaccagaaacaaaaccagaaatcatctacccagatagtgacggaaaacccatgtttgacaatactaaacaatatcaatggatcgttaaaattaaagaaaatttagaaattatttttgctgaaaatcctgatgtatttattgcaggtgatttgttatggtatcctgcggagggaagtgtcaaaaccagacaagcacccgatgttatggtagtatttggtagacctaaaggggatcggggttcttataaacaatgctcagaaaataatattgctccccaggtggtttttgaaattctttctcccggaaatcggactaaagaaatggcggaaaaaatgctattttatcaaagatatggtgtagaagaatattatgtttatgatcctgatactattgagttagtaggatatttgaaaaatcaagaatggttagaagaaattgaagaaattaataattgggtaagtcctcgtttgggtatccgttttgagttaatatcagataatttagaaatttattatcctgatggtaggaagtttctcacctctgttgaactacatcaacaattagaacaggaaaaacaacgtgcagaacaggaatatgaacgtgcggaaaaggaacaacaaaaatatcaagacttattagctaaattgcaagctaaagggattgatatcaatacaatttaataacttgaaaaattcagatcccctacttatcaaataattcggggatctggtgctggacattcaaagctgaataagctgttgtgcagctaaatcgaataaacagcattacctttatttttaactttgcgctcccatttaataataagacctccttcgtttagcaatttatttaataattcttctaactgttctactgattcaaataatctgtgggctatatattctttcgctgaatgccataccagttcaattaaattataatctggactataaggtggtaaaaattccagaataatatttggcatttctgcttcaatacgagccaaaatatcttttcttttatggtaactagcattatcaagaataatcactattttagctgaattatcattaaagtcttcaggcttatttcctgcttctatccattcctgttttaaaaaatagttgagagatttcaactgttcataaaacacatctgcatttccctgtttaatcacaaaatttattcttttcttgtcatgataacgcaatcctcccataatattcactcttccccttcttctttgtcctgttacctcttttctcttgcctttctttccccatgtttttcttcttatcactcttaaactaaatccactctcgtcccaaaaccatacctgtaaacgctctggtgatgattttgttatttttaaatattcagctaatttttctttaaataacttacgcttctctggactttgtttatcctctaggctatactttgcccaaaggtaaacgtacttttttctctctaaaattctccttacttgcgaactacttaactttattcctgtctctatttctagatatgtcgctaatcttgctgatgtccatctgccaaattcatatccacattcatcagggttcttctcaattacttctaacaacaaattctcatattctttggttactttacggaagttaccttctcttcttccatctaaaaaactgtctatgttatccggtgctccatgcactgcccaatatgctacagttgtatatgctatgtttaaaaaatcacttatttcctggtaagttttcccatcattcatcaacaataatattagtattttctctcttacataaggattatcttgctcttttaggtgttttaatagcttttctctctgttcttgagacagatggttttttgctggcataattcagaagcgatcgcttagttacttaattccctattatacaatctagctgcacaacagcttaatcaacctagttgatgctgaaaatttccgctttatagatgacttacctgcattagttgagagaacaaatcaacctcaagtaaatgtcatccatgctcaaattagctacaatgaagctgtagaatctttagttaaagctgtaaataaagcactcagccaaaataaacccaccaattacagctatcttaatgaattaatgcgtcaaatttggcctaattatcaaggagttgctaccatatctacacctgatgggaagaaatttaaaagttttggacaatttattgatatggttgtcaaagaaggtaaagtcaaaagacaaaatcagcacttatttttgatggaattaaaccaaatagcagcctgaatttgtcttgattgataataccagtttatagaaataactggttcatgataaccgcaccttgcggttttctcatttttcacattcgctacaacagcaaaaataaaagataaaatgcacaaacttctcacatttcataacgaaaaactcttgcgtcaagcattaacccatcgttcttatgtgaacgaaaacccaggagaaggagaacacaacgaacgcttagaatttctcggagatgcaattttaaactttctcagtggagaatatttgtaccgtcgtcaccccgaaaaaggagaagatgaattaacccgtcttcgttctgcattagtcgaagaaaaacaactagcaaaatttgctttagaagttggtttagattttagaatgcgattaggaaaaggtacaattagagatggaggtcttcaaaatcctaaccttttaagtagcacctttgaagctgtaattggtgcatattatttagataatgattgtaatgttgaaccactcaaagtcattcttgaaccattatttgattctgtatcagaagatgtggtagaaccgagatcaaatgtagattcaaaaaatagattgcaagagttaacccaagctcaaggtatccaagaacctcctaaatatgtcacagaaaaagctggaggtccagatcatgcaccggaatttatttctaaagtatttgtagatggtaaagagttgggagaaggaagaggtaagagtaaaaaagaagcagaaaaagctgcggctgaggatgcgttagctaaattgaaaaaacgagatttattgtaagaatttaggaatgataatgttttcttgctaatctgacaatctatatttaatgtactgtgcaaaatcaatttaatcgcttgatctcagtagttaagtaactaatttttagtttagatactgatgttattactgtatatcaatgctaaatttttgctgttactattaattatgagtaagtcagcctaatccaacgcaccagagtcaacagcgttggaacggaggaaccaagttttggggcgtatttttgtggcgattggttaataaattcctaagttaatgttaggaaatcagccaaaattgcccaaaaaggggtatctctcaaccctagtccgtcagctaacttcgtaggcattgagaggggactgaagagacagcatttgataatgttttgatctcatcagtgtccaaggctggtactgctcagattcagtgtatctgtactgaactctgttgaggttacaatatgattttacaactgaatttagctgcaatttttgctgtggctggacaattggcgtggaaaaaagcaaaacctgtcatttttcgtgatgagttcttattgcccgttgtgggtttttcaggaataattttactctggtgggtaatagcatttgctaatcatgaattaatgcctacaccacctgaagctttaattgccaatcttgactacattttaaatcccttttatgaacgaggacccggtaatttaggaattggttggttactattagcaagtttacgccgggtaatattaggttttggtttaggtgcattagtagcaattccctgtgggtttttaatagggatgtctagaccagcaatgctggcttttaatcccatcattcagatatttaaacctgtttcacccctagcttggttgcctatctccttagctattttcaatttggcagatccttcagctatttttgtgattttcattacttccctttggccgactatgattaatactgccttgggagtttctagcgtacccaaagattatatagatgtggcacaggtgttagaaatgccacgttggcggcagattattaaaattatttggcctgccagtttgccttatattttcacaggtttaaggattagtttaggtattgcttggctggtaattgtggctgtagaaatgttaacaggtggtattggaattgggttttttgtttgggacgaatggagtcgtttaaatctcagttctgtatttttggcggtgtttgtaattggtttaactggtttagttttagattacgcggtgggtaaacttcaagaatttgttacccatcgtccaggaagtgtgaagtaaacagggaaaacgtcaacaatttagttacagctatgacaggcaagatgcctgttccacattgagagataaaactgataccaatttgcaaaatgatgtcaaaagatggaagctgacaaagcttatccattgaatttttcatcatctaaaatctaaaattcaaaattgtagacaattatgagtgaaaataattggactcgcagagattttatcaagggaataggtttaacgactgcgggaatagcgttgtcatcctgtgctgtttctggagataggtctgctaaaggactgacagcagaagctttagctgtagaaccagtagttaaacctcaagaattagaaaaacctgatcttattattggttatgttcctgttaatgattgtgcgccatttgcgatcgcctggaaaaaaggtttcttccgcaaatatggcttaaatgtcaaactcaaccgcgaagctagttgggcaaactcccgcgacgggttaatatttggtcgtctcgacgcttcccccgtcgtctctggtgcagtcactaacgctcgaataggtgcagaaggtgcgcgtcatgcccccctatgtgcagctatgaccatacaccgacatggtaacgccatgaccatgaataaagatatgtgggactttggtatacgtccttggtatgaatatcagcaacaatacggtgatggggcattagaagcatttgggcgagattttcgaggttattttcaccaacaacccccagaaaagaaggtttgggcagtagttctgagttctgctatttatgaatactttgctcgctatcttgctgctgctgctggtgttgacccatttaaagaatttcgcatcattattactcccccaccgcaaatggtgacaaatatgagaattggggcaatgcaagcatatatggtcgccgaaccttggaacactagagcaattacaggtaacgaaggtattggttttacattcgctcaaggtaaagaaatttggtacggacacccagacagactattaggagtaatggaatcttttatagtcaattatcccaaaacttaccgctctttggtaaaggcaatgatagaagcttgtcagtattgcagtaaacccgaaaaccaccaagaagtagccgaattattaacagatcgttcttttactggtgcaaaaccaaaaaagcaagatgcgcccattagtaaattgactgctccaggaattattggtaattacaactatggtggttttgatggtaaagaccgcacaatcaaagctgaagataccacaattttttatgatctgcctgataacgttcctcaagaaccaggagaacattccacctttttatggcgttctcggagtatttggttaatgactcaagcagcacgctggggacaaattaaagaaatccctaaaaacgctgaacaagtagccgaaaaaggttggagaacagatttatatcgagagatagccacagaaatggggattccatgtcccaaggatgattataaagttgaacccccagaagtattcatagataaaaaaggctttgatcccggtgatcccgtcggctatctcaatagttttgctatcaaagcaaatgctcccattcgtttcttcatgtcttaattttcacgacaaactattaactaattcaggagaatttaatcatgagatatacttccttagaaaatgataattttcaacaagttcagccccgtcacggatttttagaaattgaaaatttagtgaagtcttatcccacagcagataaaggagagtttgttgttttagatggcgttaatttgacaattggtgaagatgaatttatttctgtaattggtcattctggttgtggtaaatcaacattactaaaaagtattggcggttttgaaagagctacatcaggttcagttcgcttagatggtaaagaaatccgcaaaccaggtgcagatagaatgatggtttttcaaaattattccttgttaccgtggttaactgtgcgggaaaatatccgtttagctgtggatgaagtgctaaaaagtgcaaatcgtgccgaaaaaattagcattgtgaatgaacacttggcaatggtaaacttaacggcagccgcagataaatatcccgatgaaatttctggaggtatgaaacaaagggtgggtattgctagagctttagcaattcgtccgaaaatgttattaatggatgaaccatttggggctttagatgctttaactcgtggtaaattgcagcgtcaggtattagatatctgggaaaatcatcgtcaagcagtcatgatgattacccatgatgtagatgaggcaatttatatgtccgatcgcattgttctaatgaccaatggaccatgcgccactatcggagaaattctcaaagttccgtttaaacgtccacgcgatcgcagtgcgatccgcaattctaaagaatactttgaattacgcaaccacgccttgaattttttagaccgttactttacttcagaggagtaaaataaattattatttcctgggtatacaaattcagaaatataagctacaattcaatcagtattcaggattgaggcatcagtatttcagaatatttgataaatcggtagatgatcaaatacagattttgggcgtaaccattaaaaagctgactgctgattactgatcgctgaatgcttacctgtgggtagcctaattcaaattcatgaaagctggatttgaagcggaggaaccaaataattggggcgaatcttaattgaaagacaccttccagtcttagcccgtcagctaactccgtcggcaatggaaggaactcccaaaaccttggctgtaataccagttgttcttgggttttccttaatcaatctgcgattttagtcaatgattttggatgaactaggaatgtaagaattaacgagtcagaaatcagaatgcttgcttaatcatttggtgataaaatggtcgtttttcatggtgcgtttaaaaaagctgattactgatagcggaatacttacttatgaatccaaaatctaaaatctaaaatctaaaattggcatccctgcttctcattcatcattcgtttcaagggagagaagttaaagctgtgacaatcaagccattgttagcacgtttacaaggtgctattggtcgccatgacctgattgagcaaatggtattactacctgctccaaaaaaatgcctgagtgagaaaaattcactggtaaaatccatcaagttaattgttggttatgatggttctcctaatagtcatacagccttagatattgctttttgtattgcacatcaaacccatttagcaagcaatattcaagtcaatgttcaggctgtttatgtgttagaagaacaggcaagtatttctgattatcataaattcaattatccaccaaattgggctggtttgacacatcaatattttgagttaagccaatcaacaacaatggtgttaacgccatcaaaacctcagttacttaccacttcagcaccggaaaaagcagataaaattctttggcaagccaaaaatttagcccaagaatggcagagtgattttaaatctcatctacgatttggtaacttatctactgaactgaaaaaagttgtagaattagaaactgctgatgctctagttttaggttgtcaatctatcaatcatcctgtgattgaaagtttagatcctcattttccctgtgctgttttgggtattcctcggtgtcttgattaatcacctaataattacttaatacatttttaatgcccatgcaccaataatcaactattaagtcgcctatagttacatataggtggctttttcgctctttttcacacaataaaaaacaatcacattatcagggaagatgatatggaaaactggcaagctgttttcagcgttatcacatttatcaccgtcattgtggtaatcatgacggaatggattgatctaatggtagctgcttttttgggagcattaatattagtctttgctaatatcatgactttaccagaagccgttagctatattggtaaaagtcatggaactttgggtttattttttggtgtgatggtattagtaagagcatttgaaccgactaatatctttagttatatagctacacaaatagtcattcttgctcaaggaagtggcaaaaaattactattaggtattgtggcattagttacgccaatttgtgctgttttacctaatgctactacagtcatgttattagctccattaattccgccaatggcacaagaaataggagttaattttgtccctttattaattttgatggtgtttgttgctaatagtgccggattattaacattagtaggagatccagccacatttattgtaggtgatgctgtaaatattagcttcatagattatttagggaaattaagtttaggaggagtaattgctgttttgactgttgtagtaacactaccaattttatttagaaaaatttggcataaaaacttagatgatttagcagaattaccccatccccaaatcaatcatccacgagttttaatagtagggggagtgatagtagcttttgtgttaacattttttgtaattggtgaatctttaccaataccgatttcccctgcggcagtggctttgttaggtgctgctttagctttattactggcacacaaaagcagaattgattcagttcataatattttgcgagatgtagattggagtaccttaatttttttcatgagcatttttgtcctgatcggaggactggataaaacaggtgtgattaagagtttatcaggtgttttagggctgattttaggtaaaaatattttgctaggttctgtacttttgttatttgtagtaggaatcttatcaagtgttgtaccgaatattcctttagttgtggcaatggttcctttgttgaaacaatatcttgtgaatgtgggattagcaccagcagaagttttatcaccagattttcaaggacagtttcccccagaagttttaccactgttttatgccatgatgtttggcgcaactttggggggaaatggcaccttggtgggagcatcttctaatattgtggctgctggtattgctgaacaacatggaaaacgcatttcttttaagacttttctacattatggtattcctgttaccttattgcagctgataacttcagctttgtatgtgctggtgcgttttttactttaattttttactttcaacataaaatgctcaaaagatagatccctaacttctttgagaagtcagggatttaggtgttacaagataggggagatggggaggaaaattttagattttagattggagatgacaaaaacaatccaaaatccaaaataaataactcctgactcctgactcctggatctcctttctgacgttaatatctcaagatgtgtaaaatgtcacgaagaacgctataaccagctaaatcccaaagtagataagctaaaaatccaatcattgccaagcgtccattccacaattctgcttgaggattccaaccaaaaataaaggcattacgatctacaccattataagctttagcaacgggtggtatatcagtagatgagcgagtttccattttttacctccaaatttcaacaagtttcacaagtttcacaagtttcacaagtttcacaagtttcacaagtttcacaagtttcaagtttaatgttttgaatcttttgttcactttttttatgcttaactttaatgtagcttttacacacacagttgttttatgcctataggtacaaactataggcatttcttagggacgataatttaaaagctatttacccagataaatctaccctgagatggtgaaaaaaaattttaatttaaatcaatgtaaaccagctatcaaaaattgaattactacaatccaagcaaaaaaatgttcacctaaagaatagcagtattgatattaataaatcagctagaatttatataaatttacaataataaaatcatcaacttctatctaacgttatataaggctttcccacttgagatggatgctaagatcccctaatttcttggattctgaaggttggacaagttgaatatttacatccagcagtggtcattagtgaggcagtcaaacccttatgttgcatagctttgtaattatagcaggagtcaggagtcgtaggggcgaagcattcggaaaatatcctttgggaaataccgatcattaatcgctcgaatgcttcgcccctacttcgcccgtacaggagtcaggagtaaaacactaacttggcagtgcaaatttaaattaaacttaaaattaaacttagaggtaggaaatagaaatgatgcaggaactatacaaacacttattgtggatagcacaagtacctgtaactactcccaacgtcacaccagcacaggcttcgattctcacatctggtccgcgcttttttgtggctttaatttctggagtaattctcgcctttgcctttcaattagtgttaactaatctctcaattgctgcgggtatttcctatttaggacatccttcagaatctcaggaaattgaaagttttggtggcacaattcgcaaaattggcacgaggttgggaatttggacattagttacagtcacaattgctttattcatcgcttgtttcttagctgtaaaattgagtttattaattttagatccgggattaggagcaattttaggtttagtcatttggggagcgtattttctattactaatgtgggtaagttcaactacagttggttctttaataggttcagttgtgaatacggctactgccagttttcaggcgattatgggtacagctacagctgcattaggcgctaggtctgtaaatcagcaagtggtagctactgcggaagcggctgcctcggcggtgcgtcgggaattaggaagcgccattccccccgcaagtattcgccaaaacgtagaatattacatagaaaaactacgtcccccagaacttgatatatcgcagattcgggatgagtttaaaagcttacttaatgaaccacaatttaaagcgatcgccaccagtccagacttgggaaaaatcgaccgtcaacagtttgttgatttagttaacagtcgcaccgatttatcccaacgagaagttaaccgcattgctgacgctttacaaaatgtttgggaacaagtagtgagtcaacaaaaacctacgaaagaaagtttaggtgagttggtaaactatctgaaatcccttcctccgggacaaaccaaaaccgatgaacttaacgccaaacttgaccaattaattgctgaaattcactctaccaaagaaacagaacaaaaaccaggaatgatgcaacaagcaatatcagcactgactggggtagtgttaggtagggcagatttgtctgatttggatgtagaaaaaatttggcgttccttaaatactgctagagaaaaagtcatagaacaagttacagaacaaccttataatcccattcgtgcagatattgacaactacttacttaactcttatccttggcaactcagtcaagaaagaattgcccaagaatttcgagatgtgatttatgatcctgcggctgatcctggggtaatacgtagggaattagagcaaattaaccgtcaagattttatcaagattttgcaagctaagggattattagctcaagcacaaatttaccaaattgctgatcaattggtaatggtgcgggatgaggttttggtaatagtaacagcgcaggaagaaagagaaattgtccaagatttgcaaagacgagtggaaagttatttactggtgactccgaaagcagatttaacatcagcaggaattgagaataattttaaaccgctgttggcagatccagaagcagattatcaaactttatcccgacgactagcacaagttgaacgggaagaaatggctgagattctgttagcacgcaatgatattcaagaacgagatttagatccgattttagatgaattggaaatgcagcgcgatcgcgtgttggtagaatctttaggactggcacaacaggcacaacatcaagcggaaactctctggttaaatgtggaatcatatctgcgaaatacaggcaaagaacaattaaaccctgatgctattcgcgctgatttaaaacgacttttagaagacccccaagcgggaattttagccattcggacgcggttatctcgctttgatagagatactttggtgcaattattaagtcaacgtcaagatttaacagaagcacaagttcatcaaatgattgatgtagtagaagaatcatggcataacatccgccacataccgcaatttgtgggggaaaaagcacgggaacaatatgattctgtcaccgcgactattgcagattatctgcgaaataccggtaaggaagaattgaatcctgaaggtattcaacgagatttcacaaggttgtttgaaaaccctagagagggtgttatggtattgcgtcgccggttatcacggattgatagagatactttggtgaaattgttaagtcaacgtcaagacttgagtgaggaacaagttaatcaaatcattgataatgtacaaacatccattagaaatatagtccgtgcgccccgtcggttagcaacaagaacacaacaaataatccaaaattttcaaacttatttacaggagtatttacgacatactggtaaagcagaattgcacccggaaggaattaagagagatttgcatttattgttgcatgatcccagagtggggatggaaagtttcagcgatcgcctttcccatttcgatagagaaacaattatcgctttgttgaaaattcgggaagatattacagatgaagaagcagcgagaattgctgataatatgatctcagtgcgtgaccaatttgtagaacaggtgcggggtattcaaagaaggattcaagatgcaattgaaggcatttttgccaggattcgtaattatcttaattctctagaacgaccggaattgaattatgaaggaatacagcatgatatccgtcaattgtttgaagatcctcaagctgggtttgaagcattgcgcgatcgcttgtctcatttcaatcgtgaaactttagtagctattttcagttcccgtgaagatatttctgaggcagatgttaaccgtattattgacagaatagaacacgctcggaatatggttttacaacgagcagaacagctacaacatgaagcacaacatcggctagaacagttaaaacatcaagcacaacgtcaagcagaagaaacccgcaaagctgctgctaatgctgcttggtggttgtttgcgacggcagttgtttctggtatttctgcggctttaggcggatcaattgctgttgtgctggtttaggtttttcaataatggacaattacctgtacctgaaaatccgaggattaaaaaagctaaattttctgctttttttacttgaaaggggaggtttgaaaccgttcggcagttcgacagactcactgaccactgacgctcacggcggaagccttgaataaaacaattatcaattatcaactatcaattatcaattgataagttgtctttagcctcccaacagcggggtttttttgattaataattcaataatgaaggcgatcgctaattaacatttacaggattttcctcatcttctgcccaatttattggattgttgacaatgtactgacgaatattttttaattcttcctcattacgaataatatgttcatgaaaattacgttgccaaatcacatttccttgagctttattgatgcgattcacccgccttgtagaaacagatttataattttgaattattgctgccaaagattgtggttttgtgccattaattttcacctgtttaattccagggactgtaggggcgaagcattggctcgataaattttgttgttgttgataattgaaatttgccaatgcttcgcccttcccatcagaaaacgattgtgaaaaatcttgctttgccaatgcttcgcccttcccatcagaaaacgattgtgaaaaatcttgctttgcttcactgttaactatgataataattccatgtacatgattgggcatgatcagaaattcatctaactctacactttgaaaatgccgaggaatagataaccaacaaccccttgctacctcaccatttgtatttaatttcatttcaccatcgacaatttcaccaaataaacaattacggtgatgggtgcaaatagtgacaaaatatgctcctatttgagaatagtcatatccttttaatcggatggaacgacggtggtgaatttcgggattataaggcataaattaaattcctgttaatagcgtcatggttatggggaagggtgaagcattcgctaatataggttgtctgtttgttgtctatttttaccatgcgaatgcttcacccctacaggattatataatgtggtgcgatcgctcaatcaatacaattttcattgtcccatttgtaggggcaaagcattggctcaaacatctttattgatttcgataatgtaaaattgccaatgctttgccctcttctgttaaactgtctgtttgttgtctatttttaccatgggaatgcttcacccatacaggattatataatgtggtgcgatcgctcaattaatacaattttcatcgtcccatttgtaggggcaaagcattggctcaaacatctttattgatttcgataatgtaaaattgccaatgctttgccctcttctgtgaaactgtctgtttgttgtctatttttaccatgggaatgcttcacccctacaggattatataatgtggtgcgatcgctcaatcaatacaattttcattgtcctatttgtaggggcaaagcattggctcaaacatctttattgatttcgataatgtaaaattgccaatgctttgccctcttctgttaaactgtctgtttgttgtctatttttaccacgggaatgattcacccatacaggattatataatgtggtgcgatcgctcaatcaatacaattttcattgtcctatttgtaggggcaaagcattggctcaaacatctttattgatttcgataatgtaaaattgccaatgctttgccctcttctgttaaactgtctgtttattgtctatttttaccatgggaatgattcacccatacaggattatataatgtggtgcgatcgctcaatcaatacaattttcattgtcctatttgtaggggcaaagcattggctcaaacatctttatttatttcgataatgtaaaattgccaatgctttgccctcttctgtgaaactgtctgtttgttgtctatttttaccatgggaatgattcacccatacaggattatataatgtggtgcgatcgctcaatcaatacaattttcattgtcctatttgtaggggcaaagcattggctcaaacatctttatttatttcgataatgtaaaattgccaatgctttgccctcttctgtgaaactgtctgtttgttgtctatttttaccatgggaatgattcacccatacaggattatataatgtggtgcgatcgctcaatcaatacaattttcattgtcctatttgtaggggcaaagcattggctcaaacatctttatttatttcgataatgtaaaattgccaatgctttgccctcttctgtgaaactgtctgtttgttgtctatttttaccatgggaatgattcacccatacaggattatataatgtggtgcgatcgctcaattaatacaattttcattgtcctatttgtaggggcaaagcattggctcaaacatctttatttatttcgataatgtaaaattgccaatgctttgccctcttctgttaaactgtctgtttgttgtctatttttaccatgcgaatgcttcacccctacaggattatataatgtggtgcgatcgctcaattaatacaattttcatcgtcccatttgtaggggcaaagcattggctcaaacatctttattgatttcaataatgtaaaattgccaatgctttgccctcttctgttaaaccccatagtggaacagggtgaagcattcgctaatataggttatctgtttgttgtctatttttatcatgcgaatgcttcacccctacaggattatataatgtggtgcgatcgctcaattaatacaattttcatgtttaatcaatgtaattatcataagcttttttcaaagcatccttgacttgctttgccacccaatcaggacttaaaaccctagcattagcaccgtactggagtattctttgacgaaaccaaaatatacagtcttcttgagttaaaatatcaacatattctgtagtttccagtgaggaaataactgtttcatggggtctgcggggtctataactcgctaaatctcctgtcagacggtatttaatatctaaagtaggaaatttactataagtccagggagtctgggaaactccaccaactctggtgatgcggtccactctcaaagtaatgttttgttcagcattgggtcgggtttctaagtgataactccgaaagtctggaactaaagcaaacaaatagagtacaccgttatgtaatctcagttctgacttatctaaatcccagaatgtttctttaccttgtttgctgcgataccaaactacaaagcggcgtttttgctgaaaccgttgctgtaaatgacgtacaatttcattgattttatcttcactgtagtctgtgggtggatgaaagtctgttatcagattaggggacttgagttttttattaaagttaccaatctggtaaatgtgtcctgcttctgcggaaaaccccagactcgtcaataactcagaggccattgatagtgcttgtctttgttcttcagataaaatcaccggaaacactgatgtcactaactcataagggcggttgggtgcagctttaatttcaaaaccacagtctcggagtttaccaatggcacgagtaattttctgtgataaatcaccagcttcaaaaccgcgatcgctcaattttaccattaatatatctttttttaatggttgttccgctagtagttttaatatttctaatgcaaatattaattgattagatttatcatttatagatgacattttaactggtataatatatctatgtttgggaatctgcaagcgatcgcctaaccgtaggatgaattaggatgaattaggattaattaggattaattctgtattttcaaggtttcttctgctagtagcttcaatgttaatctgaaactaatacaaaaagaattaggagggaatgatggcacaaactaatgtaaaaaataatatttatccaacagttatggtcaatattcctactacaataacattgaaaatttcccatgagcagtttttagatttggtgcttgctaacagagatttacaattagaaagaaatgctacgggagaattaattattatgcctcctactggaagttatactggaaaaagaaactttgatattgctggacaattatggttttggaatcgtcaaactaaatcaggagaagcgtttgattcttccactggttttcatcttcctaatggtagcgatcgctctcctgatgcagcttgggtaaaacaagaaaaatgggatactctcagtttagaacaaaaagaaacttttgcacctatttgtcctgattttgttctagaactacgttctaaaactgattctttagaaaaattgcaatctaaaatgagggaatatatagaaaatggtgctagtttaggttggttaattgatcaaaaaaatcaacgagtagaaatttatcgtccaggtaaagatgtggaaattttagaacatcctacgagtttgtctggggaagatattttacctgggtttattttggatttaactgaggtttggaaatgagaatatgaatacaaatataaaactatgtatctcttagggattcagcaaggttaaacccttaaaatatgggtataatcctaaatctttttatggtgttatttgctgataattgcttatagaactctatttacgctaattcgagtataataatattgctcaaatctacccaaaaattttgagatatagtcattttttgataacatctctgtttccagaagtaataaattagtcacatccaacaaatactgaactacagtgaaaatttctttactgccattatactccaaattgaataggggtgtgggggcttgtgctttggggtgtctacaaacttgcaaagtcaaacaacaagcacccaactttggagaaggtaacaattgtcctttatcttcccaccaagcagaaacttatcacgccattattaacagcgatgcagaaattatatttaatacctctgctacaggtgatggtaaatccttagctgcttatttagcaagtttattaaatagtgattttcaggtaatatcactttatcccaccattgaattagttgcagatcaaaaaagacagattatcaattattatcaaaaattcaatcttgcagaaattgatgagatagaaagtctttatggtgcaaagttagcagaattagtagaacagggagaaaaaactaataaatttaaagaattattgagaataatcaaacataaatctgtgattttgactaaccctgatattttccatttagctacccattctcgttatcaaaatcctgcttatagtcgcgcagaattagcgattactttaggtagaaatcctgatttatatatagcagatgaatttcatatttttggttcacatcaagaagctgccattctcaatagtttattactaattcgccataatcgtcctaaaaaacgaccgctgcgagttttatttacttccgcaactcccaaggacaattttgttaaactccttaaaactgctgattttaaggtaacatcaattaagggagaatatgaaagtaaacctactgctggatatcggcaaatttgtcaacctattgatttagaatttgtacaattagacagagaaagcgacgctttcaactggttaattcaagaacatgaacaaattagaaatattctccaccaagaaggtaaaggtagagggggaattattcttaattctgtggctttagtgagtagaactgtgagagaattaaacaaactaatgtctcctgatgtgaaagtcctagaaattagtggtagaattgataaacaagagagagaaaaaatacataatgatttagaaaactctgagcaacctgtgttaattgtgggaacttctgcggttgatgtgggtgttgattttaggatacatttattaatttttgaagcgagtgattctgctacatttattcagcgtttggggcgtttgggtcgtcattctggatttaatcattatcagagttttgtacttttatctggtcgtactccttggataaaatcaagattagaagagaaactaactaactcagaatatgatcgtgatcagtttcaagaaattattacagaagtgtttaacgcacctacagtttttacagaatatcctaaatattggggtgctttacaagcgcaaggaatgttatttagtatgggtagtaaaaaagcaggagttattgaacaattaaaagataaaatatcggaagatttacgcttagtttacggtgaacaactagataaaaaacgtggacattggtttgctttaggtaaggatgaaaaaggagtaggaaaagcagtacaacaggagttattaaggtttagaggtggttctgatttacaagctgcggtgtgggatgaaggacgtttttacacttatgatttattgaggttattagcttatgcagaagtagaaataattgagagggaggagtttttaaaagctgcggtaaatgctgatcattcccatacagaatttccagagaaatatattcaagtttatctgaaagttcaaaagtggtcagatcaaagatataatattgagttagaatgcgatcgctctagtgatgaaattcaacaatgtatccttacttttgtggataaattaagtattgttggacatccacaaacagaagttaatcgttgtttaaaaagacagaaattattaggttttttagttccggttaaccgtactcctaataatagtcattggcaaattagtcagactttgtatttaagtcctacctttggactttatagacttaaagatagtgatggacaattttatggttgtgcttttcatcaagatgctttgttattagaagctgtaaaatggaaaattagacgatgtgaaagaagtaaatcttacattttttaacaaccacaaataaaaaccacaaataaaaaacacaaataaaaaccacaaataaagtgattttacaactatgcctacattattacaagccttactgattgaaactttaccagcagacacagatccgattttaactttatttgttaacactattttgccggcaatggaaagggaatttgcccttattcctgctatgggaggttcagaaatagtacattatcataatttggtgaaattgggtgatcaacacgcccaggaaaacgctcaacgttgggcaaataaacctgatcaaagtttattagttcatgttttaaatgggttattaattgcgtggaatttgagtctgcatttatcaccacgtcagcaattaaaagatgaggaaaagagattattatgtttaggaattgccttacatgactataataaatatgtgaaagcacaaggggaagaacaagcaccaccaaaagcccatgaaattgaggaaattattaatttatgtagggaattggggacaaaattaaactttacagaattttggacagagtggccagattatttgttagaaatagcatttttagcacaaaatacccagtttaatgtagatagtagttctattatttctctgtgggaaaatgagcagcgacaattcactattaaggataaaagattaactgatattttacggcatttattagcctttggagatattgcagtacatatatctgatcctgcggaaattatcacaactacaaaaggtgatagattacgagatcacttatattggttaaatatttccaagaaattagtttaccatcgtttacgagattgtcggggattaattaccaatcaaattcataatgcagtagttaattttgcccatgaattaggatgggaagaaatgctctgttttgctcagggtgtagtttatttagctcctaatgatgtcacaaaaccacaatttacagatgtacaaactgctgtttgggataatttaattaatggtaatgaagaaagaaatcaaaaaggactagcagagtattttcaaagtggtgatgtgggttatgttcgtgatggtaaaggtttaaaaattgctccccaaacctcagaattattcacacctcaagatttaatttgccaacttcctgaagttgtacaggtgaaagttgctaatactaaatcacctgcaacaccaaaaaggttagaaaagttagatttaaacccaacagaaatacagtttttaaatactggtgctgatattcgcgctgataggttagcggagtttatcatattagctcaaaaagaattttttgctaattcttcagattatatcaattggatacttaatactttagaattagctgcggaaatatccccagaagctacacaaaaacagtcaggaggagttaattatggttggtatcaagtggcggctaattatattgctaaaaatcccactttagacgaaaatcaagttagaaaatatttgcaagatttggcgaataaattagcaaattgggctgaagaaaataaattgttggcagaaaatagcagtcctacatatcaagcatttattgattatttgtctgaatatttggaaatatttaccactggagataaaaatagtgattttactcaagaattaacagcttatacccaagctaaaatcactaataaaccactgtgttctttcagtagtggagaagcattagctgaggaacagttagatactgtagttttgtttaaacctcaacaatatagtaataaaaacgccttgggaggagggagaattaaacgaggaatatcaaaaatttggtctttagaaatgttattgcgtcaagcatttttaggcgcacccgcaggaaagttagaggaacaacaaccagtatttctttatatttttccagcttatgtttattctccccaagtagctaaagctgtgaggttattagtgaaggaatttaaaagagttaatttgtgggaggtgcgtaaacattggttagatgcagaaatgcaatatcaaggattacaaaatttaccttggagagaaaatgatgatgtagaagagggaagatttgccaaatctaaaaattattcagttacagacttaccttttatggcgatgacttataccacaactagaggtaaaacagttacagatgcgtgggtagaaccgatttttttagcattatctttaccgcttttattaggtgtaaaagttgtggctactgctagtcccgatccgctttatgcaagtgatcaagagtttttacaatcagcagttgtagatggtgcggcgggtttttggcagttactcaatacatcatcaaatgtcagaatccaggagttatcacctgctttaaataggttattaattacctacagtttacatttagataataggagtaaaaaacccgatgctagatggcaagcattaaccggaactgtgagagatttagtcacagatgttttaaatatctttgctatttctgatcaaggatttcgtaatagtaaaaaagaaccaggaaacaatgatgttaaaagaatttggaattatgcccaaacctgggtaaaaggagacaaacaaatgcaagaaaaactgaaattaattgagcgtattgttcaagaatatcgtcaattttatcaagtgaatgttggtgaatctagtcactcaattctgttgccaatttctaaagctctagaggtaattttgactgttcctaatcacctggaaaccgatgatatcatcttacaaggtgccggtcaattatacgatgctttggaaagacaggaagcatttaaacgcccattgttgatgaataaaactgtggagtattctgaacgtaaaaatcaagaattaatggcaattcgtcagtttatgactacctgtgttaatgatttatttctgggactttataaaggcgatcgcgcactactccaagaaaaccgcaatcgcatcaaatccggtgctgaatttgcctatcgttggttatctttgccatcaaaaaacactgaacaaaacacttaaaaatctgaatcataaggaattaaaaacatgaacttaaaaaccctgaaacctgaatttcatactgctttcccccggttagcatctggtaaatatgtccactttttaatgttacgtcacagtcagtcttttcccgtgtttcaaactgatagtgttctcaatactgcacgtactcaagcagggttaaaaacccccgattctatcagtcggttagtaatgtttaaacgtaaacaaatcaccccagaaagattagcaggaagggagttattacgttctttaaatttaaccagtgctgactccacagatagagaaaaattctgtgaatataatggtgagggttcttgtaaaaaatgtcctgattgtattatttatggttttgccattggtgatagtggttcagagcgttctaaggtttattctgattctgcattttcacttagttcttatgaacaatctcaccggagttttacctttaatgcaccatttgaaggtggaacaatgagcgaaaaaggagtgatgagaagtgcaattaatgaattagatcatgttctcccagaagtcacatttcccactgtagaaactctcagagatccaacatttgaaggctttttatatgtcttaggaaatctcctcagaacccggcgttatggcgcacaggaatcacgtacaggcacaatgactaatcatattattggtattgtcctttgtgatggggaaatttttagtaatcttcacctcacccaagcattatatgatgctctcaaaccagatattaatgccccaattgcagatatcattaccaaagcaacagaggtgactactaatttattgaatcaagaaccagtgcgtaaaaatcaggtaattatgggttctcaattaacggatttattaactgaggtttccgctatttatcaagatgaaactttgttacaaagtaccataacaacactatatcagcaaacaaaaacctatgctgaaacctatggtgctgctgctaaaaagagtaaaaaatagtccactgtaaaaacatcactgggggtctttcctccagtattatctatcttcaaatttaggaatgatatgattatttaccaatgtgatttaaccctacatgataatgtattctttgccagtcgtgaaatgggtattctctatgaaactgagaaatatctacataattgggctttgagttttgcgttttttgaaactgcttatattcctagaccttatagacttcaaggtgaagcagcccaaaaacctacttatttagaagttaatcaagaacaaagtcttttacatctaaataaagcaggaatttatgtttttccagctttacctattacttggtcatatcaagtcaataccttcaaggctgcccaagttccttattatggaaaatcagcacaattcggtggtgaaggtgcaagaaaaaattaccctgttaactatggtcgtgctaaagaattagctataggtagtcatttccaaacctatatcttggctaataaaaatatcatcattccccattggattcgattaggtaaatggtcagcaaaaattaaggttgataccaaaataataacagatgttaaacaaaaatctggagaatatataaccagacatcctttaaatcccctagacctatctacaacaactagattatcactttacaatcgtattgttatgcctccttcgagtttagttagtcaagctcaattatcaggagaatattatgaactttctgatcaaacttgtttgcctttaggagttgcttatggggctaatatcaaatgaatttacacagtttagttattgaattaggtgctgctagtgaaaagcctattccagctacattaaatagggcgattcattctcaatttatggcatggttaagtttaggaaatccacacatagctaaatcagttcatgatagtcaggaatctccttttagtttatcaggattaattggttatcgtcgtctacatggtacaagattaggtgataattttatcattcgtatttctctgttagatgataatttaattgatccacttctacagggtatagaactctctcaaaatcagtctctttatcttggtaattttccttttgtaattcgtggtatttctacttttcctggttctcattctttagtgaatgtttctgattattgtattttagcaaataccaatgatttcaattctgaaattgtgctaaattttgtatcacccacgagtttcaagcaacatcaaaatatccaacctttccctttaacggagttagtatttaatagtttgttacgtcgttggaatcattttgcaccttcagatttacactttcctgaaattaaatggcaaggtttggtttctgcttttaacctcaaaacccatgctttaaaaatggaagcgggtgcagaaattggtgctataggctgggtgaaatatcgttttttagattctgaacaagcgagaattgctactattttatctcactttgctgtcttttctggtgtggggagaaaaacaactatgggcatgggacaggtggtaacaattgataattgacaattgacaattgacaattgataattgataattaatttttttttcaagcggaggttttaaaacttaaataaagcaattgtcaataacaaaatacagaggcacagaggtcacgtaacttggaaatttcagagatatttgatgtaagtattaaacaattaccaattaccaattaccaattaccaattaccaattaccaattaccaattacctaatacaatgaatgaagattatttacccctagcttatctcaatgcttgggaatattgcccccggcgtttttacttggaatatgtgttaggtgaaatggaagacaacgaacacattattttaggtcgtcatatccaccgcaatattaatgaagatgggacttttcaagatggtgaaactttaattcatcaacaacaatgggtatggtctgaacgtctcaaggtttccggtgttattgatgcggtggaagaatgtgatggtcaacttgtgccggtggaatacaaaaaaggtaagatggcacaacatctaaatgaccattttcaattatgtgctgcggctttatgtttggaagaacggactggtagaaagattacctatggtgaaatattttatcatgccaatcgtcgtagacaaactgtggtttttactccccaattacgacaaatgactgaacaggctatagcattagctcaagttgctagtcaaaaccaaatgccagcacctattgatcataccaaaaaatgtcaatcctgtagtttacaacggatttgtttaccttttgaagtcaaacaattaaaatctcaggagttctaaaattatgactactctgtatgtaattcaacctgatgctattcttagcaaagattatgaggcttttgtagtaactttaaaacaagaagatggtacttggaaaaaacataaagtcgctgctcaaactgtgaatgaaattgtcttaatgggtaatcctcaagtaactggtgatgcctttacctatgctttagaattaggaatgcccatacattatctttcctgttttggtaaatacttgggttcagctttacctaaatcttctcgtaatggtcaactgcgattagcacaatatcaagtttattccgatcctgtgaaaagattggaattagtgaaaaccattgtcactgcaaaaattcataatcaatatcatgtattgtaccgacataatgaaaaagataatcccctcaaagaacgcaaaagtttagttaaaaatcaacaaactttagaccaagttcggggtgtggaaggtttagcagctagggaatatttcgcctgttggcagaatatggtaggtaaacaatggacatttaatggtagaaatcgtcgtccaccaactgatccggtaaattcattgttgagttttgcttatgctttattacaaagtcaagtaatggcagcagtaaatgtggcaggtttagatccttatatcggttatttacatgaagtccatcatggacaaccagcgatggtgttggatttaatggaggaatttagagcattgatagctgataatttggtgttgtctattttaaacaagcaagaaattaaacctaatgattttaatgaaagtttaggtgcttatcgtttaaaggataatgctaaaaaaacattcctgcaagcctttgataaaaagatgaatgatgaatttaaacatccggtgtttgattatcgttgtacctacagacgaggaatagaattacaagcacggttattgagtcgtcatttacaagaaggtgtaccctacaaaccattatcattaagatgacaacacatttttatctcataatttacgacttaccagatagcaaagctgctaacaaacgcaggacaagattacataaaatgttgggtggttacggaaaatggactcaatatagtgtgtttgaatgttttttgactgcggtgcagtttgcgacactgcaaaccaagatagaacgattgattaaatctgaagaggattcgattagaatttatgtactagatgctgggagtgtgaaaaaaactatcacttatggttcggaaacccctagacaagagcaagcgataatcatataattgatatatcagcttgaatttttggcagacctagagcgggggcaaaaaccctggggggtccgccaaatcgccagaaccttgataattgaatagttccagcgtttcatcagtttcagttggcggttaacccgaagcctgaaatgaggttttttcagaggtccgccaaattcccccctacagtctgctcccagactatgtttcagagggcggggtttctaattacctaatccccgcaaggggactgaaacagcaactggacattatcaatgccggatacgcaatggtttctaattacctaatccccgcaaggggactgaaactaacccaaactgcaactcatcaacatgaataccatggtttctaattacctaatccccgcaaggggactgaaacaatactaggagtttagctaggaatatttcatgtcaagtttctaattacctaatccccgcaaggggactgaaacattttagaaattcaagagattcagaaaacaaaactggtttctaattacctaatccccgcaaggggactgaaacttccaatattggatatcggtcatagttttatgggcatcttggtttctaattacctaatccccgcaaggggactgaaacgttaatgaagctgcttaacaatgcaattccccgtaggtttctaattacctaatccccgcaaggggactgaaactccactaccttcaccactgccaaatttatagccgtgctgtttctaattacctaatccccgcaaggggactgaaactacaccgccactgctaccatttagtcgcagagatgcgtttctaattacctaatccccgcaaggggactgaaacatatatggctgttcatcaatcgacatagaaatctttgtttctaattacctaatccccgcaaggggactgaaacttggctatccgtttttccatttaaccaatcctcaaaggtttctaattacctaatccccgcaaggggactgaaacctttgttagtaggttatattgagtcagttgtcaatacagggtttctaattacctaatccccgcaaggggactgaaacacaccaaaatcatctaccacaagattaacaagctcgtttctaattacctaatccccgcaaggggactgaaacgtcaatcaggctgcctccccttttaataaaaaacccaagtttctaattacctaatccccgcaaggggactgaaacttttggcgatggttcaaaaacaaagacaatggagtgtttctaattacctaatccccgcaaggggactgaaacctagaactcttttagctaacgctacatctttatctttaggtttctaattacctaatccccgcaaggggactgaaacaccaaagaagaatttcacgcagatagaactctttttgtttctaattacctaatccccgcaaggggactgaaacgaaacgtaaacagtattaaagcagggatagcttacagaggtttctaattacctaatccccgcaaggggactgaaacaataattagtttgtcagccacccacccataaaaaggtttctaattacctaatccccgcaaggggactgaaacaaaaattctggtaaaaaaggcacatttgttaggtttctaattacctaatccccgcaaggggactgaaacgttaatcaggaattgatttaaatgacttaaaacctaagtttctaattacctaatccccgcaaggggactgaaaccaagcttctttgtcaatagttctgtgtggaggcgtagtagtttctaattacctaatccccgcaaggggactgaaacaaatgagaggatactgaatagccacaaaaagggaaagtttctaattacctaatccccgcaaggggactgaaacttccatctgtatgggtatacggtagttcatctcagtttctaattacctaatccccgcaaggggactgaaacataatcctgttgcacctgatacgatcaatccccaacctagtttctaattacctaatccccgcaaggggactgaaacactgggaaacattactacacttttcagaaatattatgtttctaattacctaatccccgcaaggggactgaaacagtgtttgtaaacattggtatttcatgtttaccaaagtttctaattacctaatccccgcaaggggactgaaacatcagttcccattgtttagtaactaattgtaatttatgtttctaattacctaatccccgcaaggggactgaaacatttatcataatttaaagacgcaaaagaaccctgtagtttctaattacctaatccccgcaaggggactgaaactgagttacagcagggttaccgtggttagtcaagactgtttctaattacctaatccccgcaaggggactgaaacgttttttaggtcgtcgtccaaccctgaattaataagtttctaattacctaatccccgcaaggggactgaaacacttactccgatagggtagttgaaaaaaaactcttgtttctaattacctaatccccgcaaggggactgaaacagaattatagatttttatattagtatttgtgatttgtgtttctaattacctaatccccgcaaggggactgaaacaaattggacaagctcgcttcattccgcattaattctgaaaggtttctaattacctaatccccgcaaggggactgaaacaagccaagcatctcggagagggtgcgcccttcaaaagtttctaattacctaatccccgcaaggggactgaaacagtacctgtaaacattggtaatttcatgtttactaaatccctgtttctaattacctaatccccgcaaggggactgaaacatagaaaaccgtcttgagtccgacttatttagcacgccaaagtttctaattacctaatccccgcaaggggactgaaacaaacaccgttacctagaatcgttgttaggtatgggtttctaattacctaatccccgcaaggggactgaaacaattatcaagaggataacagtgatccttatttgtttgtttctaattacctaatccccgcaaggggactgaaacaaattcttcatggatagccttaatattctttaaatagtttctaattacctaatccccgcaaggggactgaaacatataaaacacaggaggcgatcgcacggaaaaaatagctacaacttgggcaacaatattagcaagaagcgaaatgagagaatcattacaaatcatagctcaagatttagaaataccatacaccacagttaaaacttatgttaaattagcaccacgggcgctgaaagataaccagagcaatatttaaacatgattatgtatttggtgaaattagcgatcgctttttccaatatgtgaattatattaaattagcgatcgccaaaaaagattaaatattaaatattaaatattaaatattaaatattaaatattaaatttaatcttgtttattttgaggagtaaattaatagtgaaagcaaaaatcagagatacagaaatctattttgatattgacggttgtgggttagcagttgaagaacagggaatacgtaaaaaaccagttgctttcatcattcatggcggacctggagtagaccacacgagttataaaccttgtttttctcccctcagtcatcacctacaaatggtctattttgatcatcggggtcagggaaggtcagcacgtggatcaaaagaaacctataccctagaaaataatgttgaggatatggaagcattacgccaatatttggggttagaaaaaatcattttaattggttcttcctatgggggtatggttgccctttcctatgctatcaaatatccgcaaaatgtttctcatttaatagtaattgccacaactgccagttctcgttttttacaacgcgctcaagaaattttagcacaaagaggaaacccagaacaaaaagcgatcgcctctaaactttgggcaggtgattttgaaaacgaagaacagctacgggaattttttaaaatcatgaatccaatgtattgccaaagcaataaccgcaaaacaaattccccagactcaaagcaaactatcctctcagttgatgctattaatattgcctttagtggctttttaagaaactataatatcctcaacgaattatataaaattacctcaccaacactgataattgccggacgacatgactggatctgtcccccagaattttcggaagaaattgccgaagctattcctaacgcccatttaaaaatatttgaaaatagcggtcatttaattcgtgttgatgaaccgcaattactcttagatgaaattattaattttctcactaagctgttacacagctaaattgtataatcctaatattctgaactcttgcagaacaggcaagatgcctgttccacttatacaaattaaattcacaacagcttatcctaaaatgcttaaatattgtggggtgggtatcttgcccgccaacccccaatcaccaatcaccaatcacctttttatcattttgataaaagccgcacctgtaactaatccggcaaactgtccccaataaccaggattagtaaaaccatcggcaatatttaaactaccaattccataaaatgactgttgaataaaccaccaaaataaataccaaaaagcaggaatttccacaggaataaagataataattaaaggtaaaatcgaatctattttcaccttcggaaacttgataacataagcacctaaaatagcagcgatcgccccatttgcaccaatcacaggtacacttaacttaggaagcataaaaatttgcatcatccccccaaacacaccagcagctaaatacagcaataaatatctttgatgtcctaaatttctttctacagtcttaccaaaaacccacagaaataaaatattacccaaaatttgactaaaactaccatgcacaaacaacgaaagtggtaaggcaattaaccgccaaattacaactatccaagccgccgaattataaaaaatagcattagttaaagcagtgttagtttgttcaggaacaatcccccaattgctgacaaagttacctaatttcccacttacatctagttgtaattcccaacaaaatatccccaaattaatgccaatcaaccaataagtaataattggttttttccaactataaaagttatcactaataggaatcatgatcaatggtaatgggtaattggtaatgggtaatgggtaataggtaattggtaataggtaattggtaataggtaataggtaattggtaaaaataaaattgattacccagtcaccagtccccagtccccagtcaccagtccccagtccccagtcaccagtcaccagtccccagtcaccagtccccagtcaccagtccccagtcaccagtcaccagtccccagtcaccagtcaccagtcaccagtcaccagtcacc

SEQ ID NO: 14 - DNA, 91594 bp, Sphaerospermopsis sp. LEGE 00249
  LEGE00249_23
ccccagtccccacctccctgaaatcccccctgggaggttaatttaacaggttctcaacaatatttagaaatgtaaattttacattctttaatataaactactgggtctagatatgatcccaaaatacctgtagttgagtattggtatatggtttcagaatcattaaattaatataaaatgtataaaatttcttcttatctacaaacttaatgaagttttgtaacgaaaattagtaacttttcgggtatacaccccttatatgtaaaggacttgaggcttttcttattacctgatcttatttattcataaattgtaacaaataaagtctctatagcagtgtataaactaatctggaggggttcaaaaacagagcaaagttaaacgaggcaaccaatccaatctcgttggctggtttctcataaaattacctctgattctcatatttctgccttcaggaagatagacgagaaaatgagaaaagaagtagacaacaacttagctttgattaactcattgtttttgagcatccattcctgattgataaaacagcacctgtttcaatcaacacaactctcaactaagtaattaggagattagagtccatgacattagatgtattttccaaggttgttactcaagctgacgctagaggcgaattcttaagcaccgaacaactagatgctttgacagcagttgtagctgctggtagcaagcgtttggacgttgttaaccgcatcaccagcaacgctaaagatatcgttaccaacgctgctcgtgctttatttgaagaacagccccaattgatcgctcctggcggtaacgcttacaccaaccgtcgcatggctgcttgtctgcgcgacatggaaatcatcttacgctatgttacctacgctgcattggctggtgacgctagtgttctcgatgaccgttgcttaaatggcttacgtgaaacttaccaagctttgggtactcctggtgcttccgtagctgttggtgttcaaaaaatgaaagaagctgctatcaatatcgttaacgatcccaacggtatcaccaaaggtgattgcagttctttagtttctgaattggcaagctactttgatcgtgctgctgctgctgttgtttaatcaacgttgtttaatcaacaagtacaaacaagtacaagtagtccacagctaaaaatctagctattccaacaagatacgaaaccaatcaaggagaaattagaccatgaaaaccccaattaccgaagctatcgcatctgctgatacccaaggacgtttcctgagcaacacagaattacaagctgttaacggtcgttttgtacgtgctgctgccagcatggaagctgctcgtggtttgacagctaacgctcaaaagctgattgatggtgctactaacgccgtatacagcaaatttccctacaccacctctacaccaggcgctcaatttgctgctgatgctcgtggtaagtctaagtgcgctcgtgacgttggtcactacctccgcatcatcacttacagcttggttgctggtggcacaggtcctttggatgagttcctaattgctggtttggctgaaatcaacagcgcatttgatttgtctcctagctggtatgttgaagctttgaaatatatcaaaggcaaccacggtttgagcggtcaagctgctaacgaagctaacacctacattgactacgctatcaacgctctcagctagatagcttcttgcccggagaagggtacaagtgctggatgaagtttatccctttggggttaaatcagttttcgtggggaatctcttttcactcgactagactgaatcacctagcagttggatctcgctccgggcatagttttatgtatgttaggtgacaggttacaggtgacaggtgacaagtgacaggtgacagcgataatagttttctgatcactaaagtttgtatcaccagttaattaatgtcctgattaccttatctgtggctatagctaacaaataaccaacttgatgcaaccagcaattggttagaaagagcagtattgctaatcaaaattgctaatcaaaggggaaaaacaatggcaattacagcagcagcgtctaggctgggaactgagccttttagtgattcacgtcgagttgaactacgccccaaagccagccgcgaagaagtggaaatggtgatcaaagccgtttatcgccaagttttaggaaacgactatattctggcttcagatcgcttgaagagtgcagagtcacttttgcgtgatggcaatttgagcgtgcgtgagtttgtgcggagtatagctaagtcagaactctacaaatccaaattcttctataacagtttccaaactcggttgattgaactcaactataaacatttgttgggtcgcgctcctctgaatgagtctgaggtgacataccacttagacttatatattaacgagggttacgatgcagaaatcgactcttatatagattcgatggagtatcaaaacaactttggcgacaatgttgttccatattatcgcgggtttgattttcaaccaggacaaacatctgctggttttacccggatgttccgtttgtaccgtggatatgccaatagtgatactgctcaggtagaaggtagcaaatcacgtttggcgagggaattagcaagtaacaaagcttcctccgttgtcggtccatccggtagcaataataattgggcattccgtcccactgcggataacgctcccaaacaaaacttaggtaatgctgtagggcaatcggatcgcgtttaccgaattgaagtagcgggcatacgcaatccaggattccccagcgtgcgccgcagcagcacaactttcattgtaccttatgagcgccttttagacaaaatgcagcaaattcaccgatccggtggcaaaattgtcagcgttatatccacataaggtagagtgctgtttgttggtataccccatcaagaggagatttagaagtaatgttcggtcaaactacacttggtgctagtagcgtttcttcatctgcaagccgtgtatttcgttatgaagttgtgggcttaaagcaaaaccaagaaaccgacaaaaataatttcagcattcgtcgtagcggtagcgtatttatgaccgtaccctacagccggatgactgaagaaatgcagcggatcagccgcttaggtggcagaattgtcaaaattgaacctttgactgtagcagaatcataaagccctggtcatgatagaacccagtacgtcagaatattctgccgaaaatggggcgcagttgacaccagagcaagcgatcgccaacctgcaatcatcagatttaagtctccgctattatgccgcttggtggttgggtaaatttcgagtcagtcagccagaagccgtagacgcactgatgacagcgttagaggatgaagctgacaaaacagaactaggaggttatccactccgaagaaatgcagccagagcattaggaaaattgggcagtcctaaagctataccgggcttgattcagtgtttggaatgctcagatttttatgtgcgggaagcagcagcccaatctttagcaatgctgaacgctaaagcagcattaccagcactgatcaaaatgctagatgggggtgttgccaaggccgtgcaagtaccaggccgcccccatcttacccaaccatatcaggcagtgttagaagccttgggagctattggtgcaactgaggctatttccctaattcagccttttttagagcatccagtcacaagggtgcaatgctccgcagctagggctatgtatcaactcacccaagattctcagtatggggaatttttggtgacaatgatgcaaagcagtgatctgaaattgcggcgctctattttgggggatttgggagcgattgggtatatggctgctgctgatgcgatcgcccaagctcaggcagaaaatagttttaaactcatggcgcttaaaggattgttagaacatcaacttgcggatggattagattgcgtttctgatcaggcagtccgagtcatgcacctgatggattcacttttataagttggtgattggtgattggtgattggtgattggtgattgggaagaataaacttttgcctcttgcctcttgccttcttactgtcaccttccaactactgaccactgagacatgaatgaactaattaatgctgtcaaccaagcggaaacatcagcgcaaatggtgacagccgtgaagaacctagcagcagctaaagatccagaggccatttctaccttaatcgctgtttttggttacaataacccagcagcagcggtggtggcagtagcaggactcacagaattgggagaaatagcagtaccccaattgctagaacaaattgatgattataactatggcgcacgggcttattcgattcgcaccttggctgcgatcgctgatccccgtgctttagatgtgttaatcaccgctgctgctacagacttcgcgcctagtgtgcgccgtgctgctgctaaaggattaggaaatttaaactggtctcaattaggcattgctgaacgtcaaacagctatcaatcgcgctttagaaacattgctgttaatttgtcaagatacagactggtcaattcgttatgctgccattgttggtttacagtctttggcaaaaatagcagaggttcgagaaatcatcttaactcgattccaagaaatgctggctcatgatagtgaaaaagctgtttgcgctcgcattcaattggcttctagaacaccgattcattaatcgtcagggcgaagcatttgggtaataacctatcgctgaaaccagttcatattctgtccgaatgcttcgcccctacaaggtaaaaacagattacctagcattactgaatcgacactctagccaattagcttctaccagtttaggattttaaatttcagcatcaccataaaacaaggtaaaagtcaagatgtcaataccacttttagaatattctccttcttcacaaaatcagcgtgtcgaaggttacgaagttcccaacgaagacaccccaaccgtttataaactgaactacgccacatcagatcaagatgttgatgcaattatttgggcaggatatcggcagatttttagcgaacatctgattttaagcagttatcgtcaaaaatttttagaatctcaactgcgaaaccgggctattactgttcgtgattttatccggggtttgggtaaatcagatgttttccgcagccaagtagcagaggttaactctaactatcgcttagttgatattatcctcaagcggtttgtgggacgggcagcttacaacaaagatgaagaaattgcttggtctattgttattgctaccaaaggcgtacatggctttattgatgcgttgttagactctgacgagtacctcaacaactttggtgatgatatcgtaccttatcaacgtcgtcgctttggttcacgtccttttaacttagttaacccccgttacaatgccaattggcgcgatacccaaagtatgcgttcttttggttatcgttccttctacagcatccgcacttcgggaactctcactactgaagatatccgcaaagctattccagctaacttcttggcaatggctggaaacatcattactcctgaacgcaactaccaaagaacaattgctgctgtgacttctcaagtgaaaactttggaaattcccgacacttcacgggatgtcaccacagaagaagtaaccattaaaccagtagcagtttctctaccttacagctatatcccggcgatcgcgaaaaattaatcaaagggaatagggaacagggaacagtaagaaggcaagaagcaatagttcgacttcgctcaccaaccaggcaagaggcaagagtttattcttcccaattaccaattacccattacccattacccattaccacttacaaacaacataaaatatggcaatacctttactagaatataaacccagttcacaaaaccaacgggttgctggttacgaagtacccaacgaagatactcccagagtttaccgcattgaagattatgcttttggtggtgaagttgaagaattgatttgggctgcttatcgccaactttttagcgaacacgtcatcctcaaattctaccgccaaagtaatttagaatctcaggtaaaaaataaagctattactgtccgtgatttcatccggggtttagctaaatctgacgctttccaggatttggtaattaaaaccaattctaattatcgcttagtagaaattggactcaaacggttgttaggtcgtgcgccttataacaaagatgaagaaatcgcttggtctatcaaaattgctaccgatggctgggatggttttgtggatgctttgatagattctcaagagtatcaaagctgctttggggaaaatattgttccttaccaacgccgacgttataaagatagaccctttaatttagtcacaccccgctatgctgactattggcgggataagctagaagctgaacgctacaaacccggtagtatcagtgacttcatgaaaatggctgctgctgttaatatcaggattgttacttatacaccagttagcacagctaacattgcaattcccgatactactagggaaacagtacccgcaggtgttcctgtgtctatcagtcctagtgctagtttcccagttcgttaaatctcttaattaggtatgtaacctaatgagagaaaatagttaaagtgcgaattgggaattttagtgatcaaacctaattctgttttgaaacaaacccaattctgtttttaaacgaaacgaatttatcaacaagaggaaagacgcagcatggcactgccattacttcaatacaaaccatctacccaaaaccaccgcgttagcagtttcggtgttgctgataaaaacgaagatactccttatatctaccgtttagaagatgttagttcttacactgacattcaaagcatcatttgggcttcctatcgccaagttttcagcgaacatgaaattttgaagtttaaccgccaaattactttagaatctcaactgaaaaatggttctttgtctgttaaagacttcattcgtggtttagctaaatccgaagctttctatcgtttagttgtttctgttaacaacaactaccgtttagtagatatcaccctcaagcggattttgggtcgttctgcttacaacaaagaagaagaaattgcttggtcaattgttattggtactaagggttttgatggctttgttgatgctttggtagacagcgaagaatataaccaaaactttggtgataacaccgtaccttaccaacgtaaacgcatggaaggtcgtccctataacttggttactcctcgttacggtgtggacttccaagaaacagcaggtacagtcagaaccgactggcgctttgtgttggaaaacttctacactgcaaaggcgaaaacaaaacgtctcagagaaggcgatcctggcaagtttgcagatatggccgcttctctgtctggtaagggtaactatgctcaaagaatctcttcttttgacattgattacttgaatgaagttccttatcgtggtagacgctaaaatcggtaattctctaattacctattgattacctaaactttctactgggtctggtttttactttgatatgataacgagttggcggtttctatgttagctagttatggtgttaggtgaaaactggacccttggttttaggggcagaaggcagaaagttggaaaaacaaagataatgcttgctgaaaatgaaaaaaataaaaaaatagctctgttaagggcgaagcattcaggcgataaattaagctgttgtgcatttaatttgtataagtggaacaggcatcttgcctgttaaacaagagttcagaacattaggattatacaatttagctgtgtaacagcttatcaattttgatcacaggttattttccgaatgcttcgctcctacgactcctgactgctgacataaatcacacttaaatcctattatcttttatccaccagtaaaaaagtaagtcgattgcaatatgaaccagcgaataacgcaggaacagttaaatcaaattattgctgaagttcaaggtttacaattacgtcaagaagctgaatttgaccaacagcaaattcagcaaattttacaagagttaaatttacctccagagttgttagatgaagctttgattcagttgcgtcgtcgtcaagctttagaggtgcaacaacgtcgtaataagttgatagcttttggggtggttggggcaattatgattactgttggaagtttagtattttttaatcaacaacaagcttccttattagctaatgtttctgctcaacaagataaaatcactttggctgatgaagttgatataaaaactgtttctcgtcaagctaatggtgaagttttttatcgtgtaactttgaaagatgcaccgataggtaaaaagttatctcttagttgtaattggattgatcctagtggaaaaattgtgaaacaaaatgcttatgatactaaagatataactacttctatttggaatactcattgtaagtatacgattaattctactgcacctgtgggtaattggcaggtggaaatgttgctggatgggagaaaaattagtgaagaaatttttgttgtgcaatagttatgttatcctatcattttatcggttattggggtgagaagaatgaagaaaaactcacgcagagacgcagagacgcagagagaggaggggagggagaaaggtttgtttggaatgtggtttatgtgggttgtgagtctgtaccggagatagaaggaaatactattgctgctgtttctgcttcggggttttctgatgctgatgtttgggttagggtggaagatgatagtttgattttgggtagggaggtttttggtaaagttcctttattttggagttgtcaaaataatactgtttggtttgcttctcggttagatttgcttttggaaataatggataaaccggaagtttgtatttctggtttatatggttattcttgtttttcttatgttcctactcctgtaacttctgttagtggggtgttttctgtcggtgcgggaactgaggtgatttttaatattgataacgttggtaattatcaggtaataaataattacaattatcaatggtatgaatctcaggaacaaattacagatgaaaataccgcagtttctcaattacaaagtttattaaaaaatgcggtagaaagacaagttgctgatgtaaaagatgaacctgtgggggtttttctttctgggggtttggattcttctattgttgctgctttgttggtacaattgggggtgaaggttcgcgcttatagtttagattttggtgaatttggagtttctgagtattgttatgggaaacaggtggcagagtttttgaatattcctattattaaggttgatgcaagtccgaaaaatattaaaaatgcaattgttcctactgttaaagctttagatttaccttttggtgatggtgttactgttcctttatatcttttaaataaagttgcttctcaagaaactaaagtgatttttaatggtgaaggtggtgatcaattatttgcaggttggactaataaacctttaattgctgcgggtatttatcaaggtttacatccccataaaaatcaggattttatctcacaatatctgggaacttttcaccgtctctggggttatgaatctagggtgtatcaaccagatatttatgctcagattcaaggtttaaatgctcaggaatggctgttggatgggttagatagtcgtttttgtccttcgttgttacatcgtctgcgtcgtgctagtttgatgttaaagggagcgcaaaatattcatccccgtgcaactgcgttaagttttgtgcatggtttaaatgtgcgatcgcctttttgtgatttaaatttagcaaaatggacttttcagctatctggtgaactctgtttacaaggtgcttgtgaaaagtatatcttgaaacgcgctgtagaaaatttgctaccctcggaaatagtttggagacaaaagcggggtatgggtgttcccctaacctcttggtgtgtaaataatttttggcatgatcttggcaattggttaaatccaggtataataaaagcacaaaatattttttaccctgatatagcaacaaaaattattaccggagaactgggaggacatattcaaggacgacgcataggtgagatactttggttacttattatgtgggaactttggtattttcacgtttttggtgtaaaactagggtcaaagtcttggaagcatccgtttttattacctcgtggtttatggaaacattacaagaaactgcaaaattattaactccattttctcaagaacttgctgaggaattattaaatatttacggttctcctttatatgtttatgatggcaatattttaaatcaaactatttcccatattactaactctttccattatcctcaaactcggttttattttgctagtgtcactaatgggaatattgcgttattgaagatatttaaaaatgctggttggggacttcatgctaatacaccaggtgatatttatttgggtttaaatgctagttttacaccttcggaaattgtctatagcggtagtaatttaagtcgggaggaaattgaacaggttttaaattggggtgtaaatactttaaatttggatagtatttctcagttgcgtttgttgtgtgaggttttattatctcacgcaaagacgcaaagacgcaaagagaaggaagatttaaagattggattaaggttgaatgtttctgaagatagtcgcattggtgttagtatagcagattttgatcaggctgttgctattgctagagatgctggtttaaaaattacaggattgcatttttatcggggtacgggaactaatgcgacttctgcttttactaatgttattgatgaggtaatatccatagcaaaaaatttaccagattggcaatatttagattttggtggtggttttggttatccctatcatcatgatagaattgcttttaattggggattttttggagatgatttaagtaaaagaattggcaatttaggtaaaaatattaatttgattattgaaccaggacgcgctgctatagctggttctggaactttgttagctcaagttctatctgtaaaatggcaaggtaataaacaaattttaggtgtagattctacagtagctaatctttctgttcctgctgttcatggaggttatcgagaaattgtaagttggaaaaatcaaacttatgaaaagtatatcacaaattatatcacggatgtttgtggaaatacgacttattcacgggattatttagctaaaaactgccaacttcccgctttagaaattggtgatataatcgctattttagatgtgggtgcttatggttatgctatgtcttctcattttttacatcgtcccaaacctgcggaggtgttattagaaaatggtactcatcggttaattagaaaacgagaagattacagtgttttactgaataatcaaatagtttaaatatcttaccaattaccaattacccattaccaaaaaacctatgaaatgtattaactgcggaactgacaacactttaaaagatagaacagcaaacaacggaagatgtaaacaatgtcatcatccttttgtttttgaacccacaacaatggggactttgaaaattacagatcccatgtttggtaaaatattggcagatatttctgctaatgatactttatattttacacctaagcagcttttatattttttagataatcgcatccgaaacaaagcatttcaaacccgtagttttgtgtttttatatttctttttcaatatttgggttactctctttgtcggaggaataacaagtgcttttttacctaattcttttctggttgctaatttagtttatcaagcagcgactattttctacttatttaataacaccaaatcaagtaaattaactactgcaagtcgcaaagcaagtgctaaaactttacgcattgtgggaatattaattctagtattgggaatattggtaagtttaaccgtaaactcgtttcctattttttgtatattggtcattttaggaatgttgtcaatatttttaggaactagacagttaggaagagtgggaaatttaccacaggaatttttagttactcaatcttatgtagatgggtggttagaaaattggcaagctattaatggtagaattaataaggttttacatgaaccacaaaatcaaatttcacctgcatctattaaccccgatgttactgcttatagttttgatagattggttgtttgtgatagtgctaacattgcacaattattaattgctaataatttccattttgaaaataactgtgcaattcttagtgttaatggttatccccaaagcattttcgatacaacaatggaaatgctacgacgtaaccccaatttacaagtttttgcattccatgattgtagtcctaaaggtgtgagtttggtctatcatctccgcaccagtgaaaattggtttttaaatagtgaggtgactattattgatgtgggtttattaccgcgtcaaattcttgctaataagcgaggtatgtttattcaaaatgcagagtatttagctaaaaaatccaaagaattaccgttagaaattcgtcagagtttaactgcggaagagttaacttggttggatgcgggtaattttgtagaattagaatctttttccccacaaatgttgattaaagttctcagaagtggtatttctggaagtttgaatttaacaaatgatgatagtagttttatagtggttggtgatggggggaatgatatttatatggtggaaagttttggttaattttttacttgtttatttacctgcaaccaaatttccaaacttaccaataaccatagtttaacaccataacgcccccaaatatcacctttaaaatctaaccagtttcgcaaaatatcctgattaatataagcggaaatctcactatttctatttaacaacaatttccgcgcttgtttttgccaatatttcctaaatcctaattgtacaggaaccatcattccacttttaggacgctgaataattgtatctggtaaaatatcactgactgcttttttcaaaactgctttttcttccactcctgaaagtttatattctgggggaatttgcatactcaagtcaactactcgctgatcaaataatggtgataaaccttgtaaatttgctgcttgggttaagttatttaccttggtgagaatatgatctgctcctttaaatttaatattcaatttcattaatctatttaaataattaatatcgccatttaaatcatggtaaaatacagaagattcgttttttacactttgccaaatttccggttttaatagttgtggtaagtctaaagcacatttttggaaagatattaaataagctgttaaagcatcttgattattaattgtaccatataaactattaatcaacatcggttgatttttgggaccgccaaaacaaggatctcctccttctccatttaatgtaatctctacattttctctcgctagtttacctattaataaatttggtactgttaaaggatcaccgataggatcatctaaatataacattgtttctggtaaacgttcccacatttcccgaaaggtaatttctaaaatgtgatgttgtgtttgacaatgttgtgcaactaagctagaaaattctaattcattgggtgtttctgtaccaaaatgaatggaataagtatgcactggtgcgttatgtaattttgctgctaatgcggtaatactgctagagtctaaaccaccagaaagaaatactcctaaaggttgattttctggtaaatattctttgataacttgttctagtaaagcatttaatttctcgctataccattctaaaggttgattaacatctattactttttcttggagttgccaataatgataaacttgatttgaaggcatttccataactgtgccaggacgcatttctttaacattttgccaaagtgttctttctcctggaacaaatgcacaataaagataatctcttaatgctattaaatctaagtcattgtttctatgaggtgcaagggtggttaatttgggagcaatccagcaagttgaacctttagttgtataatataaagttcggctacctatggcatctctgactaaatataattcttgcttttctcgatcccaaactactaagttaaacatccctaataatagggttaaacatggaaaattatacttttcccaaagttgtacaattatttgttgattactgattttttggggagaatcaatatttatcctttggaggagttctaaacgattacttaaccatatatcaccaactaatacaaatctttcgttaagactaatggcaaaattttcggaagcggaaataacagcaaattgttgatcttgccaggtaacatctgcttttaaagcatctacattattatctaattttccataagctacataccaagtaggtattacttccaaattagaatttattgattgaggattttgaaaaagattaaaaaacatattaaattaactatgaaggcacttagacacaaagcagtttatacagtttctttacgaggctgcgctaaattttctgacctctttctttgtgttctttgcgtcctttgcggttcgttatataatttagcgcatcttcatacagaattggtattaccaaagagtaagctgttgtgcatttaatttgtataagtggaacaggcatcttgcctgttaaacaagagttcagaatattaggattatacaatttagctgtgtaacagcttattaaaaataacaggaatgattaacacaattttagtaccccaaggagcagaaaaccaagccgtttgtcgtggtttaagtcgtgttaaaggtttgcaaccacaggtgatagcaatacccctgggaatgaaatcactgtaccagtttttggaaaaaaattgtcaacatttaaatcaactcaatcaacgggtgctgctgatgggtttatgtggcagtttaaatgagcattacaaggttggtgatatagttctctatcgagattgtatgtatcaaagaaatctgcaaaagtgcgatcgcaccttgatcacagagatatataaccaacttggggatacagtagcttttgttcagggattaacgagcgatcgcgtcatatccctagcagcagaaaaacaaaatttacatctacaatctggcgctgatgttgttgatatggaaggattcacattcttagaatttttccagccactggggatatcaaccgcaatattacgagtcgttagtgatgatactctctatgatatacctgacctgacaacagccattagtgccgatggttcacttcaacctctacccctggccttaacattcatccgtaaacccctagctgctacccgcttgattcgtagttccttacaagcactcaaaatattagaaaccgtagcttactgtttagccagttcctcaactcggatatagatccccgatttctttgcgaagtcgggaatctgaggatcacttcaataatggacaattaacaatgaacaattgacaattacctctctggttgaaaggagaagattgaaaaagctgaatttttggcttttttaccctgtaaacggaagttttaaaccttgaatgaaaaaattgtcaattgtcaattgtcaattatcaattgataactcaaagcttaaatcgctgctgcttcccgttgagaatcaaagaaaatctcgaaagaaccatcaggtatgagttgacgcaagtgctgaatataaccatctgcatctgaacgactacggaatctggcaataattatacgctcttgattcgcaaccacacgagctatagcccaactattcagccgatttctataagaaattgctggatttttggatttcgtatctttatcatctgtgttttgtggcatgattatattatccgtatgaatttgagtgattggcgttagtgtgtctcttagggggaataacactagcgcctttaattgatgatgccactttgttattacataattcttggattgtcaatacttagtgcaacaatttgtttttactaggcaataaaacctagaaaatattatttccagaattttcacgatacacaaataaagttaatattaacagtgctgaatgcttggtaaataaaacaacatttttcattaaaaatttacctcttacttagagaaaattacatatcaatttataaatcattgtagcatgaatctacaatttgtgagaatatatattgcgtattgccccctactaatctgggaaatcatctgatacattaaacaggaatgttgtatgaaattcactgcatcaattttaaaaaaagttgctacagaaatgggcgcttctattttaatagaacctgaatatgaactaattggacatattacgtttaaaaatgggaaaataaccgtttttgataacacgagattcaatattaatggttttggttcggcaaatttagcacaagataaagccttttctaattattttttgggtaaacttggttatcaagttacggaaggaaaaacattttttaatgataaaatgtgtgcaaaagtcgccaaccccagaaatatccatgatggttggaactatgcccaagaattaggattccctgtaattgttaaacctttaaatctcagtttaggaattttagttactaaagtatataataaacaggaatattatcaagtagcagaaaaaatacttgctactcagtctgtcttaattgtagaaagattttatcaaggtaatgactttaggattttagttttagataatgaagttatagcggcttatcaaagaatacctttatctgtcacgggtgatggtaaatctactattttagaattactacaaaaaaaacgtcaacagttaatcaaaacaggggaaaaaatattaattgatgtcgaagatttccgcattatcaagaaattaaacaaacaaaatctgagctttgatagtgtacttgctgaagatactttaatttatcttttagacaacgcaaatctatctacaggtggtgatgcaatagacttcacggaaaatattcatcctgattttcaaaaattggcgattaatatcactaaagatatgggtttgagattagcaggtgtagatattctcaccgatgatattactcaacccatagtagattatactgtagattatactctgttggaaattaatagcgcccctggtttagctcattatgccttactgggagagcaacaaatacagaaagtagaagatttatatcggaaaattttgcaagcattagaaaacgaataaatgtggtaaggagttaggagtcaggagtcaggagtcaggagtagattcaatccaaaatccaaaatctaaaatccaaaatcgaattactcaccaatttttacctaacagagattcaaattctgcttgtaaagctgtaatttccccaactctagccaccagcaaattatctttaccagcatcttgtaatctagctttccaatattgaatagtctctgcattattcaaccaaaattcaatcactgtatctaccacttgatctaaattccaactaccagcagttggaactgattctacagattctagaaaagcatctaatgtacaagtttgagttcccaaatattcaactttttggtgtagaggtttttctaaactttgttgttggtgattgaaaaagtataaaattggagatactcctacaatgtcaaaagtatagttcatgcccatcctccaaatctgttgagttgttagtctattgactggaatctgtaacctatttaattttttatgagtgatttcagcatcaaatgtgattgctatatagtcaaatataacggcaaaaaacagaaattacaagttcaatctactgattttaaaattttttaaaatttttttaaaaattagcacttgtgaactgagagtgctaattttgagtgccattatttaatatatatttgatatattataaaaatagtttccaggcttatttggggagttaagatcatttttaatagtttcttagttattggcttaactaatggtagaggtgaattagcagccttgtctgctgcctgtttatgggcgatcgcttccgtggtatatggagtattagggcaacgcattccgcccttacagctaaatttaatcaaaggcataatagcgatcgccctgttgctaattacaatcgtcatcagcggtgattttttacccacccttgcacccttaaacttattatttctactcctcagtggtgcagcgggtataggtttaggagatacagcttttttagcagctattaacagactaggcgcacgtcgagttttgctgttgggaactttagcccctcccatgagtgcgatcgctgctacaatttttctccaagaaagtctgaacatcaatgcttggtgtggtattttactcactattttgggtgttgcttgggttgttaccgaaagagtcagtaataatggtgaaggtgcaaccacacaactatggccaggaatagggttaggtttgttagcagcagtagctaacgccatcggtgctgttttttcccgtgcagcatttacaggtacgaatatttcccctttgtgggcagcattattcagattaattgccggagtattaataattttaatttgggcatttttgcccaatcagagaaataacgtctttgtatatccttattggcagtcaaaacgagttatattagccagttttttagctgcttttttaggcacttatttaggaatttggttacaacaaacagccattaaattaactaacgtgggtattgcctcaaccctcatgcaaaccagccctatacttgtaattcccattgctatctttatgggtgaaaaagtcagtttgagagctattataggggtaataattgcaattttcggaattagtttattagcttccatcacttcacccatctcagttagaaacattctctagaacaccgatttattaatcgtaagggcgtatagcattcggacagaatatgaactgctttcagcgataggttatcacccgaatgcttcgcccctacaaggtaaaaacagtaaaaacagattacctagcattactgaatcgacgttctagcttagaccggaacttaagttccgggcgggtttggaagctaaacaaaaaagctatttgtggtctgagttgacaccaatgagcattgctaaacccctacacaggagtcacaatgtttgatcaagctgaccattaactcctgactgctgatagccgaatagtcgtaactacggacagaataaagtatctcttgtatccctacccgtgacaggattagtacctttagccaacttgcataattttttttgctcatctgaacgcagcaacacatcagtaaaatctgctccgtcaattatagcaccatcaaatttggcactagccgcaaatgcaccttccaaaacagcattagttaaattggctttaatcaaacgtgcagaatccaaggtagcattagttaaatcagcccccgttaaatttgctgattctagatttgcagcaaaaaagctcacaccacgcaagttagcaccactaaaattactctgacgaaggttagccttagtaaagctagagtctgttaaatcacgtccagaaaaatctgcttctatcaaaatttctttgttgtattctagtgctaaagctggtgatgctaaacctattaatgccgttatgggaatgagcgcccaaagcagtaaactgaggataagtgaccaaaaacgatacttaatattcatggtattttttgtattgggtttattaattcatgtctaaacctcctccatctaattatgctgatattggtaacataggagaagacctagtagcacagtggttaaaatctacaggttgggaaattctgcaccgtcgcttttcttgtcgctggggagaaattgatattattgcccagtaccacgatacaaaagaaacagcaaacaagcaaaccaccaatcatcaaaactcaatactggcatttgtagaggtaaaaacccgcagtgctggtagttgggatgctggaggtagaaacgctatcaccccaaaaaaacaagcaaaactctgtcacacagcaggaatatttttagctcagtgtcctgaaaaagctgattattcttgtcgttttgatgtcgctattgtcttttgtcaacccttgtcgcaaaatcttcagagggcaagatttaccccggaaaccctagctaatttatcaataccaggatataactttaagctgctcgaatacattccagcagcttttgatccatcaaccataaattgataattggtaattggtaattggtaaacttccttctgtcacctgtcacctgtcacctgtcacctattttcaagccaaagtttctggacaatagcccaaaccttggacaaactgttgtctgaatgcttcgatttcttctttttctggactaccatgagatacaatagctacttggtagcgacgcattacgtccacgggatactgtcccgcctccaagctccaaagtgccatttgtatcctcataggtggatcataactaattcctaattcattgaagaaagcccgaaaatcaccatcttcttgggctgagatcggttctctaagtttaatcctcactacccaaccatcaatttgatgaattacggtgataaaagaaacaggagtttggggtctgttgtgcaggtgttgaactaccctgagagttagactagcatttgccaggtaatataaatattccatgatggtatttgggatcaaatccaatcctacatctatatcttcctggatcaaggatagttcctgctagggtaaaagtccccgtttttatatggggagatttacccaattttgatgattggggattggtgactggtgattggggattggtgactggtgactggtgattggggattggtgactggtgactggtgactggtgactggtgactgggaggatgaataacccaatgcccattacccattacccattacccattacccattacccattacctatttacctttgagaaaaatgtctaacttagaaaatcaaggtgtggatttagaccgttctttatctggctatgattatgaactaccgacggaattaattgcccaaaacccggctgttcctagagatagttctcgtttgttggtgatagattccctgagtacgggagtagaaaaaccagcacttgattacattttccgagatttagtggaaatactcaaacctggggatttgttagtgatgaataatacgaaagttattccagccaggttatatggccgcaaatctacgggtgcagaggtagaggttttactgttggaagaacgacagcataactgttggttggctttggtgaagccgggaaaatactttaaaccaggaactcagattatttttgatgggcaaaaattagctgcgggtaatgaactaacagcgacagttgtagaaagagatgaagccactggggggcggttattgcagtttgatttaccggaaaatgtgcctttggtgcaagtattggagaagttcggggaaatacctttacctccttatattaatgcttcctctgctgctgatgaacaatatcaaactgtctatgcccaggaacagggggcgatcgctgcacccacagccgggttacactttacaccagaacttttacaaaaattacgcgatattggcattaatcaagcttttttaactttgcacgtcggtgtgggtactttccgtccagtggaagtagaagatgtaacaactcaccaaatgcacgaagaatggattgaagttagtaatgctacagtagaaaaaattaaggctactaaggctgctggagggcgaattattgccgttggtactacagtagtccgggcattagaaggtgcggcacaatcaggggatttacaaccttatgtgggcaaggtaaatttatttatctatcctggttatcaatggcgagtggtacaaggtttgattacgaattttcacttaccccgttctagtttattgatgctggtaagtgccttgattggtagagaaagattattaaaaatttatgaacaagcgatcgcatctcgatatcgtttttattcctttggtgatgccatgctgatcttacctcaagcaactattaatgctggtgattggtgattggtgattggtgactggtgattggtgactggggaagaaaattttagattttagattggaattgacaaaaacaatccaaaatccaaaatccaaaatccaaaattgaattaccaattaccaattacctctttaagaattaaattgtgaatttttgatgtagttatgggtactctgattgtgtgaggatatcaactacaaataccaggcgggtaatatgtctaaaataatgcaatttaatcaatgcttacacaggcaatttaaaggaacatttgacaaaatttctgtcaaaggatggggactgctgtttgcttcctcagcatttttagtggtgggtttaccgacaattatagatttaccaggtagtaaactattggcgcagaatgtggtttctcaagatttggatgcagctatgttgtaccaaatgggagtgacacgctataaccgcaaagattttcagggtgcagaatcagcttttcgtcaagctttgcagcgagatcctaatattgggttagcgcggaattatttaggcaatattttcatgcagcaaaatcgcctagagttggcggtacaagaatatggggaagcggtaagactgattcctaattttggcgatgcttattacaatttggggttagctttgcaaagacaaggacaaaacgaagcggcgatcactgcttatcgtcaagcgttgatagttagtcccacaatggtcaatgcttattataatctaggcttggttttgtatgaacaagaactgcgccaggaagcgatcgcagcttacgaacaaactattaatttagatagcagtaaagtggatgcttatttaaatttagcgatcgctcttcaacaagaaggtcagatagaacaagcaatttctaattatcgtcaaattttaaagttagatcctcaaaacaacatagcatacaataatttgggtgctttgttagtgattcaaggtcaacctttagaagctattgctgtttaccaacaagctattcgtcaaaattccaaaaatgctgtagcttactataacttaggagtaactttatataatcagggcaatctcaaagcagctaatcaagcattaaaacgcgcccgtaaagaatatgtagaacagggtaatactgaacaagctgcaaaaattgacgagatgacacagaaacttaccgcatatttaacacccaaaaaaccagaagttaatcaaaccacaactacaacacccactcctgaaagtgataataacgctgatattatattgccaccacctgagcaagttgtaccagttaatcccacagatcaacctaacatctttgaactacagttaccaccgccagaacaattgccaacaaattctcaatcaaattagaagtaattgggaattggtaattcaatgaaaggattttggattttggattttggattgtttttgtcaattccaatctaaaatctaaaatctaaaatctaaaattttcttccccagtccccagtcacctaaattggtaaacgattaatatctctattgcaaccaattaccaccatagctgaaccacgttctaaacgcttagtggggtcaggattaatcttaaatttaccatcctgacttactgctaacaaatttaaaccataacggtttctcagttgaatttctgcaacagttttaccgtgaaattcatcagggacaattacttcaacaatgctatgatctggatcgaggtcaaagcgatctaaaatagatggtctagtgagagttcttgctaaagcacaaccagcttcatattctgggaaaactacatgatctgctcccactcgttttaatagcttgcggtgaacttcactagaagcttttgcaactacatgaggtacaccagcttctttaacattaagagtggtgataatactttcttgaatgtaattaccaatagccacaattactgtatcaaattcaaaaataccagcttctttgagtgcagcaggttcagtagagtctagttgtactgcatgactgactatttcatcagttaaagcttcagaaactcgcttttcatccacatctgtcgctagaacttgataaccaaaactgtgcaatgttgcacaaacagaacgaccaaaacgacctaacccaattacagcaaattgctgattatcgtgccgtaaactgcgaaaaaattttaatgatgaaagattcataaatattgggaatggggaatggggaattgggaattgagaactcggaatggggaatatatcagagtatttaccaattaccagttaaaaattacctattaaccaacaagtaaattttcttcaggatagtgaactctactcagacgaggatcacctaatatagctgacattaataataaaacaccgactctaccaatgtacatagtgacaattaaaattatttttgctccagtggaaacacctgctgttattcctgtggataaacccactgtaccaaatgctgataccacctcaaaaagaatttgaataaactctaatttcggatctgtaatactaattaaaatcgttgcgccaatcactgtagctagagaaccaaaaactacacctacagcttttaaaatcagtgatattgctatcttacgctcatacagtaaaacttcctctttcccttggaggattgcccttgtacaactagtgagaactcttaaagtcgtggtttttatacctcctcctgtaccaccaggactggcaccaataaacattaaagcaatggtaataaataacccggcatcagtcattttaccaatatcaacagtgttaaatccagcggttctaggggtaacagattgaaaccaagctaataataattgctcaggaaaactaaaattaccaaaggtttcaggatttctcatttctatgaacaaaaaagcaattgttcctacaactaaaagcagtagagtcgtactggttgctactttaaagtcaagagagaatactatggcatgaggtttctttaagcatctatcacgaaaccaaaaatacatatctaaaataacctgataaccaatgcctccaaaaataattaagcctgtaacagtgaaaactactaagatagaggtttgatagcctattaaattgtctttgaataggctaaaacctgcattattaaaagaattgatactgtgaaatattgataaccaaagtccttgatcccaaccaaaatctttaacaaaagctggcaataacaaaaatattcccgtaatttcaaaaatcagagttgtagcaatgatagagcgaataatttgggtactaccactcattcctgggcggtctaaagcttgttgaatcgctaatttttgcctcagatcaaatcttttgccaattaataaaatcaaaaaggtggtagttgtcatgtatcctaaaccaccaatttgtactagcatgacaataaacaattgaccccaaaaggaaaaaccagtaccagtatcaactacagctaaacctgtaacacaaactgcggaggttgaggtgaatagtgctacaatggggtcattccaggtaccattgctagtggaaaaaggcatcattaataggatagttcctgccaggataacagtcagaaatcctaagcagattgtacgagcaacagtcataagtaattccaaattttcctataaaagcaaaatcgcctgatctaattaaatacacagatggtagcctaaaaatatatttttttgtaagcagtcaggagtcaggagttgtaaggaatcagaagtcatcatttttaatgaaaccgtagaatatcactagcgtgatttttggcgtaacctttaaaaagctaacaaactgactgctgaccactgatagctgaatgctgactatttttttaacttcggcttggtctttatctgtgaattcatgagtacaacactttatcagcaaattcaagaattttatgatgcttcctctggtttgtgggaacaaatttggggagaacatatgcaccacggctattatggtgcagatggtaagcagcaaaaagaccgtcgtcaggcacaaattgatttaatcgaagaactgctgaactggtcaggtgtcaaggatgcagagaatatcctcgatgtgggttgtgggattggtggcagttctttatacttagcgcaaaagtttaatgctaagtccacaggaatcacacttagccctgtacaagccgctagagcaaaggaaagagccttggaggctaatttgggttctaggagtaatttcctggttgccaatgcccaagaaatgccttttgctgatgcttcttttgacctggtgtggtctttagaaagtggcgaacatatgccagataaaaccaagtttctgcaagagtgttatcgggtgttaaagcctggtggtactttgattatggtgacatggtgtcatcgtcctacggatgtttcacctttaactgctgatgagcaaaagcatttacaggatatctatcgggtatattgtttaccctatgtgatttccttgccagagtatgaggcgatcgctcatcaattaccattaaacaacattcgtaccgctgattggtccactgctgttgcacctttttggaattttgtgattgattctgcttttactcctcaagcattttttgggttacttttttcgggttggagtacaattcaaggggcgctttctttggggttgatgagtcggggttatgaacggggtttgattcggtttgggttgttgtgtgggaaaaaataattgataattgataattgataattgataatttgttacaagcctatggatttatccgtaggttcaatccaaaatctaaaatccaaaatctaaaatcgagtaatgaatcaattttttcaacaaaattcacctatttttccaggaagttggctttatgctttttggaagttttcccgtccacatactattattggcacaagtttaagtgttttcggtttatatttactgacccttggtgtcacttctacaagtttttctgtagttcatttagggcagattttcggaacttggttagcttgtattgctggtaatatctatattgttggtttgaatcaattacaagatgtagatattgacaaaattaataaacctcatttacctttagcttcaggagaattttctagagaacaaggaactttaatagttgttattactggtattttagctttggttgtagcttggctaaatggaccatatttgttgggaatggtggggataagtttattaattggtactgcttattctttaccacctattcgtttaaaacagtttcctttttgggcagctttgtgtattttttccgtgcggggaactattgttaatttaggactgtttttacattttagttggttattccaaagaagccaaggtatacccagtgcggtgtgggttttgacagcgtttatcttggtgtttacatttgcgatcgccatctttaaagatattcccgatctggaaggagacaaactttataatattaccacttttactatacaattaggacaaagaaaagtatttaaactcgccctttgggtactaacagtttgttatctagggatgatgtttgtgggtatattcagattagctgaagtgaatcctatctttctctttattagtcatcttatacccttagttttaatctggagaaaaagtcaaaaagtggacttacaaaacaaaagcgaaattgctcaattttatcagtttatctggaaactgttttttatagaatatctcatttttcctattgctgctattttagcttagttagaccaggaatttacagggatttacaatgatgttagaaaattcacaactgagtaatataattgccatttcttcagtcactgttagtatcagctttctgatttattttgccgttaaaacattaataacctcaaatttatttcaaaaaggagttaatctttttcaagcaaaagactatgcaggtgcagaagcagcttttcgccaagtaatagcaataaattctactaatgatgtagtgaggttgttattaggtgatttgttaaaccaccaaggaaaaattgaagaagctaaggaagtatttaatgatgtaattactcgcagtcccaaaaatcccgatgcttatttaaggttagcaaatattcaattattgcaagacggaaaagcagaagcactccaaaatttacaaacatcaaaagcactatttcagaaacaacgtcaaccgcaaaaagcagcaactatcgagaaaattattaaagatataggtaataggtgacaggtgacaggtaacagtaaataatcaattatcaattatcaattatcaattatcaattatcaatgaccaaaaagaaagtttacatcgttggtgctggacctggagacgtggcatatttaacagttaaagcttatcgcatcttggcatctgctgaagttttaatttatgatgctttagtagatagggaattattagaatgtgtaccaccaaattgtttaaaattagatgtaggtaaacgcggaggtaaacccagcacaccccaaggagaaattaacagtttattggtgaagtattgccgagaaggtcaacaagttgttagactcaaatcaggtgatccgtttatttttggacgttgtatttcagaaatagaagcgttaaaatctgcgggttgtgagtatgaagtcataccaggaatttcttcagctttagcagcacctttattagcaggaatacccctcacagataccgtaatcagtcgctgttttgcagtgttaacagcacacgaaccagaggttttagactgggaagcattatcaagattagaaactttagtaattttgatggggggaaaaaatctggcggagattgtccatcaactgctaagatatggaaagtcgcaatccacacccattgctatcatccgttgggcaggaactcccagtcaagaagtctggacgggtgaactaggtaatattttgacaaaaactacgggtttatatttatccccatctgtaattgttattggtgaagttgtaggattacggaagttcctgtaatatgaaaaaatatagaatattataaattgctaaacataaattgctaaactgctcctcttacaactataaaatcgtgcatagtaatatacctatctccccatccccccatcctcctacttttcccctcgcagggaaaaccattctcgttacccgttctgtgggacagtctagccaatttagcgatcgcctgactgccgaaggtgctacagtaattgaactaccagctttggaaattggacctcctagcagttggagagctttagatgaggcaatatctcagttatcaactttcaactggttaattttcacctccactaacggcgtagattacttttttgagagacttcaagctaaaggtaaagataaaagcgccttagctaaggtaaaaattgctgttgtgggtcaaaaaaccgcccaaagtctggcaaaacacgatattcaaccagattttattcctcctcactttatcgctgactctttagttattaactttcctgaaactttagcaggtaaaaagattttatttcccagagtggaaagcggtggaagacaagttttagtccaagaattaacttctcagggtgcagaagtcagagaagttcccgcttatcaatctttctgtcctcaaactattcccccagcagcagaaaaagctttgcaaaaccactctttagatgtaattacctttgctagttccaaaactgtacaatttttctgtctattaacagcaacgaaatttccagaaggaattacacattatctagacaaaacttgcatagcttctatcggtccccaaacaaccaaaacttgttttgatttatttggtagagttgatatagaagcagaagaatacactgctgaaggtttactcaaggcaattattcaatgggcgcataagtgattggtgattggtgattggtgattgggtaaatataataaattaataactaactaatgactaataagctgttgtacatttaatttgtataagtggaacaggcatcttgcctgttaaacaagagttcagaatattaggattatacaatttagctgtgtaacagcttaatatctaatgactaaaagactaattggtttaactggtggtattgctacgggtaaaagtacagtggctaattatttagctaatacttataatttaccgattttagatgccgatgtttatgctagaaatgctgtatctgtaggttctcccatactctcacaaattacccaacgttacggtaaatcagaaattttattagcagatggtaacttaaatcgtgctaaattgggagaaattatttttcatcaaccagaagaacgtatttgggtagaaaatgttattcatccctatgtgagaaattggtttttaaaaactattcatgaatcatctgcaactactttagtattagttattcccctattatttgaagctggtttagaaaatttagtgagtgaaatttgggttgtttcttgttcagaagcacagcaaaaacaaagattaattcaaaggaataatttaacaaatgaacaagcagcagcaagaattaatagtcaattaccattatcagaaaaaattgcccgtgcggatgtggttttagataattcttctactttagaatcgcttttacaacagatagataaagtgatgaaaatataatatcatgaatatgattcaataatggacaattacctctctttgaaagtcagagtcttgaaaaagcgggatttttggcttttctcccctggaaaggggagattttaaacatggaattaaacaattatcaattttcaattgtcaattatcaattagttaactttctccccctaccactacatcccgaatacgcaaagaaggaccaccacaacccacaggtaaaccgttttgtccacctttaccacatccaccggattcatcccagtaaaaatcatcacctatagcttcaatatctgctagggtttgaaaaacattaccggaaagtgtaacatctttcacaggttcagctattttgccatttctaatcatccacgcttcacccgcgctaaaggtgaacatttccccgtttgtcatcccacctaaccagttacgtgcatatactccttctttgatatctgtgaataaatctgctactggggttttacctctttctatccaggtatttgtcatccttacaatgggtgagtagtgataatctaaacaacgagcgttacctgtgggtgcttcgcctaatttacccgcagtttcacgagaatgtaaacgtcccactaaaaccccatctttgattaattgcgtagttgtcgcaggtgtaccttcatcatcgtaaaaataactacctctgtgaccttggggtgcagcaccatcaaaaatttgcagttcttctgaaccaaaacgccttcccagagtcataacctccaataaatcagggttttcataggccatgtctgcttcggaaagatgtccaaaagcttcatgaacaaataaacctgcaagtatggggtcaatgacgacggtataagtgttacctttaactgatggtaaggataaagctgttactgccctttctgctgcacttttaacttgagtatctaaattgactaaattttcgtatgctttgcgtgaacctacggtttctctacctgtttgtacagtgtcgccgtttcttgctgtagctgcaaaacgcatttccatatctacccaagattgctctattaatgttccttctgaagtagcaataattactctttggcaactgtcaccataacggactgaggtagtggtaatgcgagaatcaacactttttaataattcggtgtagcgatcgcacaattcttttttttgtttgagggaaacggtacggggatcaatacctgtgaggtgtaaattacatactgtttggatgggatcaatgggtgcgaggatggtttcttcatctcccactatcctagcagcagcgatcgcttcttctattctttgttcgatagttgctaactggttgaaactacttaaaccccagccacctttatgacaagcacgaacatggccaccgatagaaataccttcactgagggtttctactttgtcaccacgcaataaaatatctgttccttcagcttcttctaaacgaatcatgagataatcgacacgggaggaatagcgagcgattaaatcagagagtaaattttggatgtcagcaaggagtttaggcattttgcttagggatgattaagaactttagttattttctaactatttatgtttattctctatatcttcaagatcagattcagcaggtagttgaatacttaatcaaaaacatatttttctgctactttccaataacgagaaaacctctttaaatcaataaatccatcataatcaaaaaatggttcaacttccaatatttctaatttcaatttcttttcaatttgattacaaatatcatcaaatttgggactgggactatctgtagtcactactaatttagcatcatgttcctgagcaaatttaataatttcctctgcgacatttccccgacgaatttctacaggtaattctagcaaacattcatatataaaagttatcctttttaaacttaattgccattctctgattaaagcatcatcccaaacccaaattgcaggtgtgttgggatattcttgtaaagcggggttttcgggacttaaacagtctccattgatccagataattggtttattcatatcagatagattttaacaaagcttctttaaattctatcgcagtttgaaagtaaatttgcggtttttctgtgttaatctgagtttaattgtcagaatcaggacacctttcgggaagtcaaaagtcaaaattaaagagttttgtgtcttaattcaaacaagttaaagtaaaaaatcactcaaacctaaaatcattaattctgtaactcgtttcaactgaatatcattagttaagaaaatatcacattgaatttaattccctatttttactttcctcgtttctatttctggaaacccaattttgagcatcttcactaactaaaggataaggtgctttacctctgatttcttgccattttcgacgttgtttttgttctatatcatttggttgtgattgcagatataatgactcaataaaaattaatactttttcttgttgtgcaggtgttaaattatctagtttttctaaaatagattttttattttcctgtgctgtagtcatcatgaaaatcctcatcatttgtaaaacacaatcttctttaattatatggctatcggcttttatttgtaaatattgccaggatttgaggatgtacaggatattattgcatgattgttttttggaagttggggattttttaggatgttgttgaatgattgtttttgcataatttaaaccatctataaactactatcctgtaaatcctttaatcctggttatcctgattcagacaaatgcaactttcatcaccaacaaaccatctaaaaattaccatactgtaaatcctttaatcctggttatcctgattcagacaaattaaatttcaccttccttttttccccttctgccaactttgactattaggctttttactaaactcacctttgggaaaaagtcgcgcttccaactcctcataactcccctcaaaatcacacttaccataaagcagacattgacgacaataaaccccttttgtgtaacgttctaaattttcccgattgaaaaaataaggtttatgactaaaggtactcgctacccattgccatgacatattattacttgctggatcgccatccaacaaatgttgtaaaaaccattttgcgcctgcttgccattgaatacgtcgccaatggataatataagctgctaaccacattctaatatggttatgtaaatagccagtttttcttaattcttgactaaaattatcaatacaaaccagtccggtttttccttcaataatatcttccggtaaattttttgcgtaatctgctactttataaccggttttgtattcttcttgattttcccaaataccttttcctaacttaacatacagcctttgccaataatcgcgccatcctaattcattaattaatttactcgcatcatctggattttccacccgttctaaactatcatctctaatttctcgcaaactcaatacaccataacgaatataaggtgataacctagtaacagcaccagttaaagaattgcgtgtttttgcgtaggcaacaggatctacttgttttagcttcgcttttgctgctttccttccacccacagtttcgctgatgtgatcatcttgttctgcggcctggggaaattgttcgcgcaggtaagctattaactcatctcgattagtgaaatcacgtaacatagtattcttagttgagaattatgtaatcaaaattagaaatagtggcaatttaaatataactatattatcctctacagtatatcaagtgttaccagaaaaagccatgaccaaacacccatctttacaagaaaaacaaggttactatcgctatgatcccagtaacttagatcaaaaaggatatgcaaggttatttccttacactggggaagatggcgttatccgttatattttaaccaaactcagcgaaaatttggtagaacaggggaaactttcccaaccttggactttattactgagtcagttagataaaaaagcggaagaattacaggaaaattggttaaatatatcgactttgttggtagattgtaaagtttttcaatcgggatggtttaatttggatttaccgcccaatgaacaatttaatagtagctatatccaacaaagaaaaaaattaattcaaacaatttctgctgttaaaaaagccgtcgaaaatgtagataaaaatttacctcccctcacaaaaaacgcagaacaaagaaatttattttaccaagcattagcgaaaaaagcagatgttaaacctcctgttatgagtataattcatgaacgagatggaggtttgagtgatagagaatttgtccgtcaacgtttagctggtgctaacccgacaattatccgcagagtgcaaacaaatgatcaaagtttgattcaaactttagctactcaaccttacaaattagctaataacggtgctgttgatttaattaaagctgccagtgaaaatcagttgtttattgctgactatccaatttttaaagatttgaaaattacagacttacaaactggtaaatatgtaggtagtccagtagctttatttcacaatacagaaaaaggtttagaacctgtactaattcaattagaaaaaggtcgagtagtcacaccaggaattacaggagaaccagcagatgattggatgagagcaaagttatattttcaaactgcggatgctacccatcatgaattaattgcccatttagcttatactcatttagcaatggaatctttgtctattgctacttctagacaaataccaactaatcacccagtttatcaattattatctccccattttaaatttttaattgccattaataaccggggaaatagtatattgttagcagaaggagcagcaattgataatttaatggctcctactatcaaaacttctggtaacttgatgaataaagcctatcgagaaaagtctttttggtattattccctgttgaatgatattgaagtgcggggaatagaaccgaaattattaccagactttccttatcgggatgatgcgttgttattatgggaggcgatcgccaaatacacaactcgttatttacaacgctactacccagatgataaagcagtacaacaagatatttatctacaaaattgggcggaagaactaggcgcacctttaaacacccgtcccaaatcagactttccccaagcacccgcatggtttcccaaagaattagtagcagcatcaggaatagaaccccaagaaataccttcctatccccgcgtaccagggtttacaaaaattggtagtttgcaacaattaatagacattgcaactatcgtcatctttacctgtggaccccaacacgcagctttgaattttagtcaatacgattattttggttacgttcctaacgcacccttagcaaattatattcgtcctgatacaccagccagtttagaggaaattttaccctcaacagcaagagatttagagcaaatgcaattaacctttgcattaagtggaattaactggagtaaattaggaagttctgattttattcagtttgcagataaaattgatcggcaaattctcgcccattttcaaagtgatttgttagagattgaaagtaaaattaaatctcgaaatcaacaacgttccctagaaacaggtgtagaatatccctatcttttaccttctcggatacccaatagtattaatatataattatcattgtaaaatccttgtagagacgtttcatgaaacgtctctacatttcagattaacctaaaaatttcatcatgaccaacattcccgaaattggacaaactgcacccgatttttccaccccagatcaaaacgatcaactcgtgaacctcgctgacttcaacgagtggatagtcctttatttctaccccaaagatgacacccctggatgtaccacagaagccaaagattttacagatttagccgcagaatttaccgctttaggtgctaaaataattggtgtaagtccagattccagtaaatcccattgcaaatttatcgccaaacataacttagaaattaccctattaagtgaccccgaacatcaattaattgaaacttacggtggatggcgtttaaagaaattcatgggtaaagaatatatgggtgttgcgcgttcaacattcttgatttcacctgataaaattatcggccattcttgggcaaacgtcaaaacaaaaggtcatgcacaagcagtcttgaaaaaactccaagaattaaccaccaaataacagtttgtagtgagcgatttatcgctccctccttattactaaaagatatataatataaatatcaactctattgtcttgaagcataaatatggtacaatttatacaagcacaaaatgtaagtattgcctatttagagaaaagattcagtttacaaagagtcaatgatgaaaacttctttactgaatggtgggaaaccttgccagaaattaccactttagaaaagcaatatctagacagaatcagggagaatttcctcagattgattaagcgtccaccaatcttggaaaatgctgtaaaaatggtagtgttatctcctctactagatttagcaggattttatcaagagccatttttatttgctactgaagaatctatagaactagctatagaagatgaaggagaaattattagaggtagaattgatgcgttagtaattcaagaacaattttggttactgataattgaatctaaaagggctagtttttctttgttagaagctatccctcaagcattgacttatatgcttgctagtcctcatccagaaaagccaatatttggatgtgttacaagtggagaagattttcaatttatcaaactcattaaacaagacatacctacttacgatttgtctgataaattcactttatctaaacgtgaaaacgaactttatcaagttttaaaaatcctcaaaaaaataggtaaaatattaacttaattgttgagtttatttatgtctaatcgtcccatctacctcgataatcaagctaccacccccgtagatgaaagggtactcaatgccatgataccttactttacagaaaagtttggtaatcctgctagtaatagtcatgtttacggttgggaaggtgaagcagcagttaaacaaaccagggaaattttagccactgctattaacgctaacccagaagaaattgtctttaccagtggtgcaacagaagcgaataatttagctattaaaggtgtcgcagaagcatatttttccaaaggtcaacatattgttaccgtcgctacggaacacaaagcagttttagacccttgtgaatatttacaaaacatgggttttgaaattacaattctcccagtccaaaaagatggattaattgatttagaacaattacaaaaatccttgcgtcctgatacaattttattatcagtgatggctgcaaataatgaaattggtgttttacaacctttagcagaaatcggtaaaatttgccgagaaaaggaaattatttttcatacagatgcagcacaagctattggtaaaatacctttagatgtgcaaatattaaatattgatttaatgtctttaactgcccataaagtctatggacctaaaggtattggtgctttatatgttcgcagacgtaaccccagagtgaaattagcaacgcaacaacatggcggaggacatgaaagagggatgcgttctggaactttatacacaccgcaaattgtaggttttggtaaagcggtggaaattgctttaaaagcacaagaaacagaaaatcaacggttaaaagaacttagacaaagactgtggaaacagttatcaactttggagggaatttatctcaatggacatcctgaaaaaaggttagcgggaaacttaaatattagtgtggaaggtgtggatggtgctgcactttctttaggtttacaaccaattgtagcagtatcttctggttctgcttgttcttccaataatgttgcaccttcctatgttttaacagctttaggacattcggaaaaattagcttatgcttccgtaaggtttggaattggcagatttaatactgttgaggaaattgatcaagttgccgaacatttaattactaccgtgaaaagtttaagaagtttctcgaaagtgtgaattattctctcgttctctcgttcccagtcagagactgggaatgcctgaatagagtttctgactccaataaaacagaagccagagtcttgctttattcattcccatacagagtatgggaacaagaaaaactatagatgtaaaataaagcggacaagatgcccgcaacacaaaaggatctgtacatccattaataaggatcagaatcaaatcttccccgtttcacacttctgagataataacctctagatggtaaattatttaaatcaaaagtttcacctctaggaaatcgccaaattttataatcataatatgtgagaggtttacccggttcacaaacttctgggggatgatctccaagaacaaaataaactgaacccctccccataacttttgcaattccatatttatctacaagtaaagatgtttcttcactaatagctattcctaatgcagtggaagacacaccatcttgaatttgtcgcgcaataaaaaccataattcttcccattcttttgcgttcatcaaaatgggtatcaataatcgttcttcgcaaatacttccactgaaagaaattataggtaaatgtaatatttctataggggtcttccagtgcttcattagtttcaatactatcttcacaagcgcaagaatcataaacaaattcactttgaatcattgcccctgcacttgtgccaccaatcgccccacccttatcataaactgatttgatagcagcttctaatttcgtgtttttccagttgcgaatatattcacattgatcaccaccagcaaagaaaatcacacctgcatttctgactttatcaaaaatatcagttctatttgcttcttgtctgtttctgatgatcaaagtttctacataattcacccctctcatgtgataaattagctgattataatcatcgttaccagcagcacgaatgacaacaacattaacttttttgttagagttagcacctcccctgacttgatttatcatccattgaatcccatcatccacatcaggaccacccccacccaaattatgtacaggtccaactaagatgggtcctttataattcggtctataattggggtttggtaacggtggactaacatcacggctaatcttttcaaagtagcggtttaggtttgctgtaaagtgggatatgaggaaggttcccatcttcaacaacatagttcttgcttttctcaagcacttggctatatttgggaatgccttggtcatattcaaaaatgtgaagcaaacagccatcatttctaactctcgcactcccaagggggaaattcccagcgtacagcctttgtactgttttttaacggtaaaaaacgcagagtaattaatattatctccactactctgcgaaaacctcagttttactttgtgtttaattaccaatcaacttgcgatcgctctttcaccactttctcatatacagcttccgtttcttttgctaattgtggccagcgaaatcttcgttctaaatcttcataagcgttatctatcaaccattgtcgataacctggatttttcaaaacttctaaaattccccatgctaaagaatctggattatttaccttagttacgattcctgttttcgtatgttgtactacttccggaaaaccacccgtatctgaaaccacaaccggaactctagaagcaaaactttctaaagctacaataccaaaaggttcataaagactgggaaaaactgcacagtcagctaaggtttgaaatttatccaagtagtcatcagaaagaaaaccagtaaaatagcatttatcccaaattcctaaatcccaagcttgctgttttaaatggtcagtattaccaccaccaactatcacaaatttaacgtaaccgcccatttcccaaagtaccttgggagcagcattaagcaatacaggtatacctttttcataagtcatcctgcccaagtaataaataattttttcatgatctgcggcaaattggcgacgaaaatcttgagcatgaaaatctcggtaatgttgctttttctctgggcgaatcccattaaaaatcacgtcgattttatcaccatgactatttaatgctctgactacttccccccgcatatattcagtacaaacaatgatacgccaagcgttataagctagtaactgttctttaccacaaatatagcgttgggtatcattataaataccgttataacgtccgtattctgtggcgtgaatggtagcaatgagaggaactttaaaagtatgcttgagagcgatcgctgcatctccaactaaccaatcatgggcatgaataagatcaaatggtccttcctctaacatcaatttaccaccgtgatgtcccatactctcatttaaatttactacccagtgaaaaaaatcatgactatgggctactggtactcgatgtacataaataccctcaactacttcatacagtgatgcttgttttacttctggcgtaatcaagtgaatctcatgccctaactttaccaattccgggtataattctgctacatgacgggcaattcctcccactaaccttggcggaaattcccaacttagtaccagtatcttcattgattcgactccccgatatttacaaaacttgaaagaatagaaaaaactaccttgatctcaaaatacgaagtgtgacaattactgcgagtattcctagtaaaattgttatttttttttaataaatagttttttgataaagcttatcatattgatttgcaatttatctctacaaaaaacccgatttcatcaaaaaaccaggttaactttaaatttgcaaatatctagttgactgcggactggggaggtatagtgatccgatttgattcatgaatttttcgtggaggcagggaacagggaacagcgagaaaaatttattctacctcccctgcctcctgcctcctgtcacctcatacattaactttgatctaacttcaacacagccataaacgcttcctggggtacatccaccgtacccacagctttcatccgttttttacccttggcttgtttctgcaaaagtttcttcttccggctgatgtcaccaccgtagcacttagctaaaacgtctttccgcaaagccggaatatgttcactggcaataactttactaccaatagacgcttgaatgggaactttgaattgatgacgtgggatcagttctttgagcttttcagccattgatctgcccacaccataagctttatcccggtggacgatcatcgctaaagaatctacgggatcaccattgatcataatatccaacttcaccaacggattttcccggtagccaatcagatgatattccatactcgcataaccacgagaacgggatttcatttgatcaaaaaagtcggtgacaacttccgccaaaggaatttcataagttagggtagtccgtccctgggtaagatatttcatatctttgaaaataccccggcggttttgtgataactccatcaaagtaccaacgtaggtttcgggagtaatcatttctacctgcacataaggttcttctattctttcccggtcattgggcgcaggtaaatggctaggattatcaatgtacagttcctcacccttgatagtgatcaccttataaaccacagatggggctgtaataattaaatccaggttgtactctcgctctaaccgttcttggacaatttccatgtgtagcaaacccaagaacccacaacggaaaccaaaccccattgcgctagaagtttccggttcatattgcaaagctgcatcattcaaccgcaacttttccaaagcttcccgcaaatcttcaaattgatctgcatctatgggaaacatcccacaaaataccattgggttagcctctgtgtaaccgggtaaaggttctgtggctttagccttagataaggtgatagtgtcacctacccgtgcatcagcaacagctttaatagaggcggctaaataacctacttctcctgcatggagttcttcaacttgtttttgggtgggagaaaggacacctaactcatcaatttcatattccttacccgatgccatcaaatagatgcgatcgcccttcttcactgtcccatccatcacccggaaataaacaattactccccggtagctatcgtagtaactatcaaaaatcagcgcccttaaaggttgatcaaccgtattagctgctgggggtacacgttctacaatcgtttctaaaatctcaggaataccgattccctctttagcagaagctaaaattgccccactgcaatctaaaccaataatttcttcaatttcactaactactctatctggttctgctcctggtaaatcaattttatttaaaactggaataatttccaaattatgctctagtgctaaatacacatttgctaaagtttgggcttctaccccttgggaagcatccacaaccaataaagcaccctcacaagcagccagagaacgggaaacctcataggaaaagtcaacgtgaccaggagtatcaattaagtttaaaacgtactgctgaccatccttagctgtgtaattcatccgggcagcttgcagcttaattgtaatgccgcgctcccgttccagatccatgttatcgagaaactgctccttcatttgtcggtcttctacagtgccagtagcttggagtaagcgatcggctaaagtagatttaccgtgatcaatatgagcaataatacagaaattgcgaatgcgaactgcgggaacgtcagtcatataccatctttgctttagcagcaatcaaaagttaaatctatttacttcatgtattttaatgctttattgggtaaagggaacaggaggcaggagttcaagaagtcaggagttctagcagtcagaggaagttaataactcagtcaccagtcaatggtctccattccccaggcaggtgaattaattttcaagatatgatgacactgtatattaaaactgccacctaaaaactgaatcatctaagtttggtaattttttgggaaaccgtaaacctatgaatacgcaagaaaaccccaccaacggggaaaaaatccatacagacaaggtagaaattgctgttcgcctagactctgaattaatagcccaaattcagcatcttaccaatgaccccagtaaggtgatagaagtcgccatccgccaatggttacgcggcgacataccgagagatgatgaactaactcgcacaccaatacgcacacctattccccctagaggagaatggaatgattgaaatttggggactggggactggggaagaagcaggggagcagggagcagggggaagttatttgtatttttcccaatcaccagtcaccaatcaccagtcaccagtcaccaatgatacaaaatgtaaaatttaacgctccagattccagaaaagtcaaaaatatacagtcaaaagtatgaaagctgtaaaactttatgccaaaatttaagcagctttagtacaaccacggtggaaagcaaattgtctatccaactcgataaatgactattactgcgaataacccattgccaaagctattttctcagaacctggaatctactaaccgcagtacagatggcttattactaactcttgcatctgagttggtatatatccaagatggtactgggcgttatctgacatttgattggcagtacagcgaactcctggatttaatgactgagagaatagttgatgcgcttaatgaaaatgaaatctttaccccagtagataaagttgcctatttggaaggcttgcaaaggattttaacaactttagtcccagagagagttcaatgttggtttaaatgcagtcaatatttattagagttggagttgacaattactccaattatgccgcaactgggtgaagccgcaaccacagttttggttatgggtaggctattaccatctccagtcaatggtaaagaagtgaatcaggcagcaaaaacgccttcacagcttgagttatttttgcattctcggaaagtgccacagttattggtgcaataccaaaaactattaacccaaatcaccagaaatatctggtggacactggatatagatgttatttggcagcaaacagttgacagtttaggacaaactctcaaactggagcgttgtattttctttccttatcagccaggagattcaaaagttagggtaatcgcagaatatcaccaaccagcattcaagcccattttaggctcagaaatagagatatcttctgaacctgcttttgctcaagctttggcaactctagaaccgatggtcatagagatgccgattcaaacaaattctcagcagcacagatttttactttttgctactaactatcaagaccaagcaaatggtttagttgggttaagtttaagcagtgaagaaatattaataacagaaacggaaatagaattaattaaggagttggcagatcaactgggtacagcgatcgctcatgctaccctatacaaagaactagaatacgcaagacaaaacgctgaggaagcatcccggttaaaaagcgaatttctcgctaatgtatcccacgaaattcatacacctttaaatggcatgattggctttttaaagctgattttagaagggatagcagatgatcccgaagaacaaatggaatttgtggatgaagctcttaaattatcactccatctgctaaatcttctcaatgatattttggatattgccaaaatcgaagccgggaaaatggagttagactgctcacctgtcaaacttcaagagctatttagtgatgtagaaaactttacccgtccccaagcggagatgagaaacctcagtttccaaatgcaaatgcctgtcacctctgatgaaattatcgttcaaggtaattaccaaaggttgttacaagttatgctaaatttggtaggcaatgctattaaattcacccatgaaggtggaatcaccatcagcgccgactgggttatcaaaaaaggaaaaggaaaatccagcaaaccacagaatcccggcatggtgaaagttaaagttgcagatactggtattggtgtttccttagacaaacaagataaactgtttcaattattctcccaggtggatggttctcgtactcgtcactacggaggtactggtttaggtttaaccatatcccaaaagcttgtagaagcaatgggtggtgaggtacatttttatagcttaggcgaaggccttggttcaactgtcaccttcacagtcccactttatcaacaaccggtcttgtgttcccctagcgagtgcgagattgaatctcaataattgattggggactggtgattggggaagaaaattttagattttagattttagattttagattggagttaacaaaaacaatccaaaatccttgcatccaaaatccaaaataaaaaactcctgactcctgtacgggcgaagtaggggcgaagtaggggcgaagtaggggcgaagcattcggaaaataaccttttcagaaaattgataatttatcgcccgaatgcttcgcccttacaggaaaataaccttttcagaaaattgataatttatcgcccgaatgcttcgcccttacaggaaaataaccttttcagaaaattgataatttatcgcccgaatgcttcgcccttacaggaaaatagcctgttcagaaaattgataatttgtcgcccgaatgcttcgcccctacgactcctgactcctcgaactcctgactccttgatctcctgcctcctgcctcctgttatattttgggaaatgggtggataatctgcaaatcccactttcaaagccgtccttaactgaacaggtctaaaactatggaattgacacttaaaaacgttgaaactgtcttagatgaaatgcgcccttatctaatgtctgatgggggtaatgtggaactggtagaactcgatggaccagtagtgaaactgcgtttacaaggtgcttgcggttcttgtcctagttcacaaatgactttgagaatgggtattgaacgccgtctcaaagaaatgattcccgaaattgcagaaattgaacaagtcatctaggaatagatgactggtggttggtgattggtgattggtgactggtgattggtgattggtgactggtgattggtgagtgggtaatcaatctttatgtttccctatcaactatcaactatcaactatcaccaattacccattacccattaccattattgataattgaaaattattagtaaatcctgaaaagcatattattgatcatgtctcatcccctttacgtcgcgtttatttggcaccaacatcaaccattgtacaagtctcctgtcagtcagcagtatcgcttaccttgggtgaggttacatggtactaaggattatctagatttaatattattgctggaaaaatacccgaaattacatcaaacggtgaatttagtaccgtctttgattttacagttagaagattatattgcgggaaatgcttttgacccttatttaactgccagtttaacacctgtggaacagttaaccacagaacaaaaagagtttattgttcaacatttttttgatgctaaccatcatactttaattgacccccatccccgttatgcccaattgtattatcaaagacaggaaaagggtcaaggttggtgtttagcaaattggcaagctgtagattatagtgatttattagcttggcataatttagcgtggattgatcctttattttgggatgatccagaaattgcagcttggttaaaacaaggacgtaattttactttaggcgatcgccaacgaatctattctaaacaaaaacaaatcctcagtcgcattattccccaacaccggaaaatgcaggaaactggccagctagaagttaccaccaccccctacactcaccccattttacccctgttagctgataccaactctggacgggtggcagtgccacaaatgacattacctaaccagcgtttccagtgggcggaagatattccccgccatttacaaaaagcctgggatttatataaagataggtttgaacaagcacccagaggtttatggccttcagaacagtccgtcagcccagaaattttaccgtatattattaaacaagggtttaagtggatttgctcagatgaagcggctttaggttggacattgcaacatttctttcatcgggatggggcgggaaatgtacaacaaccagaattattataccgtccctatcgtttgcaaactcccgcaggtgaggtttccattgtattccgggatcatagattatcagatttagtgggttttacttatggtgcaatgcagccaaaacaggcggttgcagacttagtaggacatttacaggcgatcgctagaaaacaaagagaaaacccaacttcacaaccttggttagttaccattgctttggatggggaaaattgctgggaattttatccccaagacggtaaacttttcctagaaacattgtatgaaaacctgagtaatcaagaaaatatcaaactggttactgtttccgaatttctagaaaaataccccgctacagcaactattcccggtgaaaaattacatagcggttcatgggtagatggcagttttacaacttggatcggcgatcctgtaaaaaaccgcgcttgggactatttaacccatgcaagagaaaccttagcaaaacatcccgaagcaaccgaagaaaataaccccgcagcgtgggaagcgttatatgctgctgaaggttctgattggttttggtggtttggagaaggacattcatcaaatcaagatgccatatttgatcaactatttagagaacatttatatggcatttataaagcattaaatgaacccataccagcctatttaacccaacctttagaagtccacgaagccaaattagatcatcgtccagaaagttttattcatcccataattgacggtaaaggagatgaacaagattgggataaagccggcagaatagaagtaggtggttcacggggaacaatgcaccaaagtagtttagtacaacgcattttttacggtgttgatcacctaaatttctatgtgcgagtagactttaaaagcggtgtcacaccaggaaaagaactacccaaagaattaaatttattgtggtattatcccgatagaccaatgatcaatagtcctgcacctttagcagaagttcctgatcttgcaccggttaattatttctttcaccatcatttagaaattaacctaatttcccaaacaatttattttcgagaagcagcagaacattatcaatggcatccccgcgcaactcgcgcccaagttgcgttaaactcttgtttagagatagcagtaccttgggcagatttgcaagttcctcctgactatcctgtaaggttggttttggttttagctgatgatggttgttatcacagttatttaccagaaaattctttaattcccattgaagtaccttaatagtaggttgggttgacgggaggaaacccaacatttttttatctcacgcagagacgcaagaaaggagatcaaggagtcaggagttcaaggagtaggttgggttgacgtgaggaaacccaacaatcagatcatctgcatttatctgtttgcttctgcgtttaatttttgtataaaacaattatcaattatcaattgataaaatcatccgcgtttatctgtgtgcatctgcgtttaaaaaatgggttgtaaatctaaaataaaacctggtaacacatcttccccagataaactttgaggattttctaatatttctactgcttgattttgacgatatatttctacttgtttatctttaggatttaacaaccaacctaaacgcaatccattattaatatattcccgcattttggcttgggtatcagctaaatcgtcactttcagaaactaattcaatcacaaaatcaggacataaaggtaaaaacttttttctttgttctggtgtcagtgcattccatctttctatttttatccaagatacatcaggggaacgagtaccaccaagaggtaatttaaaacctgtggaagaatcaaatgcttttcctaatttatgtgttctgttccaaaaccaaacttgtccagttaattctaagtttctttctcctgtttctcctccggttggtgacataactattaattccccttgatgtgataattctaagcgtaaatctttgttagctgcaactatttctacaaattcatcatctgtgaattttaatgattttgggatttgtaaggttacagaagtcatgattcttacctgttgaatattagatattatatctcagtacgttgggttgacgggaggaaacccaacatcttttatatctcacacagagacgcagagaacgcagaggaagaaaataattcaaaagtagattaagttccgtagtgaggacttcagtcctcaagtaaggaataaattccttactacgaactttgcgtttgcaaaatgggttgtaaattccaaataaaaccttttgagagggaattttaaattttctattgttgaatattttgttgaatattagaaattccaatctctgcgaaaatgcaataaactttgcaaaaactcttgcacaatgtggtttttatttaatttttgtttattccattctcttgcggtttgctgtaatatttctgaaaagctaggatcaacaacagctaaattttctaagttctcaattttcagattttttgacattgctaaagctactaagtttactaattctcccgcttctacaccaaatatagaacatcctaatatttgaccattttctaaaataattaatttacaaatacctgtaatttcatttttaatttgtgctgctgttaaggttttgaaatagttggtaaaaactaaaacttgatttttaccatatcttctttttgcttgtaattctgttaaccctatttgcgctaccattggttgagaagatattatccaaggaatacaacgataattaacttcaagtctgggaaaaaatagagcatttttcacagcaattttagcttcataattggcaatgttggcaatatcataaccacctagaatatcaccacaagcgtaaatgcgatgatttgtggtttggagttttttattcacaactaaacgccttggataccattttactcctgctgctgctaaatttaaattatctatgtttggttgttgtccagttgcaattaaaatttcttcagtttctatagctttatctccagcttgcacccatttttgatcttcaatttttcgtatttgggtgactcttgtttggttaaaaatacgcacaccatcagcttctaattgtgctatcaataattgtcttatttctgggtcaagataagaaaaaacactaggatgatttaatattaaattgatgttgcaaccccaacgagctaaagtttgggcaatttcaatactttggggtaaaccaccaataattacccaattttttggagggtttggtgtttctaaatattgccaaatattcgctaaggtgagataacctatagtgtttaaaccttcaatatcgggaatttttggacgtgaaccgcaagcgagtaaataggtacgggcgcttaaaattctgtcattcactgcaaaactcagcttgggagaagtttgaaatttcccattaccaataattacatcaacaccttgggcagacaaattagcaagagaattaagttggttaatatttgctgcaatactttgagaatacaacatcccttgctggtaagaatagctgcaagtcggttgagggatcggaatttgcgatttttctggtactccagtattgctaattggcttgtttgggtgaaaatctgatttgatgtttttactctcggtcataatgccaagagttttcatatcaacgcactgctgagagattttacttagttcgctgagtgggtaatgataatttaattcatagtgtatttgaggctgtaccaaggcaactttggcttgtagttgggttgcagctaaagccgcttggtatccagtaatactaccaccaataattacaatatcgtagtcaattttcattgggaattgggaattgggaattgggaattgggaattgggaattgggaattgggaattgggaattgggaattgggaattgggttattcatcctcccagtcaccagtcaccagtcaccagtcaccagtcaccagtcaccagtcacctgataactgatttaagggctgttagtaggcgttggttatcagattgggaacggacagcgacacggaaaaagcgatcgcccaactctttaaaactgcgacaatcacgaattaaaatttggtattgctgaagtaatttttcttgtaactgagaagttgaatgttgagactctaccaagaggtagttaacagcgccttctagaggtcttaatccgttaattgccgataaaccctgaaataattgatttcgtgcctgtggcagccatttccaggtctgttgttgaaagtctgtatcttggagtgcggcgatcgcagcagcagcagctaaggtattgacaggccagggatctcgccatgattgccattttctgagcaagtccgggtgagcgatcgcatatcctaaccttaacccaggtagactgtaaaacttggtgagcgatcgcaatatcaccaaattctcatattcctgtaccaatccgatcaaactttgttcctgatcaggaggcagaaaatccataaacgcctcatccaccaccaccaaagcaaaatctttcaggtaaggcaaaatatcatcccgtaaaaatagcttacccgttgggttatgtggattatttagcagcaacccatactcctgagatggggagatagggagatggggaggtagggggagaatattaacttttgcctcctgccttctgcctcctgcctcctgcctcctgccttctgcctccaaatcaataggaaactccagcactttagcattataagccgctagggtgcggtaataatcgccaaaggctggagtcattaacattgttgccgctaattgtcctaattccctacctagtaaagtcagtaattctgctgaaccatttcccggcagaatccactcaggtggtaattgatgaaagtgacccagagctagtttgagttcgctgtaatctgggtcaggatagtgtttaagattaccaaattgggaagcgatcgcagcaataacgctgtttggtggtcccaacgggctgatactggcagaaaaatcgacaatagcatccggggaacagccagctaacgccgctgcccaagctaaatttcccccgtgtgcctgttgtcgcatcaaaaatagacttcctagaacagaacctactcttttgggggtgctactctttctctaaagagtttcccagccgagaaagcaggaactttggtagctggaatttccattttttcattggttttggggttgcggccttcacgagctttccgttcccgtgattcaaaagaaccaaatcccaccagggtgactttatcgcctgaagccacagcctcaataattgtctcaatagcagcagttaacaccgcatccgcttgtttctttgtcacactggctttttccgccactgcatcaactaattcgcctttgttcatatcaaactccttgaggtttaattgagatttagtcaagatgtactttgtcggatctttacggaaatctctgttggcagcattacaaaaatcgtcccttgagagtatttacactcaaaacccctgtaaatcagattggctcgacttttcaatgaatcattctaaggtgttgtagccagaagtgcataggtgaaagcattaatttatatagatttcagaatttattgtgttttttgctgcatagttgccctggaaacaccgaatttttaggaataaatgcttactggggactgggtacagcaattttcgagagcatccaaattttgaaaaaatcaactcagcaataccaaaaaccctcttaaaccctcttaactttgtgtcctttgcgttctttgcggttcattcatattaggactttgtagcaattcaaagattcccaaaaaatcaaattacacatttgggatgctccccaattgtcaggtaaataaaacacaaaacaaagtttaaaagccttatagagacgttgcatgaaccatttatgcttattaaaggttcgtcacaatatcttttaaaggcaacattaatgttaaaggttctatcggtgagggcttaaacttatgttttagataaaattgtttagctgcttcatctttcgcatgaactaaaatacatcgtatgccgacaattttggatgcttgtaaaacccgaaaaattgcatctcttaataaaccagatccgataccctgcccttcccattgttcatcagcagctaacctaccaacgatcatacaaggaactggatctggtgcattttgcttgacttttctaatagccactgagtgatatacaccagcacttgccaaacagtaataaccgattactttgttttcacaaattactacataagttctagcagtatcaccctcatttttaaatgctttttccttcaaccaattatttaaagtttctgactttgatttgaattgtgatatatcatggctagaattaattggttgaggagcttctattattttcctctgatccattcttaatcccaaggtgatttagcagctaaaaacttacgtagttcctcgtctgcttgaggtggtgcatctaaaatatcaataaattcttgatattttttttcatctaaagcaaaaaaagtttgatcacaaattactttttctgcttctctacaagcgacatctagcatgaaatcagaacgagttttaccaagaattgatgcagcataatcaattaaattacgctgtttttcttgaactctaatattaataacctgattgcgtccaggattatccatttcaaaggaagctaccattttcgtttcctgaattttaataactccattacgtctactataaataatcgtgtacacaatgtcaatacattgttattaggacttacgcaagattagactaaagacctgatttttgcgtaagactggatacaatactgttcggttaaggatttttgtaggttgggtggaacgaagtgaaacccaacaaacccttgtaaatgttgggtttcgttcctcaacccaacctacgttatttcgttgttttgggcttaaccgaaaagtattgggactggataaagtttgatcttagcaacgctgcttctctcattgattctgctatatattagttattcaaacccaatactaaattatgactaaagaattattagtgcaagaaatagagtccttaccaccagaattgctaactgaagcattagattttattcgctttataaaagccagtcattcacaaaagcagttgaacaaggaaacaaatttaagcgaagatacattgaagggttcaacagccgaagatttacttgagtttgcgggttcttggtcaggagatgatattcgagaatgcttgcaacttgtccataatacccgtatgccgttgcaaatataaatcattttttcagcgacgttttacccgttctgtaattgctagaaaccaaatcaacttactcatttatgagccaaaacaggagataattgtcaaatggcagtagaagagtatcgtcaaatagttaagaatctaattttagaaaaagctcaaagacgatttacaccggaagaaatagaagtccaagcggttatagatacccaaaacgaccactatcttctgttacatactggttggcgtggtaataatcgcactcatggttgtagtatccatattgacattaaaaacggtaaaatctggatacagcatgatggaactgaagtaggaattgctacacttctacttgaacaaggcgtacccaaagaagatatagtcctgggttttcattctccagaaatgcgcgaatttacagaatttgctatccattaaagacacctgaaatacccgaatcatccaacaatccgggtatttgcacagtctaccgattaccaggaactctcaacccccgacgctcaagcatctcccgcacctggggactaggattgtagttataaccatagctagaacgctccgagtcatccattacctgtggtgtgagtaatacaattacctctctacgttcattctctctatttgttcttctaaacaatgaaccaagaaggggaatatcacccaaaataggcagcttggttacagttgtccgatctgagtcttgaatgatacctgataaaatcagagtttgaccatctcgcaagcgtaataaaccagattgaagacttcttcctgtaatcaagccgatagtaccatcaaccgtacttgctgaaccaccaggcgcagatacagtaggtgctacagacaaggacacaaaaccattatcatcaattctttcaactcttactgccagagttaaccctgcttccttgatgatcggttctctcagtgtgtcggtgactctaataccgccgtatacctcctgagttaacttaactaccgcatcctgtccttcttggacaattaaggtgggatctgtcaaaatcttggcattaccactttgcacttgagcttgcaagctggctaggaaacgtttaggaaactgatacagagaaggtaaagcagatgttgctgttcctggatttcctggtgtgtaggtggtaactgttctggccggagtaccaggaacagcaggaacaatcagattaccctggttatcataaacagcaggagtaccaggaacggcaggaatatttgtaatagtagttatatctggtgttcctctagtaaagtctgtcaaaccagcttggaatggatcttgtgaaacgcctgctcggcggttaaagaatgatgctgcccctccttcaatattagagttgagtgcaccgtccacaattcttctattgcctatcccagtacccggaatagtagtgctgttatttaaatcaagaaaagtattagcacctctaaaagggttctgaatcacaggcgtttcacggatgctatttgcaacttcactactggtagcaggtcgagaaccaccaaaattaaaagttgccgcaccaccgtcactagcaaagtagttattaccaatcccaaaggaaaagctgctgttatagtcctgaatacccaaaaggttaacatcaataattttgacattaaccacaacctgccgacgacggatatcaagcttggttaattgagacactgccatatcaactaacttgggagaaccaattaaagtgacagaatttgtccgttcgtctcctgaagcctgtaaacctctcagtaaaggtgttgaatctttatactcaactcgttgagtttcaatttttgtttctgtagtggtctgagtttgggtaattgcgtcggcattagcagcaccacctacaggtacagcattcacgctggttaccaatctttcacggcttacagcactttccgcacccaaagctaccaaaaagtttaaagccacacccacagttacctgattgagtcgcaaactccgcatcactgtatcacgggtagaattaggcaatttagccccgacaaaaattgtcctcccactgcgattagcttctaaaccactcaagcgcaaaacgtaattaaatacatcctgcaccggttcattttctatatctaaagaaattgtttggctaatggtttggccttcggtgggtgctgatccttctgctcccacataagccaggttaagtccagcagcacgagccaatagtgataaaacttccctcactggtgcatctcgcaacaccaaacgcggtactcgttcctgtgttcctaaatcaatcacagtaggagatgtatcaatattagatactgtaatatcacctactggtggggcaacggctctaggtaaaaagggaggtgctaggttataaggttgatttggtcctgctggttgtgcctttttaccatcaattgttatttctgggttaggtactaacacatcaggctgtttactaaactctacagcaccaccagggggagttggaggtgctgatgctgtggtgtttgtattcggtgtggttggggttgtgtttggtgtgggtgctgctgctgtcgcgtctcctgtggtagtaaaaccaagagttagattgttattttcacggactactggtttaccagcaggagcattattaatacccatgacggtaacacggacactattagcatctaactgattaacttctacagatgctattcccggtgctgggttttcttgacggaaactcttgccttgcggtaaacgcagttgcgtattaataatatctgcaactaaggctttatctcttttagtggtgaaaatctggggtttatttccagaagaagtctttaaaatgacactaattcccccatcaacgggattgagtttcacttctgtaatttgagtggtctgtgccaaaacaggttgtgctgctaaaaccacacaagcagccgcgctagaaattaaaacattactatgaacttgtttcacagttcattcctcaccttaaataaaaaccagtctgtatatctacttgttaatcggctatcttaaagtaacccattgtacattgaattggcattcaagttacaactcagcactcaggacttttgcgggttacttctggggtggtggtgcggcttttgctgctgcttttgcctgttcttcagcagttaatggcattaataccactaagtcaaaggaagtagaaattttgccgactcctgttcgcactcctttttgcttatcatctgtatcttctttttctggtggtactaatttagaatcataattttgcacgagtaataaaggctgtaatcgctcaatattacgaatgattgcctgagtttgttcaaaattgccttctatttctactttgataatttgccgtttgagtttgttgttaactttttctcccaaactgttatcaataattatttctggtttttctcctgctggtgcaaactttttgagttgggctttaatggcattactgcccatagctgtagcattactggaatctaccaaacgactggtatccaaaagtaatgtatccaaactcttttcattagcaaataaagctaaaacttgggtttgttgttgcttagactgagctaattctcctagtaacttatctgcttgtttagcttggagatttttttgctcaacttgtccttgtaagtccttacttttggtttgcaagtcttggaagttggtaaactctggcataaccatgtttagtatcatataaacagcgcctagcaagcccatagcaccaactaccccaccagttactttgggtgtaaaagtaacaccaaaggcaacaggataggaagatccagcctcatcaaaattggcgtttttagaaaaatttaaatcatcactgactgtcatttaatggctcctgttttttgcaagttacggattctttcaactaatccgactgtacctttttgttctaaatcacggattaattgtgatgcaggtacagcacttaaactagctttaatagtgtatttaactacttgaggaggtttaaatttcgtttcggttttcgtctcaggtggaacagcaccagtgatctcaggtgcatcaactaattccgctgtactaattttgctttcttcggggttaaataacttggatttgcccataattaacagaaagtcattgacatcagcaaaagaacgggcataacctgtaatttctaattctccggcattgttactgtcgtcttcactgttcttggctttgatcacaggtggaatttgtttaatggtttccaactgtacattggcgggaatgcgatcgcgtaaatcctgtaacattgctgaccaaggacgaatctgatcaaatactgtgactaaagcttgtgtttgttcttgtatgccttttgtttcctccttaattttctgaatatcggctaattttacatctaggtttttgctttcctcctctagtttgacaatttgttgtcctaatcctgcattttgggcttgtaaaaacaacaaaacaccaaacaccaaagctggaatagacaaacccacaccgactcccaataaagctggtgtatattcggtgatatcagcttttggtctaacaggtttattattatccaactcagcaggtgagcgatctttgagaaaattaatatctaggctgtacatttttttatgcctcccgcattcctaaaccaagaactatccccaaaccagggcgttgcactgggggatatttatcttcttctacttccaaagataaatctctgatcggatctatttgagtagtaggaaaacctaatctttgagtaaaaaattcatccagttgttgcaatcctcctcccataccagctagtaaaatctgtgcaacttctaaaccctcactctgattgatataaaaatctatagaacgacgtaattcatcagctaattctcctagtatttttaacatcggactcataccaggattagcaccagtcagcccggttctagctacatccaaaggatttgcgggaatagtcatatccatcaacatatccatctcccgtgatatcggcaaattcattgccctagataaagccgcttgcagttgatatgtacctataggcacagtacgagaaaattgtggtactccattgataatgatggcaatttctgtactatcaaattcaatatcaactaaaactgctgcttcttggggtccgaatagtcgcaactgatcccgaatagttctaatcagagcaaaactgttaatctctaaaacatcaactgctaatccagcttcggcaaaagtattaatataggtatctgtcacttctttacgagtggcaaccaaaagcacttgtactttttcaatgccatcctcgtctacaacataccccaatttttgataatctacatcagcttcttctcgtggatagggtaaatacaatgctgcttcatggttaagcaccatttcccgcaactctttatcatccaactcggctggtacaggaatcacacgcacaatagcatcttttccgggaatacaagtagcaacacgggaagcttggattttgctttcagctattgcctgttggataatttccgccatccggggagaatcgttaatcttaccatctataattactccttctgggacagggtaagttgacaaagattctatttttaagccttggcgctgcttacgcatttgaactatgttcattcgatctggtgctagttcaataccaacacctttgttggatttaccaaggagattaccaagattactcaagatgctaaccacagttttacctgctagattgctagatggaaaatttatgataaggagtcaggagtcgtaggggcgaagcattcgggcgaccaattatcaattttatgaaaaggctattttcctgtaagggcgaagcattcgggcgataaattatcaattttgatcacaggttattttccgaatgcttcgcccctacttcgcccgtacaggagtcaggagttatttattttggattttggatgcaagaattttggattgtttttgttaactccaatctaaaatctaaaatctaaaatctaaaattttctttcccagtccccaatcaccaatcaccaatcaccctcgttaatcgtaaaaatattaccacgatgatcagattgcaaaaattacaaaaactaactgtttgggttttgtttggcttattagctagttgggtggtcagttgcagcacgggtaatgtgagtacaactacaaaacctgctgcttcaggagtcgccaccattgagttttggacgatgcaactccaaccccaatttaccaactacttccaaagtctgatttcgacttttgaatcccaaaaccccagtatcaaagtcaaatgggtggatgttccttgggctgcaatggagaacaagattttaacatctgtctccgcaaaaacgcccccagatgttgttaaccttaacccagattttgcttcccaactagcaggaagaaatgcctggttagatttggatgcaaagatccctagtgaagtccgttcttcctatttgcccaatatttggcaagctagtaccctcaatggtaaaagttttgggattccctggtatctgactacgaggttaactatttataacactgatttgctcaaacaagcaggtatcacaaaaccacctgcaacttatacagaattagcacaagcggcgcaacaaattaaagataaaactggtaaatacgccttttttgctacttttgtacctcaagattctggtgaggttttggaatcttttgtgcaaatgggtgtgactttggtaaatgctgagggtaaggcggcttttaacacaccacaaggaaaagcagcttttcagtattgggtagatttatatcagaaaggattactacctaaagaatcattgactcaaggccatcgtcatgctattgatttataccaatctggagaaacggcgtttttagcttctggtcctgagtttttgaagactatttctaataatgccccagaaattgctaaagcttcggcgatcgcacctcaaataaccggtgatacaggtaagaaaaatgtggctgtaatgaatattgtcatcccccgtgctaccaaaaatcctgatgcagcagtgaaatttgctttatttgtcaccaatgacgaaaatcaattagcttttgctaaagctgcaaatgttttaccatcaacagtcaaagctttatcagatagttattttcaggaagttccggctaatgcttctactgtggaaaaagccagaattatcagtgctgaacaaatgcaaaaagcagaagttttaactcccaaaatgaaggattttaaattgttgcaaaaggcaatttatgaaaatctccaagcggcaatgttaaaacaaaaaacagttgatcaagctgtcacagatgcagcacaacaatgggataataggtaattgacaattgacaattgacaattgataattatgaattacctagaaaatagccgatgagataaagagaaccacataaaataaccaggttttctgaagaggtgaaagcagcatctaaagccaaaaatacatcttcatagatgctgcaaaaacctaaatctggacaaatttctaaagctaatttttttaaatcttctaaatttgcataattactatcaggcacaggtactaaatataatttatctcctgtttttaacaactcttgaaaaatatcaccatgatcttttgtcgctaacattcccattacccaagttatagaattatactcccctccctgcttgcggggtggggtaagactatctacataatttctcaaaactgctgctgatcctgggttatgtgcgccatctattaataattgataatcgtgattattctgtttattcttccaggtaaaccattgcattcttcctggccatttggttttttctatcccattaataattgcttgttcagaaatctcccatccttgttgttgtaatatttctaaagcggctaatgctaaggcagaatttgttaattgaatttgcccttttaatggtaatttatatttaattgatcctgaattttcaattgtctgatattctgcccatccaggattaatttctactgctggttgcggggtaaaaatcggacttcgtaattctaaactgcgggatattactactttttcggcatcttctggtaaaggtcccataattacaggacatccagctttaattatccccgctttctctctggcaatatcagatattgtgggtcctaattgttgccaatgttctctactaatagaagttattactgttactaaaggcttttcgcaaacattagtcgcatctaaacgaccacctaatcccacttctaccacggctatatcaactttttgctgtgcaaaatataaccaagcggctgcggtaattacttcaaattgggtcggtgattctccatttttatctattgcttcttgaacttgctgtattaattgaaacagattttctgaagtgatgggttgttcattaatacaaatgcgctcatgccaatctattaaatgaggtgaagtatatcttcctgtgcgataacctgcttcagtgagaacagatgatagataagcgcaaacagaacctttaccattagttccagcaacatgaatcactggtactttttgatggggattgtcaagatttgccaataatttgacaatgcgggagagtcccaggttaacgccaaagtgttgaaagggttgcagtagggagttgatgttcacagaattggtaattggtaattggtgattggtaattggtaattggtaattggagaactatcacccattacctattacccattacccattacctaaattatgcttctttatttaaaaagttttgcacttgtctgattgcagcagcaccgatattaaaagcagcccaacctgctgcaatggctaatggtgctaaaacgatgactacacgggtatcaatgtccatatttagaaacctctgttatctagaaattaaagttttgtcaacagatatcaatttttatttttatctgaagtcgggtatttttccaaggggcattgtcaagaatgttgaagttggtgactggggactggggactggggactggtgattgggaataatattacctaaaaccaatatcatcccccttaccggcgtgaacgagggctaatttgtggtacttttgggtgtgttctatgagttcggcagcttcggtttctgtgagttgacggacgactttagcggggatgccaactactagggaaaatgggggtatgtctttggtaacaactgcaccagcgccaatgatgctactatggccaacgcggactccatttaaaattatcgcgccgatgccaattaaactcccccgttcaatatgggcagaatgtaccacggcacgatgtcctatagtaacatgatcttctaagatggtgggcagaccaggatcaccatgtaaaatggctccatcctgtatgtttgtgcattcgccgatttcaatgcgttctacatcccccctcactactgcaccataccagatgcttgcccctgctgcgatcttgactgatccgacaacaacggcgttggttgcgataaaggcagcttgagaaaaatcgggagatgtccaataggaaacagtagacacgatagaatattgatatggtacccaggaacactggaaaaactccaacctttgaggctggttgcacaaccaggataccacagccgtttggtctgtacgctaaggaaaaaactgctgagatttgcttttgcggcaactcactcaaagtagtagagccgaagtgttaaatccaacctattggtgctggtaaaaagaaaactatgcttgtacacacttcatgatgaatccaggcttacagtacccaatatttggacctgaaatacagtgtccacactgtcgccagactattccggcgctgacgttgactgatacttatttatgtacgcgtcatggcgcttttgaagcgaacccgaaaacggaagagttggtacatctccagtcgggtcgtcattggcggaggtggaataatgaatggtatcgacaacatactcatcctgatggcattcgctttgaaattcacgaggctttagataagctatatactcaaggttatcgggctacaagggtaattattgcccgtcgctatcaagagttaatgagtggttatttagaacgcagcagtccttggcgttctggacaaccggaagctggtactgctcgtttatatggtttaccagtggagtttggacctgatcccgctgaagatccatcttgggatgtgattaattttgatctggataaagaacctggtgtacctgtgcgctatccttatttccggttgtttgagtagatattagtggtaattggtaattggtaattggtaattggtaagcatatttatcttcttattatctcttgccttttgccttttgccctttgctttgctactaagcttttaccagcagatttatttatatttatataaaatctaaaatctaaaatctaaaatctaaaatctaaaattccatgcaccatgcttctattagaactgcgaatattcaccgggcgatcgcattttatgaacagttaggatttacggttgctgatcgctttactaccggttatactttagcttgctggatggaaggattagatagccgcattgaactgatccagatcccgcagccgaaacccgcccctgatgcttttgcagatgagcattatgtgggttattatcatctttcttttgatttaacccaaaccgtaccagatttatatacttggttgttagacttaaaagcgaaaatctctgctgtatctgagttgtcgcctctccaagttcttttagaaccaactcagcagcaaataggcgatctcattttagaagtcactttcattgctgacactgacggtttacctttggagtttattcggtttttggggaataggtgactggggactggggactggtgactggtgactggtgactggtgactggtgacagtaagaaggcaatagggaacaggtaatatttatctttttcctgcctcctgaactccttcccaaaattttccagaaactttcaactcgaactgtataggtaaaaagatgtagtcttatttacttatattcaaaaaatctatgcttgtaatttctagcttccatcgctatcgtgtaccgctactattattccttttatccttgatatcagcctttttgctgagatacttgttttctggaaatctcaattttattcaactcaactgggaacattatcagcaaatatccgtagacgcaaacaaaaataatctgacagtgacaaacaatgttcaaaagactgttctggataatggtttaactgttctcactaaagaagttcataatgcaccagttgttacggtgcaaatgtggtacaatataggttcggctaaggaagctcctggcatcaatggtattgctcaccagttagaacacataatgtttaaaggcacaaaaaaccgtccggtgcagtttggacagttatttagtgctttgggtagtgactctaatgcttttaccagttttgagcaaacagcatattaccatactgcggaacgcgataagctgaaagcactgctggaactggaagcagacagaatggaaaatttactcattgataaccaacacctagaaagtgaaaagcgggttgttatttctgagttacaaggtgatgaaaatagtcctaaataccgcctcaagcgtgctgtgatacagtctgtatttcctgatcatggttatggtttacctcctgcgggtactgtggctgatgtggaaaggttgacagttgagcaggtgagggattattatgataaatactatcacccaaataatgctatcttagtaattgtgggcgatttcccaactgcaagggttttggaaacagttaaggaaatatttggaaaaattcccaaaagtcaacgacttccccaactccctaaacccccaactccccaagtaccaacttctcctatagttttacaagaacctggtgcgggaaagtttttacagataatttatccacttccccatttaaatgatcccgatattccagttttgggagtaatggattatattttgacggggggaaaaaattcttatttgtatcaggctttggtaaaatctggtttagcaactgatatttctgctcatgttgtcagtttgcgagcaattggctggtatgatttatctgttactgttgcacctaaccaaaatttacaaaaaattgatgcagctaataaaaacgcaataacgaaacttgtcaaaactggtgtaacattagaggaagttgaacgcgctaaaaatcaacttatagcaaatgtaattttaaacagacgtgatatcaccagtcaaggaaagcagtttgctaacgatctgcttattgctaatgattatagatatacagaacgatatatagaaaatgtccgcaaagtcaaaccagcggatgtgatagctgtaattaataagtatctcaaaccagaagcagcagcagttggtttttttgtacctgtgcaaaatgcccaagatgaaaattatcaaacttctgaattttccacagcagaaaatttaactactggtgtgaaaataactgcatctgaggtgatgaagtatttaccagctacagatgaaaagattgataattttaatcattcaattccacacataccacaacgcttaacgtttgtcaatgggttgcgggtgttgttattaccagacaagagtagtccgacagtgacgttaggtggatatattaaagcaggaaaggaatttgaacaagctgatctagccggtttagcgtctttagtggcggataatttgttaaatgggacgaaaaccaaagatacattaactattgcagatattttagatcgtaggggagcgagtttagattttaccacattgcgggaaggtgtgcggattcagggtaaaagtttacaggaagacttaccagttttgctggagactttagctgatgtcgttaaaaatagcacttttcctgaaaaagagttagaaattagtcgtcaacaagctgtaaatgacttaaagttagaactggatgatgcttatgaaatagcaaaccggaaatttatgcaagcattatatccgcaaaatcatccattacacattttcccaactttagaaagtatacaaaaaatttcccggaaagatgtgatggcgtttcgacaaaaacattatcgcccagatacgatgattttagtattggtgggtgattttgaaattgaaaaagtgcgatcgctcttagaaactcaatttggtaattggcgagttcagggaaaaccaccgatggtagaatatcccctggtggtaaaaacggaacgtggtttacagattaattcagtgttacccggaaagtcgcaaactatcacctatatgggggatctgggtgtcaaacgtcaagatccgagattttattcagctttggttttgaatgaaattttggcaggaaacagcgtatctggtagacttggttcagaagtgcgcgatcgcttaggtttgacttatggaatttatagtaatttccaagggggaaaaaatgctggaacatttttaattgaaatgcaaacaagtcctgaagatacaaataaggcgatcgcaactactcgcaaaatcttacaacaaataaatcagcaaggtgtcaccccagaagaagtagaaaccgcaaaacgcactttgattagtaactataatatttcactgtctaaaccagagcagttaaccgctagaattttaatgaacgaggtttttggactggatgggatagaattacagggttttgcagaaaaaatccaaaaagtcaccaaaaacgaagttgatcaatttgcgcgtcagcaactcgatcctgataaattggtagtagttactgctggacctgcaataatagcagataattctattaagtgacaaaacgtatgtagtcaggactttagtcctcatgctaatttagattttgagcgacttatcgctcactaggaactttgattatgtatacctattttgtaaagcaaattactaaacgtctatattcagtcttttgtttattgacacttctgatttgtctgagtttcacaaatacaaatttagcgatcgcagaaaacttaaacaattcctctgttgatatactcaaacaaccaccgtccgaaattactgtcagcctgggaaatgctgcgggtgagttgaaatttgaacctaattttttagaatttcaatcaggaaaacggtacaagctagttttaactaaccctagccccgtcaagcattattttacaagtaaagatttcgctgatgctatttggacccaaaaggtagaagcgggaaatgtggaaattaaaggtaacatccacgaattagaactcaaacccggtgcagaagcagaatgggtgtttgttcctctcaaaaccggaaaatataatttacgttgtaccatccccggacatttagaagcaggtatgaaaggagaaatattgatactccccacggctaaaagccgggggattcttgaatagtccacaaacgaaccttcaacggtgctatcaaagacaccctactgattccactgaggtctagacctagttttatcgctactttaactaaaatattagctgctccgctagcatcagcatttaataaaatattggatgaattattctatacaattttgaatgtggctaaagccaatcaatcgctttaatgcgactaaagtccctatcgacttatccccatgtctaaaagcctggggcttgcgtctcgtttcagggtcaaaaaacgattttttttacatctcagcagagttcagaaatttcctcaattctcgtatagctgcacttgtattgcggttataggcagtttgtaaactctgttcaacaatctcatgtatatcaaaattagggaaatagtggctgtagctttgaagtaaatagctgttttgctgaagttgataaattaacagttgcttttgtttatacagccaaatttctggaacttgataaggtagataatcgttgatatcagtataactggtaacgtcaatttctagaactaaatcaggtggtggatcaactgtccaaataatccgatttttgccagatatagcctgccagttatcaatataaaaacaataatctggttctattccactttcttcgggaagttccatcgttatgggggtaaaagcatcaaattctcactgaacataatcgagtagagtagtaattatactggtgataatatgagcatcttgtccatgttttggcaaaggtgacatgattattacttccccatttcgatattttagtcgtggaattgtgcgatcgccccgttgttgacataaagtttgatactcttcccatgttccaggtatccgcaccacagcaccggcaggaatttgggttttttctggtgatatcagcgcaaacataacttaacttatacatcagtaaataattatagttttattttatagttttattttagagaatattagcaacaagcttgtaattgtaatagtttatcaacatcctgtacatccgcaaatcctggacatcctgattcagacaataaaaaacgcaccttgctaaaaaagccaaagtgcgatcgctattaccagaaaaatcaaaatcctgaaaatcctcaaatcctggatatcctgattctgacaaattccatcaatcaactatcacctatcaccttgacattttctctacaattttcctcacttcatcaatacttaaattcaaaacctgagcaatttcttcctgacttaaacctaatcctaccaaaccaggaacagcttctaatttagcttcgagttttccttgttctaaaccttgttctaaaccttgttctaaaccttcctctaaaccttcctcacgtgcttcttgataaaatctagtttgttttaaatcactgagtccaaacattgattctatttcctccctattcattcttggcagtttgtagattagaattgtctcgatgatgtctaatatttgttgttgttgtgtttgagactttacttcttgtttggtacggttaattaactccctagcttgggtgatagctttttcttcattggtaatgattagtttaattgtagcaatcccaatgggtaatgatgttgtttcttctatttcatctaaataaattactctcactctttgactcaggaaaaattcttcatagtcctgaatattaccttcatctatagcacgactaggatatattactactcctttccagccgcaattaggtttattttggcgtacatataaacatatttctgcaaataacctattgtacaggtcttcatctggctgaaattgcacttctaggaagtagatgggatttgctgtagtttcttgaggtaggaagactccatctattctaaaagctgtttgcttgacttcaatagatgaaaactcataactttcggctagttcgggagattgacctataagttcaaaaaaaatacttggtatttcttgaaataagcggtagaatatagtatctgttttcattaatttaatattaatactcctggtcggtattttaccgcccttttttttattttatcatgattaaatatactgaataaacatcgtgaacatccttaaatcctggacatcctgattcagacaattatcaaaaaaaataaacgcaccttgcctaaatagccaaagtgcgatcgcaaaaatcttttgatatctaaaattaatcaacgcaaaatggcagacatcaacagacaatgaaaacaaaatgacgaaaaagacattaacgcctcctgcctcctgccttctacctcctgcctcatgccattacacatcctgttcactcaactcacgagtgatgtgatcaaaaggttcatccacaaaagcagtattaggcacaccagcagccgctacctgctccttaacaatatccttcataatttgcacaccgcgcactgtgggagcaataggaacacccaaagaattataagtttcccgtaaaccttgcaaaacacgctcatccaacacattcatgttagcagccaccagcgcgtaagtagcataacgtaggtaataatccatatcacgcaaacaagcagcataacggcgagttgtataagcattaccaccaggacgaattaattcgggtaattcctcaaacaacttagaaccagcttgtttcacaatagctgctgcattagcattaatcgctgctgctgcttgtactctagctgtaccagttgcaaaataagacgtaagactatcaatcgcattccggtcaaaatattttccggctacgtcataattcttaattaaagttgtaactgcatcgcgcattctgtatttctcccaatcgtgactatgctatggtttgatattaatttggttgcactcttgtacctgtaaaattttgtgccatagccataaaatagttgtggcacaaaagtattcatccattacataagaattttaagccaaagttgaccccgataagatgaagtttcttgttttgtgcagatttagcaagaaaggttaacataacctataaactagacaatctgtaacaaaaaatacataattatcttatctctactctttacgatatctaaggtggtgtgtcaaaacttgggttaattcacccggtctactagccaattatggtagtaaattggttactatggatatattttatcccagtaaagacgtgatacataacgtctatacacttagttgtagtaagcaaaaattatgactgtcatggtctggctacaactaatttcagaaaaaagcggttaaattgaccgtgttcacctgtggactaaatagttccaacacttttaggatgaaacaggaagaaaaagctggctttcgttagtaatagttagcttttttatatcagttaagatgctttggcagaaactgattttattttagacaattggctacagaaggagtaacaatgacaacgccacaagaagtcttgaaaatgattcgggaccaaaacattcagatgatcgatctgaagtttattgatacaccaggaacttggcagcatctcacggtttaccataaccaaattgacgaaagttcatttactgacggtgtacctttcgatggttctagtatccggggttggaagggtatcgaagaatctgacatgacaatggtgttagatcccaacacagcttggatcgaccctttcatggcagaaccaactctaagtattatttgtagcattaaagaaccacgcacaggggaatggtataaccgttgtccccgtgtgattgcccagaaagcagtagactatcttgcttctacaggtcttggtgacactgcctttttcggtccagaagcggaatttttcatctttgatgatgtccgctatgaccaaaccgctaacgaaggctactatcatgtagattctgtagaaggtcgttggaacacaggtagaaagggtaaaaatggtgaagtagatggtcctaacctgggttacaaaacccgtttcaaagaaggttatttcccagttccccccacagacaccttccaagacatcagaacagaaatgttgttgacaatggctaaatgtggcgtacccattgaaaaacaacaccatgaagtagctactggtggtcagtgtgaacttggtttccgcttcggtaagctgatcgaagctgctgactggttaatgacttacaaatacgtcatcaaaaacgtggcgagaaaatacggtaaaaccgttaccttcatgcctaaacctatttttggtgataacggttctggtatgcactgtcaccagtccatttggaataatggtcaacccctctttgctggtgacaagtacgcaggtatgagcgaaatgggtctttactacatcggtggtatcctcaagcacgctcctgctttattggctattactaaccccactacaaactcttacaaacgtcttgtacctggttatgaagcacctgttaacttggcttactcccaaggaaaccgttctgcttctgtacgtattcctttaactggtaataaccccaaagctaaacggttagagttccgctgtcctgatgctacttctaacccatacttagcttttgcagctatgctttgcgctggtattgatggtattaagaacaaaatccatcccggtgaacctttagacagaaatatctatgaactgtctcctgaagaactagctaagattccttctactcctggttctttggaattagctttggaagcattggaaaatgaccacgctttcttaactgaaactggtgtattctcagaagacttcatccaaaactggattgactacaagcttgctaacgaagttaagcaaatgcagttgcgtcctcatccctacgaattcttcttatattacgattgctaattgcaagccgtatagcggttttcgttgtgatatcaaacgcaaaaggagtacaacctacttgtaccccttatcaatttttagccacctctgagggtggcttttttattcttcaatttcatagcctgtctgttttagtgccttcgccaaaatattgattgcagcgtcacgacaattttcaacacctatctactcaaatcaagactgttagctgctatataaaacctagacaaagctagactttactttctacttcaacgggggagcagttatccctcagtagacttgcacgccttagccagacgcgatatttctcaagttaagatttacaagaaagactaccgctatcattgcttggttttcgcattggcaatagtcttaattcaatacttgatatcgcaggattatatatcaagtgggcgtttttttaactcacttatgtcaatgcttgtcaacataagtatagttttgtctataaaatagtcagcttaggactagctcatcgctgcattactccggctataaagtgtttgtgtagtaggatctaccttcccttgaatgggattccaataatgacatagttcttcaggaagaccgagttcttgggtagcacgcatcagcatggattgttgacggttcttaacttgctgatgttgacgtaccattaacgcgcgggatttctcttgaatagacatatttttgtcctctctagtttttagtaatagatgttttagatgattaactgctatataaaacctagacaaagctagactttactttctacttcaacgggagcatgggagcagttatccctcagtagacttgcacgccttagccagacgcgatatttctcaagttgagatttacaagaaagactaccgctatcattgcttggttttcgcattggcaatagtcttaattcaatacttgatatcgcaggattatatatcaagtatcaagtgggcgatttttttaactcacttatgtcaatgcttgtcaacataagtatagttttgtctataaaatagtcagcttaggactagctctttttttgcctcacatatttatagtaccaaaaattctgtaacttacaatactgaatcaagtttttgttacaaaaatttataaatgaggcgatcactgttgcggaaaattaataaaaccaaaggctgtaatcattccctagcaagatgtttaagcctttaatttgataaatgcctctgaacattttgatcagcagaaaatgagtatttatgctaggttcagtgggaaaactggcaattgagaacagacaataacagacaatttaggttctgtttaaattctgtctacttgttgccatcaacctacctccatgagaaaaaagactttatttttcacatttctttacataaaataattaaagtccacaaaacttaatggattatttatgtataaaaacttgacaaagctaacttatgagagtctgcaacacagcaaaaactactttagcttgggtcataaactcctaagtacacaattaaaaaatgtagtttaccccacagtaggacgggtgaaaccagcatctccagaggcgatcgccaaattacaaaacaggttaaaccagctactagaagcagattggcaagatagccaaaaagggatatatcctgaaagtgtgttgtttgatcatcagtgggcagacttttttgttaactatccactgctttggctagatttaccccaggtatgggaacgcatcacacaaggtagatatcaagatttctcttcaacaacagatcaagaaggataccctagttattatttgcaaaacttccatcaccaaaccgatggttatttaagcgaatcctctgccaacttatatgatttacaggtagagcttctttttggtggtgcagctgatccgatgagacgacgtattttagcacccctgaaacgtggactgcaaaaatttcagggaatttctcaaaaacaaatccgcattttagatgtagcttgcggcacggggcgaactctgaagttgatgagatcagctatgcctgaagcatctttattcggtacagatttatcaccagcttatctgcggaaggctaatcaaatcttatctgaaaatcccggcgaattgcctcagcttttgcaagcaaatgccgaagaattaccttatctagataattattttcatgctgtaacgtctgttttcctctgccatgagttaccagcagcagtgcgtcaaacagtgattgagcaatgctttcgagtcaccaaaccaggaggagtttttattatctgtgattcaattcaaatgagtgattcaccagaatttgctgagatgatgaatggtttttcaaaaatgttccatgaaccatactacaaacattacactactgatgatttagtagaacggttagagaaagccggttttgagaatatagagacacaaattcactttttgagcaaatattttattgcttataaaccagcttaaagcaaagccgaaatactcattttgttcaggataatattaggaaaataactgctaacagtccatcacaccaatttggaatttgagattttgaattaatagtagaggcagagtcacaaatcttattcactactcttaatagatgtgtgaacctgcctctaaactaatcggctgttccatgaatttccaacaatactcaatattccaactggcttggtatcacaccaaatttgacgggttcatcacagcaagaacaatcctattttcaccgtggttttctcccttgcctcttcaacttgtagatactataaggaacacagaagcggttgaagaaaagcggatgagtacctatatgatgcacttatgatgcactaagtccgaatctaagccaggtttaggacaattaccggatgtttttaggaaatactcaactgttgattatttgtgcatttgtgtagtgctgtaactgtttaagtctctgccagagaagataaaatctggaacaatgactgagttatgtagtgctgtaactgtttatatctctgtcaaagaaaataaaatctggaactttgaatgagcgatgtagtgctttaactgtctatgtctttgttctatcacttgtgtcaagaacgataaacacccagtcattccctaacttgattgctgtgctgataacgaattctcctacaagcagtctgaagctatgagggttaaacaaaggaatggatattgctaaaaaattccattgactctttgcgtccactaccgcgatggggtgctggctgttctggttggttgggaccgggtttagaattgtccgcaaatagcttttctgaaccaaaattagcaatcagcaaacaggaaaggctagtgaactttgcttcgtaattaaaagctaaggagccgaataccagactcgatactaaaagtgaaatggcagcacgcatagtagatgtctattttagaactctctacttcactgatacttaactttgatctaaagatccggacaatttgaaaaaaagtattgtatgtaactgtaaaaaaatcaatttaatacttcgtcgatatattcgacaagtagccagtttccagatgaatttgcacgaccccaaactttgagcttttgattttggcgcaagacttgcaattgctcgtctacagatgattccaaagttacaatctgccaagtcttaggtaataattctgttgggtttgtgatagtaaatctgtaatcttgttgccctaagcaattaaaaattcctatgaaacaatcaagatctaagaaatcacactgatcaaccgatagggtaggacaattaccatcgataggataggtttctgggtgattcaaataatgaatttgccagtttaaccattctggatgatagattggtaaattgaacaagggaataattgctgttggcgatcgctcatctgtcaataaagctgtttgcagcatccttactggtaaatttctgggctgacaatttagctcacaacagagagcagcggccatccctgcggcttgaccaatacccataactacaggttgtagtctagttgctccattagcaatgtgagagacagaaatattcttctcacacaccagcaaaccatccgtagatttgggaactaaacaacggtagggaatagtaaaaggtgttcctgtccaacgtccaccccagcgaatagatttaggttgtagtgagaacttaacacccggataatggtgatcattggcgtagtttccaatagcaaccgcatcatcaaacttagctgtaactcgaccgtctgcaatgggcagaatatcttgctcagagacagtaacaagtccctctaagcggcgactttcccgaaaatagggatgaagtgcaaaagctggagagagactaggaaaaactccttcggctaaaccgtagcgtctaccaaggtgagtttgaatataatgggcaaagttttgactatgccagaaacattcttgatcaaactcacgtcttgctgtctttgactctagcaaacggttggctttttggccgtagtcattgccacaaatcggccaattgatcataaaccaattggcgggcaatcgtccatagtttaaaaatttttctgatccataatcatcccaagcacctgtaaacaaagatggatcataattaggcgctttgggaatttccggggcgatacattccccaaaatcttgcatgactactatccatgtcggtgattgtacagagtattttgcagtcagatcattaaaattttctggggcgctaggttctccatactctgatttaagttcccatccccaacggtgaggaacatctcctaaagctaatacatctcctaattctgtaccatcaaggatgacttgggcgtaaactgtgaaatctgcaaagcggatacctgcaatacaatctgcgttgcgtaaaacttctaacggtactttcccggaaatccattgcagattcggtaattctctcacccagtctgcaaaaatttctgcacctatatggggttgataactaaaaaaactcacccaactattatctaaacttccgggttgtcttttgcgtaattctttaaggaatgatccccataaaccagttttaaaagattttaattcattaccatcaggagcagatacgcccgcagaggttaacattccacctaaccaggaaaactcactgacaagaatagttttagcacctctgcgtgctgcttgaatagcggccgcagttccacctgttcccccaccgactactaagacatcagttgtataaatttcattcataggatttagtgtttacgagatatagatcccggacttcttgaagaagtcggggatctgagtatttgtgatgtaacatttatttgacaggtttattttacagtaaaattgctcttgttttaaaaattctagattggcataaaaatttacaaaattacacatcaatatgaataacattttacctattggtgctattctccgagaacgttatcaaatcctagaaattttatctactaaaaccggatttggtattacctatgaagttagagatcgaaatcatccccaccaaagaattttagttatcaaacaactgaaaaaacccacagctgaaaaattgaaaattgaacatttaccagatgcttccagtgcatatcaaaattcttcctgtgcattaccaaaacaaacaggtgctaatttaacttgtactgtggatattttcaaggtgtttaataaatagggataaatagcatttaccatgagacgggatacaattttttatcaattattcaaacaatttcccagtttaatatttgaactggtagacgagaaaccacccacagcagcagaatatcaatttgattctattgaagtcaaagaaacagcatttagaattgatggagtatttttacctccagatcatgctaatcccaaaatagcatttttcgccgaagtgcaatttcaagatgatcaagatttgtatcatcggttctttactgaactaatgatatttctctatcgtcatcaagtgaggtatgataactggtatggtgtgataattttcccatcccggagtttagaaccatctaattaccagattcatgatgtattggtagacagttacaaagttaaaagaatctatttggatgaattaggagatttagaaaaccaacctttaggaatagggttaatgttgttaactacgactcctgaagataaagcaatagaagcggctcaatttttactcagaaagacaaaaaatactgaggtggacatttttgagcaagaagcgataatagatttagtcacaaagatcattgcttacaaattcaaattcagtcgagaggaaatagaagctatgttaataccaaccgaagaacctagagcagttagagaatggaaagagcaaggattagaaacaggagagagaaaccttgttatgcgacaattaaaccgtcgctttggtacagttcctcaagagttattactaaaaattgaagggttaactagagaacaaatagaaacattagctgaagatttgttagatttttctgttgtagaagatttggaaaattggttgcaacaacatcaacctaatcaataaaaactgtaggttgggttaagcgacagcgcaacccaacaaaaaccttcataatgttgaaaatgttgggtttcgttcctcaacccaacctacatctaaatgacctctccctaaccatctcctaagaggagaggggacaggaaaacagtaaaataaagatattgacatttttgaagctgccaaaatagctaatgtgatcattatgacaaaagacattagaagtattcttaaaatagcaggttctcctattggtgcttatgatgtactcattgcagcaaccgcattaagtcatcatcatattgttgtcacttccaatgttagagaatttcaaagagtacctaatttacaaatagagaattggcgggtttgtcaataaaagtatctaaaatctaattaaaatgtaggaggttagcaatgctaaacccctacatttagggttgaatgaagatagtaaaaatattgatttatcgaaataacaaaaaagagcgatcgccttatttaataatgctatcagtatagattttatggtacatgagaataatgagaataatgagaataaaatacataaagtaccataatcaagagtttaatgattataatcgcttttttagccttatacgtcgcctttaacctgggtgcaaacgacgtagcaaacgcaatgggaacatccgtaggatcaaaagctgtcaccctgacacaagccatcatcatcgccggcatcttagaatttacaggtgcagtattattcggacatggtgtaacagaaacactagggacaaaaattgccaaccccgacttattcatcaccacaccccaaaccctagcattagggatgataacagtcctcatatcagtaggggtatggctacaaatagccacctcactcagtttacccgtttcctcatctcatgcagtcgtcggtgcgatcgctggttttacctgggtagcattaggaaaaaacgctatagactggtcatctattggtttaattaccattggttggatattaacaccagtcatcagcgccacaatcgcagcttttttttacagtcttattcaaaaatggatcttatcccaacctgattcccgcttacaactacaagaatggattccctggttaagtgcaattttactaagtatatttggtgtaatagttctccccaccttaacccaaccactgacaaactttttaagtgagaaaatcggtttaaacatcccctcccacgacatcctcatatttactggtgcaataggcgtaataggacttacattatatagttggaaaaaacttaactccccaatcaccaatcaccaatcaccaatcaccaaccccattgaacaactatttgcacgcttccagctattaagtgcttgcttcgtcgctttcgcacatggtgcaaacgatgtcggaaatgcgatcgcgcctttagcagtaatttcctacatcaaccagacaaataccgtccccaacaatgggataattatccctatctggattatgatccttggaggtgcgggaattgttgcaggtttagcaatttggggtaaaaaagtcatcgctaccatcggcgaaaatatcatttccctacaacccagtagcggattttgtgccgaactagcgaccgccaccaccatcttactagcttctcggttaggtttacctgtatccacttctcatgcgcttgttggtggtgtagtgggtattggacttgtacaaaacctcaaatcaattaaatttcaaaccatccaggggatcgccgcagcctgggtaattacagtccccatcagtgctgtaatcagcgccataatcttcagtattatccggatcatctgaaaatgcaactgaaatttgtgaagattcttgcttaatgcttattatttgaatgcaatacattctcgactgcaaaaattaagtaagattactgttttttttgcaaaaaacttcttgaggtgatgtactctcacagcaaatgcaaatcatcgacaattaaaaactgccatcttatgcaattatctataaatagtatatttttgcataattgtgggcaatttattaaaatattgaataggagataaaaaaatcttctacttttctcagaacaattcccagaacaatccagaacaatattttaatttctcaaagcaacggaaactgtcacgcaatttacacttcgcacaaattttggtttttaacaacctaccaatctgcaaggctgtgaaacatttatcagtgaacagtaaaccgtgaaccgtgaacagactgacaactgataactgataactgataactgatttatcgtcaaggtgttagaggttagaaactaatggggcgatttgaaaagcgaccagaaaactcacgaaacagaagcgacttatccagagctgcagaaaatgccctttgggatgtagttgaagacttagaacaactccaacaaaatgttattagaactttacaagacgatgtaaagcggctcgaaactgaaaaaaaccgtttagccaatgacattcaacgattaatagaagaaaaagaaaaattacagcaagctcgacaaattactgaacagcaagttttgattcgtcagttggcggaagttttggcaaaacatatatcttcccaactgcaatcttcactcaaaagtttagctgatcaatcaataaccggagaaccttcccatcagtccaccctcagatcggctgaagtcaattctacagtagctagtgaaattagtgaaaatgtcagccagatgttgaacaatctggatgataccgtcacaattgcttttagctccatccaaaaagaattaacaaattatcaaagtcatctttcccagcagttgttacgaatgtacgatcaacagcagcaaggggaagaaatcttagcagaatttgtcaagcgtttacgagaggaactagagaacatcaaagatgcaaattctctgaaaattttgacaggaggagcgccaacagtattgcaactgtccgaaccctacaaaaatggtttctcggaaaaatcctcagagagaatagttgctgaacgagtttctttactaactcaggatttgccaaaaagcgaaaattcatcctcagatgctgtggttgtattaccaccacctccagaaaatctaacttcagaacatccaccagaaccagtttctgtccctgttcctgagtctttaacttcagacacaccagaaaccccaacttcagaacatccaccagaaccagtttctgtgcttgttcctgagtctttaacttcagacacaccagaaaatccaacttcagaacatccaccagaaccagtttctgtgcttgttcctgagtcttcaactttggaaacatcagaaaatccaactccagaacatccaccagaaccagtttctgtgcttgttcctgagtcttcaactttggaaacatcagaaaatccaactccagaaaatccaccagaaccagtttcagtccttgttcctgactcttccccagcaaaattaaacccatactctccccaacaaatacagcaggaagtaacaccccgacaacaaaaacctcccagttccccaaactcatcttcagttcagacaggtttcctgttggttgtgttgtcaatggtgatgtcatccctttacaacgttgttgtcaaggcgctgttctatcaaggttctgatctgttaggaaacttccagacacaacagttaatgtcaccaacattgggaaatattttcttaatcttgatgctgagattattggtggttgtacctttaatgttacttttagctcctattttgcaccctccagtttggcaagacttacaaagtctatttgattcagttagcagaaatgctgctaagaaaacaaacacaaaacaggtattactgttgtcggttgtgagtggtggctttttatttttgtcccaagttttgatttacattgctattggtcaagtaacaactggagtagcgatcgctctgttttttatctatcccatgattactgtactcttggcttggtttctctttcgtgagcgtcctggcttattaagttttagtgcgatttctagcattttttgtggtcaattattaatcttgggtagttattcaactggtattaataatacctctttaggaattatttctggaattatgtccggaatagctttttctgtatacgtaattcttactaggttatctgctccgaaactgcatccagtttcttttgctttaattaatttcgcaaccatgttgttattcagctttgtttgcttattagtacctttaccaagtgattggagtttagccattagatcatccaatttattggaagtgattttaagtgcttttatgttaggtgtcctcactctttgcggctatttattcaacaattttggcattcgcaaattaggaggacaacgctccgctatcattggtgcttttgtcccagttttcacagtaattttcgctggattaatgattcaagaaaaattggatcttctgcaaattctgggagttttattggtaactggtggcgcagttgctatcagctgggaaaaaatgcaaaaggttaaatcttccagtgccaaaaattaaatgattaaaaacaattaaactatgtacaaatacttgaaaatttataccataattttatatttccacagatttaaccaggaaatacccaattaagtctgaatgtcttaatgtaaaattaagaattggtatgagttaaacctccagtaatgtgcatattcttcaatttagatcaagttgatgctagactaagggttggtttgattaagtcaacagcctagagcgtagattcagtaatgctaggtaatctgtttttaccttgtaggggcgaagcatttgggtgataacctatcgctgaaaccctaaacattatgttatgtctgaaagctatgcctccagcacgctacgccatcaattttgttaacctgatgttattattggtgagcctttcttttactgttcaaaattaatgattacacccaaggtaatttagcaccatagctattttatggtgaaaccataacaaatctccattgagagtgaagacaaaaattacaatttggtgtataataggtagtttaaatttgactactattttttcgtaaacgtgccattcatctgtctgtgaatatgactaacgacatagatctgatcaaacgtcttggtccaagtgcgatggatcagatcatgctttatctagcttttagtgccatgcgtacaagtggccataggcatggagcatttttagatgcagccgcaacagcagctaagtgtgcaatttatatgacctatctagaacagggacaaaacctgcgaatgacagggcatttgcaccacctggagccgaagcgagtcaaaattattgttgaggaagtaagacaagctctgactgagggtaaattgctaaaaatgctgggttcccaagaacctcgctatttgattcaattgccttatgtgtggatggaaaaatatccttggcaaccaggaaggtctcgtgttcctggtacaagtctcaccagtgaggagaaaaaacaaatcgagcgcaagctgcctaaaaatctgcctgatgctcagttagttacttcctttgaatttttagagctaattgaatttctacacaagcgatcgcaagaagagttaccccaccatcatcaaatgcctctgagtgaagccttggcagaacatatcaaacgtcgtctactctactcaggcactgtgacacgcattgattcaccttggggaatgcccttttatgccctaactcgtccattttacgccccagcagacgaccaagaacgtacttatacaatggtcgaagatactgctcgttattttcggatgatgaaagactgggcagaaaggaaggccaattctatgcgtgctgtagaagaactggatattcctctggaaaaaatgcaggaagcgatggaagaattggatgaaattatccgcgcttgggcagataaatatcactgcgatggcggtacacccatgattttacaaatggcttttggtaatcaagatgactaaatcaacaaaagttagaagttatcttctaatttttgctgatattaccttgagccaactattaccgcttcgcggaagtcaaaagtcaaaagtcaaaagtcaaaagtcaaatgttccctgcctcaacgaaaggactttttcagcaaaccctacttaaatgctaccttcaggagttgatgggataggcagtgtctgaaaaggtggtattaatcccggccgtgttgtagatccagccccaatattaatagaacggtaactggcatcaatacaccgatctaaagactcaatcggggttaaattaatttctttgcgtaaaccaaccacacactcagcaaaggtaacaggtaataaactgcgtccacagtagcttaaaacagcttggttaattgcctgttgggtactcttgctaatgccaactacacaggtagcaaaatcttcactacgacgggatagactacaggaataaagggcatcagttggggtaatttctgtttgtttggtaattttagctacacaagtagataactctcttggtcgcatagttgtagcacaaccttgagatgctgcttgtgctgtaactcctgcacttaataattgagccgcacaagcacggtaatcatttctataagaacttatcacagcttgacttggcaagatatttgtccatagtccggcgatcgccatcactggaattgtgaacattttccagacatgactacttttgtagttatgaaaactgctaatttcttttttgcgttttaacattgctattctccaaacacccaaagttatgctaacttagaatttgctgaaactcctctattatcaaggaatttcattgtcagtacccaaatacttccaacagtctgatacagcaggagtcaagagtcaggagtaaaactctcgtggtgtctaggtttcaattttgattctgtacctcattgatctgccatctgctgtatttattatttaaccaaaaatactctagctaattgctaagagttatgtgataatagaatatttgggtaaagtttaaacaggattaaataaggaaactcatgtcccgatatagaggtccgcgcctcagaattgtccgccgcttgggcgaattaccaggattaactcgcaaaagtgctagacgtgcctatgcaccaggtcaacatggtcaaaaccgcaaaaaacggtctgagtatgctatccgtctagaagaaaagcaaaaacttcgcttaaactacggtttaacagaaaagcaaatgctccgctatgttcgtaaagccagaagagtgactggttctacgggacaagtattgctgcaattgctggaaatgcgtttagataatacagtttttcgcatgggtatggctcccactattcccgcagcacgtcaactggtgaatcacggtcacgttaccgttaatggtcgtgtagtgaatatcgccagctatcagtgccgtcccggtgaagcaattggtgtgagagataaagaagcatccaaaaaattggtagaagctaacttacagtatcccggtttagctaaccttcccaatcacctggaatttgataaaaacaaattgactggtaaagtcaatagtgtgattgaaagagaatgggtagcactccaagttaatgaactgctggttgtggaatattactcacgtcaagcataattcaattttggattttggatttacgattttggattggaatagttgttgttctttgaatccacaatccaaaatctaaaatctaaaattaggttaacctcctatttgcgacatggtacgggtgtaagtgccgacagtacctgagtcgcgttgtttaaagttaatttctgatttgattgctaatagttctctgacttgtgattgtaattgttgggtgctaataccagcacgtaaagaagattttaaatcaatttgcccagtttcattgagtaagcagggacgtaaccaaccatcagcagaaagacgcactcggttacagcgatcgcaaaaacactctgacatttgactaataaaacccagtgttccctttgctccgggaatttgaaatacatcggctggaccactaccacgaacttgagattctgtcaagccccaacgttgacgaatgcgatcgcgtaactcagcagaagatacccaaccgcgatcgccaaacaagtcactattaccaataggcataaattcaataaatcggacgtgccaatttttatcaatcgttaaagcagctaaatccaaaacttcatggtcattaacgccaggtattaccaccacatttaactttaacggatcaaaccccacataataagcagtttgaatcccgtcccagacttgctgccaacgtccacggccatgattaccgataatttgctcaaaagtatctgaatcaagagaatctaaactaatattaattcttcttaaacctgcatcataaagacttttagctataggagctaataaaaacccattggtagtcattgccaaatcttgagtttggggaagatgggcaattttttttaccaactccaccacaccaggacggagtagaggttcaccaccagtcaagcgaaagcgagtaaaaccaacgggaataaacacatctttaactagcgttagtagttcctcatcagttaataattgttgtttgaggatatagtctaattctgcaccttccggcatacaatacagacaacggaaattacagcgatcaattaaactaatgcgaagatagtctactgggttcatgtttgttaagttgaagtctaatttctagtgtagaaacccaaaggaatagagaatatattttttatgcgctgagatgtttcaaaacagcagtgatgcgatcgctgtataggtaaaaatctagttgattagtcattgccaaaatactgtttttcgatattaaataaggagagttgttgaaaacctctcctaagtaaattttagtattctgcacctaacgacctttctattgcgcgtctaatgtagcgttgataaggaataccttctttttttgaaacagatttaacagcctctaacatctcttcagacattcttacactaacacttttgtctttaggtttaaattcaaaagttacaggcttaaagttttcaggatgaagatactctgataaatcaccttctaataatgcttcgatttcctcatccgtttttactcttgggaaaattttcttcataggagcgtacctctttgtcgtgcatatatctggcgctgattggtctaatgagtattttgtcttgtttacttcggaatgtaaaagccacaaaaatatatcttttctgacttgaaatccctacagccagatacctgtcctcattttcagagtgtttgatatctggagtaatgagcttgtcctaagttgacaatttactagacaaacctatacaagtacatacaaaactacaagtatttgacgtatacatggaataagttgactaaaaaattaggcaaaatgtgtcagaattaaataataaagtatagtgttgacatcagcaaatgcttttatccatcaaaacacaactcaagttaaataaaactcaagaaatgttaatggctaaacacgctggtatagcaaggtttacctataattggggtttaggg

SEQ ID NO: 15 - DNA, 89061 bp, Sphaerospermopsis sp. LEGE 00249
  LEGE00249_25
ggggactggggactggtgactggtgactggggactggtgactgggtaatcaattttatttttaccagtcatcaattatcaattatcaattatcaattatcaattatcaattatcaattaccttaatctttttctgggaaagttacagttggtaatccttgattattaatcactattttaccacctaaattttcaatttcttgaattgcacggttgcgggttttttcatctacgttattttgtaaaaccatgctccaactggcaattctagcatacttactatcagggtttctttctagaaatttagcagtagattgggacagagaaactacatttttactgtcttgatcatcgtattcactagcccattctgccgctttgagaaaagacttacttgcggcttgggagtcacctaaaaataataactcatctgtgcctttataacgccagatatagtaagatttttctgggattttaggagatagggattttaaacttttatccattaatgtaatagctctttctggcatacctgcatataaagaactactaacagaaagaccaagataagcttctctaaatttcggatcatgtttaaggatgattgcaaaaaattctggacttaaactataacctattttatctctaacgggatcatcaccaaagtattgcaaaaagtcaatatatacccaattagaaatgaggttatcataaccaaaagtgggtatttgttgcagtaaactcaaacgtaaagcttctttttgttgttctttttccaaagcttccacagacatagattgttcgctgttgataagttcttgcaatctcggaaattgacttaaactaattcctaagatgcagaagcaagctactaaaggcgtaataataaattcacgagataacaacataatttttcttagctttatcagcaaatttacctgactgtatattttacctggctttggaacaagttcgtaacagatttacaataggaaatgtttaatataaacttacatttacgttaaaatacttatattaaagttaagtttattaaacaaatactagaaaaaaaaaccaggcgttgcataatagagggatgaattgagggttgatacggtgcattgtccatactgtgggtctactgagattagaaaaaatggaaaacgcagaggtaaacaaaatcacatttgcgtcaaatgtggtcgtcagtttatagatgtttatagtccaccaagaggatactcaaatgaagtgaaacaagattgcttaaaatcctacgtcaatgggatgggatttagagccatagaacgtactcaaggtgttcatcatacaactgtaatttcttgggttaaacaaattggtgagaaattgccagatgcaccaccaattgaggaaataccagaagtaggtgaattagatgaattagagacttttattgactcaaaaaaaacaaaatttggttgtggacagcagtaaatcactttagtcaagggattttagcttgggttttgggagaccacagtgcggaaacttttcagcctttgtgggatattgttaaactctggcaatgctatttttatgtcactgatggatggaaagtttatcctagtttcattcaaccagaagaccatattgtgagtaaaacatatatgactagagttgaaggagaaaatacacgtttacgtcattatctagcacgtctacatagaaagacattatgttattctaaatccgtagatatgcttaaatattcagttagattattacttcattatttgaaatataatcaaatacccgtgttcaactaattcatcccacacttatgcaacgcccgtttttactgtttaatttgacataactgccaacattgttgagcgatcgcccaatcttcttgtgtgtgtataactaatactcgcacattagaatcaagtgtagcaatatctacatcaattggttgttgtttatttttctccgagtctattttcaatcctaaaaattcccacgcttcacaagctgcttgtctgattaatggagatttttcacctgctccagcggtaaatactaacgcatctaaaccacccaaactagccaacatcgaaccgataccagtccgtaaccgatgtacgtaaatatcccaagctagtttagcacgatagttaccttgttcaattgctgccagaacttgaggtaaatcactggaaacacccgaaattccccgtagaccagaagctttatttaaaacataatctaagctttctgctgagtaatcagactgacgcaatagatagattaaaattcctggatcaattgaaccgcaacgacttcccatcatcaaaccatctaaaggtgtaaatcccatagtggtatcaatactgcgaccttctttaattgcagctaaagagcaaccgttacctaaatggcaagtgattaaacgcaggtctgtcaaatctcgaccaagaatttgcgctgcacggttcgcacagtattggtgactgataccatgaaagccgtagcgacggatacctttctctacccaatcataaggacctggatagacggcagcagcatccggtaaggtgctatgaaaacctgtatcaaatactgctacttgtttaacatctcccaagctttgctcaatggcttctatgccttccaaagccgctgggttatgggctggggcaagggttgaaagattagcgatcgcctgtttaacatcctcgttaattataacactattgcggtaatttaagccaccatgtactacacgatgtcctaccacatcaatttctgataaattactcagtaccttggtagcaccacgagtaagagtatacagcatatatgctagatgggctttgcgggagtcaccataaatagattcttgcagtgtttcaccagtggcggtttttacctcaatttcagccacaccacggtcttgagtccagttaactttcccttcccaaagaggttttggtgcttcttggggaagagttgcatctgtaatgtcatacaaacaacttttttggctactagatccggcatttaagactagaatcttcataggataatgggaaacataacctggtctgatgctgtcatgattttacaattgcttttgcaagttttccaccgagtagatgaaattagtgtttgaaaataagcacatttgaaaaatttaggagtcagtaggggcgaagcattcggacagaaatattagggaaaaatcgagaattgaacacccaaatgcttcgcccgtataggagtcagaatgtttgagtaggggtagatgatgaaatagtgatttttgggtagcatcttaaatgtgtaaatttgatatgattgaaccgcaaagggcgcaaagaacacaaaggtaagagagtttaagagattttttagtgttgctgtggttatttttgctatctaggaataagatccccaagattcggggatctgaagttttacaattctagtttttctccgcgaatagaataatctaataattccattgggtgcattaaagacattttcttacctggcaaatatttactaatttgcaaactacaaccagggttaggggaagcaattaaatcagcaccagtattgattaaattctgggctttttgtttacctaattcttcagcaacttctggttgtagcagattataaattcctgcactaccacaacacaaagctgcatctattggttcttttaaggtgactccgggaatttttcttaataactgacggggttgaacactaattttttgaccatgtaataaatgacaagcatcttgataaactaaagttaaaggtttatctgttaaaggtgaaagttccgcagttaaacccacatttgctaaaaattcctgtgcatcttttacttttgctgcaaatgctttagctctttggctatattctggatcatcagctaaaatatgaccatattcttttaaagtatgaccacaaccagcagcattaataatcacaaaatcgacatttgtatcagcaaaactatcaatcatttgtcttgctaaagctttcgcttgttcagtttgtccttgatgttcaggaagtgcagcacaacaaccttgagatttaggaattacaacttcacaaccattcgcagttaaaaccctgactgttgcttcatttaccggagagaaaaacaaacgttgtacacatcccaaaattacaccaacacgatatcttttttcaccctttgcaggaatgatatcgggtaaattatcctgaaaagacttaacagtaatttccggtaaaatagactccatagcagctaaccggggagagattttttttattaacccagtagcgcgtaataactgagaaacccccaacttttgataaacaaataaagggaaaagtaagattcttaaaacatcaggattaggaaacagagaaaaaatcaattgacggattaacttatcagaaaaactgcggttataatttctttccacctgatgacgagttgcggaaatcaacttatcatactgcacaccagaaggacaagttgacacacaagcaagacaacccaaacaagaatcaaaatgttgaacagtagcagtatttaaagcaatttccccctcattaatagcatccattaaatagattctacccctgggtgaatccatctcctttccgattacccgataactaggacaggtagaaagacaaaacccacaatgaacacaactatcaatcaacttaggatcaggaggatgactaggatcaaaaccctgtaaattcttaacactagcagtcttattcaccgaactttccgaaacttgcatgactctttcttcccctcttaacttcgcgtactttgcgtactttgcggttcgttattcttaaaccttaaaccttaaatcccaccaacaaaccgaccaggacttaaaatataatttccatcaaactgttttttaattcgctgcatcatatccaaaccattaccattataaccccagatatccaacttttcttttatttcaaaaggtgcagataaaacacttaaaaaaccagaattagattgacataaatcacgcaatttcaaaacctgattttgattttctaaccgcaccaaacccaaaccgctattgagatgaatcaacccgaaattaatttgattaatcacctccaccgcagcagttggtaatactcctattttggcagtaatttctgaattattaccataattatgtattgtttctggtaattgttgccataaattagcctgattttcggccgaataaattgccccatttaaacctaatttttgaccaattgccaaaagtctgttagactgttccttcacactttcgctaatactttgaaaccggacaattaaacctattccgctacctaaatttaaatcagaaactaattgactggatattaaatctgcttgagttggtgttaactcagaaccttgaagaattgtagcagcttgggatatcgcttcagctttaccagttaatattacagttcccgatgtttctggtaaaggataaactcgaaaagtgacttgactgataattcctaatgtaccgtaagcaccggtaaacaatttcatcaagtcgtaaccagcaacattttttactacccttccccctgctttggcaatttgtccatcagcgcggataaaagttatacctaaaagttggtcacgcacaccgccataacgttgacgcagagaacctgtatcagcagtagcaataataccaccaatggtagcaaaagcgggaaaagcagggtcaagagctaaggtttgctgagattttgctaaaatttcctgaatttcgccaaatttcattcctgcttctacggtgacagttagatcacctaccgcgtgttctatgagtctgttaatacgttctgtactgacgactatatcaatatttttacttaaaccaccccaatgaagtttacttgcactaccgcaggggagaacagaccatttattgctgtttgcagcggacatgactgcggccagttgttcttgagtgtggggataaacgatacaactgggatgggttttggggtttatcgctgcttgaatacgttgttgctgactgggtgcgagattttcccaagggaagacagcgttttctatgttgataatagatgctatggtagaggcgatcgcattcattggtttgttttcctatcctccttattaatgtactggttaatttaacaaaaatcatacaccagaggaaaattggtaaattaatcttgaggaatttttgattttgtgcaaatacccaactgatcaattgataattgacaattgataattgtttgattcgggagcatcccaaatgtgtaagtttattttttgcttgaggtcaagacgtgaaatgaacgaaccacgaaggtacgttcaccgaaggtgttcccgaagggtaggacacgaagggaagaaggaagaagagagtttttggtgttgttacggttatttgttaaaaattgggatgacaggaaaaatttttgctttgataagttctaaaaaaatgtattatccttaatatctaagtgatggtgatgggaatttttttgtgtcaacagtaattaaaaattcgtttccgcgtcttgtttctctcgatgtatttcggggaattgcgatcgcctctatgattttagttaataatcctggtagttggagttacatctacccaccattagaacacgcaaaatggcatggttgcacacccacagatttaattttccctttctttttatttattgttggtgtagcaatgcctttttcttttgctaaatatacacgagaaaacacaccagaaaaccgtcccactcgtcaagtttatttgcgaataattcgccgaggtttggtgttatttgctttgggtttatttttgactttgtttactttttttctcgattttactttaaaaggaatacccattgatttaagtaaaattagaattatgggggtgttgcagcgtatcagtttggcttatgtaattgctgcttttgtggttttacaactttcccaacgtggtttatggatattttcaggaatatcgcttttaggttattgggttgcaatgcaattaattcctgttcctggttttggtgcaggtaatttatctgctgaaggaaattttgctggttatgttgatcggatgattataggaagtcaacatctttatcaaagtggaccatttgatcctgaaggtttatttagcactattcccgcattggtaacggttttaattggttattttactggttcatggttgcaaaaacagcaggttaaaactaggacgagtgttaatttagtaatttggggtttggggtgtttaattattgggatattatggggttttgtatttccgattaataaatctttgtggacgagttcttatgtagtttatactgctggttgggctttattagtattagctttgtgttatgaagtggtggaagttcggggtttaaaaaaatggggttttccttgggaagtgatgggtttaaatgccatttttctctttgttgggtctggggttgtgggcagaattttagttaaaacttctgtaggtagtggtaaagatgcagtagctacaaaaacctggatttatgataatttgtttagtgcttgggcgggaaatatgaatggttcattattatttgctatcaccaatcttttattatggtggttagtgctttattttatgtatagtcggcgttggtttctgaaaatttagttgttgataaatttgtctattaaacactaagggacttccagataaaaaaatattcaattaatttttgtggggtaggcatacttcgacacgctcagtacaagtcttgcctgcccttcaacccggatgggcttctagcccatcccacaagattggataatttattgtttggaagttcctaaaaacataaaaaaaccacatttataaaatgtggtaaacaaacatcatcaattctgtgatttaatctaattcaggttcaacaccaagcgcacgtagttgggcaattaatttttctgttttctgtcgttcttgttcagctttctggcgttcttgttcagctttctgtcgttcttgttcagctttctgtcgttcttgttcagctttctgtcgttcttgttcaactttttgtctttcctgttcaactttttggcgttcttcttccacaggagttaacacccaattaccatcttgatcataccaacgtaaccaaggcatattaacatttttgtaactgccctgccaaactcccaaacctaattctaaatcaggaatccaaaaacgtaaatctgataaattcacttcagtataatgagcgccctttaactcaaacattctaaattcagattgataacgatcaaaaattgcgtaataaggaactcttaaaatttgctcataaacttcccacttagttgggggtttttccacatctcgcaaagtttgacctaaatcttctttttctgttcctggtgataataattcaaccacaatataaggatttacaaattcttgccaaactacataacttaatcttaaatctctttcttcatacaaagaagaaacaccaacaaccgcaaaccaatctgggcgtttatgccacaatggatgacgaccatcataatataaattcatatcactagctgtaaaaatttggttgctaggatagttaggggggcgaaatgtgtctgctaataattgtggttgtagtaaatgaaattgatctggcaaacctttctcctccgggtcttcgctaggaagatcatacattgttggtaatgtttctttaggagaaagtggtggatctgtttgatacattattggtattcctaaagatacaactttgatctctattatgtagcacgataatatggtatttgaagatttctggagattttcagaagaacaacaatatcgcttttataggtaaaaacacaacaattgtgttgtatccaagtcatcacgataaacacattcaaaattactaaaaccgactttttcagaaatactttttagattggattgagtttccggaaaatccttagatgaaatatgactatcgaccattttatactcttgaggagttattaaagtccaatcttttttcacattccctaaataacgtttaacataactatctctatcttcattttcttgacgaactacatcaattaaaatgaaaattccccctgatttgagcagatttttgatattttttattacatcttctttctcttctaattgcaaatggtggagcgcaaaagatgtaaacacaacatcaaatttatttggttcattttgcgctaactcattcgttaattgccaacaatcgcctatgataaaatttccctgacaaccagtaacagcaatattttttttcgcatcttctattgcgggaacagatacatctattcctgtatattcagcaatttgagtatttaataaagcttgagtggtgaaactcccatctccacatcccaagtcaagcagagtaaacggtttttgccagtgtttaactaataattcatggagtacattatatatttcccgatgtcccatgtaattgttttttaacactttctggtaaatttgccattgctggttaaaaaactctgctgttaagagattttcttcttgaatcatttccaattttatctgctctgtcattgttttaaattccagatatttttatttttagattgaaaacattttatcaggtttggtgtgatagtgtaaagttacttatttcctgaagcatcaaaccatttggtaatcttgtttttgttcatttaatggtggcctgacacacaaataaatcaacgccccaaaaaagggaactaaagcaaataaccaaaataattgattatccttccaaccccgtcgcgtcatatcatcccctaacaaagcaggaaataatagactcaacatacaaaaatctaaactcattacatgaataaatctgctagtttgccattgttggataaaatcactccaatttccttgtaaaccataagcaaataaaaccaccgcacctaacattaataaaattcctgtgatgcgagaatcaaagattttcagaaacaaatttttattacctgtaaattcttgatttggttctcttaaagctagatatggtaaaagtgcaaaagcaccaagcccaaaggaaactgtagcaaaaggccaagctggtattttttgccttctgccatcaataaataacactgcactgtaaattaatggccatattcccataatattaaataaggcaataatcgcaggattgataccttcccagtttcctgtagaaagattggtgattaactctaaactttctgggaaattatcaggaggtgcaaataaaaaggcgtaggaaagaaatcctagccatattaaaccaaaagagatttttctcaacatgatttaccgagtttagacagtttacgcagtttgactaaaagcttctgaaagatattctgctgctgctgctactacagcgatcgcattttcatagtctaaccgagttggtcccaaaacacctatacttcccacgggtacagcaccccgacgataactagaagatatcaaagaacaggttctaatgggttctaagggattttccgtacctatccgcaccgtcaccttgggtttacccgtttcctctatttccgattcctcacatattaaccgccataactgctcttgttcttcttccaataagtgcataatcgtttgtacctgctgtacttgggcaaactccggttgacgcaacacctcacccacaccccgcaccatgatttgtgtggctgaaggtgcaacagcacgacggagtaattctgtcaatgaacttttcaaaaattccccataacgttgaaactcttgatctaactcactccagtcaagctgggctaattccaagagtgtaaaaccacgcagatgactatttaaaaagttagaaactatttgtaattctcgatcaattgtttctggatcaggtttagttactgactctcttgtaaacagatccattaccttggaatgggtttcataactatccgttaccacaatcagcataactttcccatcttcaacttgtaatagttgtaaatgtcttaattgtgctatattgggctgtggcatagttattaacgtaatacagccacttaatgttgccaaaatttgtgccgcaccttgtagtaaagcttctaaactccaatcatcccaatgtagacgctgttgtaaagtagattcaacctctctagctaaagcttccgacggtttcatcaacctatcaacatatatacgataacccgaatcagaaggtacacgccccgcagaagtgtgtggttggtaaagtaaccccgacttttccaaaacacccataacattgcggatagtagcggaactgacaccaagatcaaattcctcaattaaagctttagagccaactggttcagcagtggcgatataatggcgtacagttgcccaaagtatatgttgttggcgatttgtcagctggaattgcatagaatatgttttactgaaggcaaattttaagcaaaggttgaaaaattttgttaatgaaacagtaaaaaagattgattattaattaatgcaaaagcaaaatcgtaaattatatatttatactatattagttaggtgcaaagcttcccgtaaaaacttattttctatgtaattattaatacagtatagctttatcacaaaacaggctaaattcttatctatttatcatattatcttatatgatttcttaatcaagctgtatttttagctacaaaagttagatttagcttcagttgtattgctaactattggtgattggtaattggtgattgggaaaaataaaattgattacccagtccccagtccccagtccccagtccccagtccctaataccttggaattacaggatcaactaaaatagaataggcatcaataccacctataatatttttaacgttagtaaatccttgagaaactaaccactgacacatctgagcagaacgcataccgtgatggcataataccagggtttccgcatgggcatcaaaacgagtgaaaatttccccgttccattgctcatattcactcaaaggaagattgacaaaaccatcaattttggcgatcgctacttcttgtggttcacgcacatctattaactgtaaaccagaatcagcatttgctaaacgttccgctagttctttaaccttaatttcagtaaaagattgaccagtcatgcagtttctctaaacaatcctaatatttgtcatactattcatgttgacagaaaagcgagaaaataggttgaatgtgaataatcaacgtttatcttttaggtttatagtagctggtgtagttgctgtattacttgctattactggcttttactggtttttattcaaaagtccagtaaaattaaatactcccatatctcaaccaggggcggctatatttgtatctaatgtagcacctgcaatggtatctttattagtcaatcctgaaggtttgcagtcaatagaaaaaaaaggggcaatttcccaaatcaaaaatagtttattagcaaaaactaacataaatttcaaggatgatatcaaaccttggctaagtaatgaaattaccttagctgttaccagtgaagatattgatcgtgatccagaaaatgggttacaaccagggtatttgatggcactagctacaaacaacccagaaaaaagccgtgagtttgttgaactcttattttctcgacgaactttagcaggaacaaatttagaagtagaacaatataaaggtgtcaaattactgtatgatacaccagaaataataacatccaaaagaagccaaaataccaaattcaaaatccaaaattccttagctggtgcggttattgatgactttgttttatttgctaatgatctgaaagttgtcaaagaagctattaataatattcaagcaccaaatttgaatttaagtagtgattctgaatatgaaaaagctgtaaaagaattaccaaaaaatgctgtagctgtagctttcttcaaattacccacattggcaaaatggcaaggtttagaattagcagaatcaacttataagagtcaaattctttctttagttttaaaatctcaaggtatgctggcagaaagcacatttttatctagatcaaatttacctagttcaaaagttgcttctgtatctacaccattatctaaacctgtggatgccttaaagtatattccagagtcagcaggtttagcaattgctggtgcaaatttgagtaatttacccaatagcaacttagataaactttggcaacaagcaacagcaactatttatggttcttctcaagaagctattgccagatggatgcaacctttaatagatgtacaaaaaagctgggatataaactggaaagaggatatttttagttgggtaagtggagaatatgccttagcaattttaccaaatcaagaggcaaatcaagataaaaatataaatcccaattgggtgtttgtagtagaaaaaacaccgcagttagaacaaggtatagcgaaattagataacattgccacaaacaacgaatttaatgttagttctttgattttaaacaatcaaaaaattgccgtttggacagagttaaaagctattcctgaaaattcatctgtcaacattgaagcaaaagttaaaggggcgcatacaagcattgataattatgaaattattacctctgacttagcattgatggaaaaaattattacccatcaagaacataccctgatggaaaattccaactttcaggatagtattgctaacttacctcaaccaaaccaaggctatatatatattgattggaaaaaaagccaagaatttctagaaagtcaacaacccttacttaaatttgtggaattgttgggtaaaccactgtttgacaatttgcgatcgcttacagtcagtagttacggacaggaagcagaaacactcaaaggtggagtcttcttccaattagaaaaatagacaagctagatccccgacttctcaaagaagtcggacatctgggaacagttaatattaaaaacctacccctgtgagatttttctccccccttattttctcaaatgattgccacatctcatcttcaaccgccttgtcacccgttaagccaatcaccaatcaccctattcccaactttccagccaaagcgggagttaatggtaaaagggtgctaaccattaaaaataaagccaaaagacctaaagcggctcttgcgtcatcgggttcagtaatttcattcaaactggggcgttctgcatctcgttgtaaaaagaaaatcactattgcccaataaaaagccaaagtattacccagagataccaaagctaaaacgattaaagtggcaattgtcgctcttcctgcggttttacgtccataaattgcctgaacaacacgccccccgtctaattgtccggctggcatcaggtttaaagctgtaattaccaaccctaaccaaccaactatcaccaaaggatgaacattcaccaaaggcgcttgtaaagccgaacctagcacaactcgcgccaaactaccgactaaaattgaaccttgaaaaaacttattgggtaattgaaataaactaccagggtgggaaagtaacaaccctgtcaccaacatgatcaaagagataataccgccaaaagcaggaccagctaaagcaatatcaaataacgctttgcggttgggtaagagagactgaaaacgggtaattgctccaaaagagcctatttgcaccgctgggaggaaaaaaggccaagttaggcggacttggtgtttacgtgctaataaccaatgtccaatttcgtgagcgatcaaaattgtaaaaattcccaaccctatgggtaaagcttccgaaactcttgatgggttggcaaataaatcaaaattcagcagtaaacccgcagcttccaaactggtggcgatagttgctactaataaaattacagcaaatgctttttgcgataactgcattggtttaggatcagtgcgactcggtagcacaatcatcactggtttaccatctgtattttctactaaaaaaagacgatatttatcacctaatcgctcttgcaatctttgggtgagacggttgtgaacttgttctgcatctccccgcaagttacctttaaaaatcgctccctcttgatagggtatggtttctgtggcaaaaaatgtatcaataccgaaaatacctttgatggtatttaaatcttcttccgggatggtgatggtttccagttttacttctgctaccactacaggttgatcagaattttccggtgtggtttgtgcttctaaagcttcgttggcaagtctttcagttgccttagctttgataatggcatcttggccagcttggcgtaattgtctacctaagaagatgtatattcctgtggaaagcactagcaataacaatacacctgctatattgatataaatgcccgcagcaaacaaaccaaaaaataccagccagggagccattaatactacagactgtaaccaggctaagatacccagcttaccaaaaggtctggcacgataaaagccccaacccaaaatgccgaaagcgactagcactacagccgctatgataggagtttctgatgaagttaacattgctcaacctttgctaatctataacgcaaataggagtctacccaaataatgtagtgctgttatttgggaatattcaactaaattgacaaatttaatattttatgatattatccactattttcctatcattgtttatggtattttctggatgagaaatcctgggtattaaagtttctccacttgattgaatttctggattgaatttctggcagtgtataaccaagtaagttggtagttttttgattggcgtaaacattgcgtttttcttctagatcaaaaatatcaatatgttatgttagctgagggatgaggtaaaattttagcgatcgcatttttgaaaaagaaactcaaatgtaactaagcttattgcattatttttttcacctatttgccaaaaaaactctgattagagaagattttataaaattgcatattcaaaataattgaacataactaaccacctgtcacctagctttcacagataactttttcagcaaaccctagttattttctctggtttgacgatttcattggttatctttttgataactgattgcacaccttgaattaaaagttaaatcatactactttttgaagtgcggaatgtgggttttatcatcttacaataatgtccttcactaaacctgctaacttttgtgcagcaccaccttcacccctagcactgcgtaatttatctttaattgctgctaacttttcaggattttctaacaaatctaaaaccatttctcccacagtgtccggttgcaattttcccactaattccggtacaatttcactttgcgcccaaatattaggccaagctaataaacctttatttctcagaaaccaccaattaattaatttagcaaaaccagaacctaaacccggtaaatttgctaataaacctggtaaaccatcccaagaacgcattgcatctaattgttgagtaggtaataatacaatcattggtattcccaaagcgcctaattctgcggtatttgctcctactgtagttagacaaattgcacattgagataataaatgataagcagggttttcttgttttaattctactgttaaacctgtataagtttgcagagaattatctattaaagatgcaccgttaaaaccgaaagcttgagtaaattcgtttttttcaggattggcaaaactggctaatgttggtaaatctaaagttggtgcaacaggaataaaaaactttgtttctggttttttagagtgaatatattcagcaatagctaaagttaaaggtaccccttgagttaacttagctttttttgaacctggtaaaattccaatcaattcaattttagattttggattttggtttttggatgtgatatcatcttgtttagcagcttctaacattaaatcaccgacaacggtaaatttatgtgcatattgaggtgagacatttttgatcacttggggtttcatcactccaaaacagtctataaaattatgccaacgtgcttcccattctgcataaactacggttttatatcctaattttttaccaatgatgacaggaaaaatttgatctcctcccaaaaatacaactacacctttttttctccagtcccaattttcggctgtttttcctgttaataaaaactgccaaaaatgctcaggtgcttgcactctatttacctctggataggaactagctatacttacttctctaccactagcatgaggacaaggtgataaaatcacagaaattcgcacttgagaaatatcatatcctaattgttctcttaatgctttaacgacaggacgcacccaagttgtaacttcccctggtccattagaaagaatgagaatatcaatcatatttttttgaatagttatttaatttgttatggttggtaattggtaattggtaattggtaattggtaattggtaattggtaattggtaattggtaaaaataaaattgattacccagtcaccagtcaccagtcaccagtcaccagtcaccagtcaccagtcaccagtcaccagtcaccagtcaccagtcaccagtcaccagtcaccagtcaccagtccccagtcacccagtcacctcatcatatttagctttaacagcttgtatatcttgccacattaaccattttggtgagcctttttccctggaagaattacgtaacaaataggaagggtgaaaaataggcatacataaacgcccttcccagtctatccactgtccgcgaattttcgtaattccttgtttattacctgtaattcctttaacagcagtagcacctgttaataaaatgatttttggatcaactaagcgaatttgttctaataaataaggtttacaagcggccatttcttccggggtgggaactcggttttccggtggacggcattttactatattacagatgtatacatcatgctccgtactcaaatttacagatgccaaaattttatctaacaattgcccagacttacccacaaatggtaaaccagtttcatcttcattttgtcctggaccttccccaataatcatgattttagcttgggggtttccccttcccactacagcatgagtgcgattttcacccaactcacaacgatggcaattttgacaatgtggtgttaattccgtcaaacttgtataagttcctgacggaatgggaatttttgcatctgtaggaatcaagtctttttgattaaagtttgattcgttaaaaaggctaagttgggtatcgctgttcatgaaaattggggctttgggtgggctatttctaagaggttgtcttaaaagttttcggcgaatataatatagcctccggcacgcctgacggcgaacgctactacacaagcaaagtccacctgcgtggactaacgaaaaattaaggatttgaaacctgcgtaggcaggttttgtctgtgtagatgtgatttctaatcgcccaagttagacttttcaaacatcctcttagaaaatttggggatcttgttgttcataaatcatttaggattgctatattttcgctgtttgcaaatgccaatctgttgattgttcgtaagcataagctacttggaaaagttgatcttctcttaatactttaccaattaattgtaatccaattggcaaacctttgctgtcaaaaccacaaggtacactaattccaggtaaaccggcaaggttcacaggaattgtcattaaatcattcaagtacatacttaaaggatcggtgattttttccccggctttaaatgctgtggtgggtgcggtgggagtgactaaaacatcaacttgagcaaaggcattttcaaagtcttctttgattaatgtgcggactttttgcgcttttaaataataagcgtcataataaccggcactgagggcataagtaccaatcataatccggcgtttgacttctgtaccaaatcccattgcacgggtgcgggtgtacattgataataagttatctgcatcttccacacgtgcgccgtattttacaccatcataacgggcaaggttggctgatgcttctgatggggcaataatgtaataactaggaacaccataacggaaacgaggacaggaaatttgttgaacttccgcgcctaaactttctagttgggcgatcgccttatttactgctgcttcaacttctggatctaaaccttcaccaaaggtttctttaatcacgccaatctttaattttttcccttttaaatctggtgttaaattggcagtgtaatcaggaatttctacttttaaactggtggagtcttggggatcgtaacctgcgatcgcatttaataaaatcgctgcatcttccacacttctgccaaaaggtccaatttgatccaaagatgaagcataagctaccaacccataacgggaaactaacccataagtcggtttcatccccaccacaccgcaaaaagaagccggttgacgaatagaacccccagtgtcagaaccaagagaaactacacattcttccgccgcaaccgcagcagcagaaccaccggaagaaccaccgggaactctggcaatatcccaagggttagcagtagtttgataagcggagttttctgtggaactacccattgcaaactcatctaagttggttttaccaaccattaccgccccagcatcagcaagtttttgggtgacagtagactcataaggtgggataaaattttccagaattttagaagcgcaggtggtgcgaatgcccttggtacacatattatctttaataccgatgggaatccctgctaagataccgatttcttccccagcagcgatttttgcatccacagcgcgagcttgttctagtgcctgttgtgcagtgacagccaagaaactgtgcagttttggttctagtgcttcaatgcggtttaaggattcttgggtgatttcaacggctgaacgttctttttttactagctgtttgtgcaactcgttaatggatgccataaataatttttctctttatcattcaagtcattgattttagcatttacaggtgtgagggtggtgttttgttggttggtggggttatggcacgcagaggcgcaaaggcgcaaagaggggtttgaggggtgggggatattaaaaatcttatctgtttgtgtttatatattggtgatatatacggaatatttgagtataataataattaactttattacactgtgtgacaagtaatgagtcgagaaagtaagcatagatttgaggtttggtcacaactttggctatctcatgaagatcgagatcgcatacaagatttttttacttcagagatcggtgtcaaaccacggtttgttgttaaaaatatgcacattactgtttaccatgcacgtcgaatgcttcctgatctgaagccttgtctggaaaatgtagaagtttttcttgatgctaatgatactcgatttatggtaatggcaccaggtggtgaaaatccaagagattatcttaatccaggaaggcgtaaagtgggggtaagaattcataggcagagtataattcggcaggtaatcctggaattcagagcaagactaaccaaactagaaacaaaaagagtattaggggctagattacctagctctcataatcgtaatgcctttggagctagacactttcaaccgcatatgactctcttatgggctggaagtggaatagatcacgatctcacaaaaattggagtaccattcaggaaaatgcttggaacattaaagtttgataaattcagtatagagatcaaagatttagatttgacgaatatatcgaaagataaaaacatgattgtatctgaataattgaactgctttttactgatggtggacttttaatacaaagcgaaaatgtgaatttacttgttttcaacgctgaagataagctgatgtgcagctaaactgtataattaaacaacctgaagttacagtagcacaagcatcttgcttgtattaattattcaagttaaaggcacaacagcttaagaggataattcaattgataccttagataatcatcggcggattattaaggaagttttaatacctcatacacaaattccttattcttatggtgtgattgaatgtaaaacagtttttgatgaaaaaaatgatagttatttattaattactttgggttggcaggatcataaaaggattcatggttgtttggtgcatttggatattattgatgggaagatatgggtacaacgagatgatactgaagatggtgttacttatgagttagaagcggcaggagttcctacagataaaattgttttaggttttcatccgcaaaatattagacagcataggggttatgctgtgatctaaatcatcacgctagatactaactcaaattacaatagctataaaatttataataccgtgatgaacaagttaccaaaacgtacaaattctcagagaattggacaaagtgcggctgacctcctcaaatcagtttttactaaattttgcattgttattcctgttcctcaagaacttgatcttggcattgattttatatgtgaaattatgcaggaagagtatccaactggaaaattatttaatatacaatgcaaaggtacagaagaagctgaatccaaaggttcttcaatttcaattcctattgaagtaactactcttaattattggttgcttcagaaaaatcccacattcttgatttttgttgactgtcaaaattatattttttattggtcttttccaaaagaatttcttacttcacttaataaaaactggcaaaaacaaaagacagtatctatcccagtttaccgtcaaaactattttgaccaaggtataaactctttaccagatcaattattgtcaatagttgatttagaggcttctgttactcctaagcatggaaattatctgggaactttaacacttgccgatgctatagacagagctattaattctggattggatatactaaatgctcccttatatcgtcctttccagtatattggaatgtccatcactgatgccgcaaaagcagttggaggaaagcctaatgaaaatggtaatattatcatagaatctgatcaatcttatatgctgttggaagcagaaggaaactttatcagctatgtagatgttaaacttaaaaagactgcgccttggagtccaaaccgcccatttgattctgaacaaatcttaggtgtgcttagtattaatccatccgagttagaattagtccgcagacggacagactattacacctattatgaccataagaggaagttaaaaatttgtatatcctgcgaatatgaaggcgcacctgtatcagtgggatttggtagtaagtattataaaatgtaagccataaaattatgattgcttgaaaatcaaaatcattgcaacttagttttatgcgatcgctcctcttttcacttgagttaaataaagcaacctatgatagatgtgttacagtcgtctaaagacgacttttgttaagctgttacacagctaaattgtataatcctaacattctgaactcttgtttaacaggcaagatgcctgttccacttatacaaattaaatgcacaacagcttatgagactccaaattcatttggaggcatttttaaaactcaagataattccgatttaatcccctcatttaaagtcttcaaaacctgctgcatatctccacctaacaaagccggaacattcaaccataaacccggaaattctccacttttaataattccctctgcatccggtttcatttctatatatttactatcttccaacacaaaccaatccatttcttgatcaaaagttcgccaaactatatactcttttacaccattccgttgataaactcgtttcttatcatggagatcataggaaacggtactggcggcaatttctactattagttctggcgcaccggcaatataaccatcatcatcaattatggcattcccatctactctaaataacactacatcgggttgtggttcgttgtcattatcaaggcggacagtgggttcaacacccaactcaatcacaccaacagcagttttgtaagtccataaccaacctattaagtcgccatgtggtttagcatggggtgtaaagcgtaaaggagaagccacgtatacaataccttctattaattcagcttttttgacatcgggtgtcgcagtataacgacgttcaaactctgcacgatccaggcgatcgccattttccaacaatggtaaattcgggggagatttagcaatagtcatggtgttgaaaaactcttctaatctacactataacaatctgcaatcattcatcagaaaagtctgcttttagttctagcttgatcatgccataatagaacaaattatcacagctaagtaatatggttaaagtagtttcccgtcaatacgtaggtgaagccaatgtttatgatattggtgttgagaaagatcataatttcgccattaaaaatggtttcattgcctctaattgtttcaacaaatcccactctacagcttacggttatgtcacttatcaaacagcatatttaaaagctaattatccattagaatatatggcagcactgttaaccgctaacagtggtgatacagataaagtgcagaaatatctgaacaactgcacaactatgggaattgaaattgatccgccggatattaatcgctcaggtttggattttacccccgcagataataagattttatttggattttcggcagtgcgaaatgtgggacaaaatgcgatcgcctgtattttagaagcaagaaccgaaggaggagtatttaaatctctggctgatttttgcgatcgcattgatttacgtgctgttaaccgccgtactttagaatcattgattcaatgtggagcttttgacaaaatagaacctaaccgccatcaattgattaaagatttagaattagtctatgaatgggcgcaatcccgtgctaaagatagagccattgggcaaggaaatctctttgatttgatggggggaggatttggtaataatggtaatccaacaacaactaacaatggttttgaatctgcacctaaagctgaaacagttttagattatcccccacaggaaaagttgcggatggaaaaagaattattaggtttttatgtatccgcccatcctctgaaacatattaaacaatcatcttctttgctctcaccaattaatttggcacagttgggagaacaaaaagataaaacattgatttgtgcagttgttatgctcaatcacgtgaaaaaagtgatgactaaaaaaggtgagcaaatggcaattttacaaatagaagatttaacaacagcatcagaagcagtggtttttcctaaaatttatgaacgagttaattcactattggaaatagataccagattaatcatttggggaaaagtagacaaacgagatgaacaaactcaatttattgttgaagatgccgaacaagttgaaaaagtgcagatggtagtagtggaattaaatccacaggaagctgctgatattgaagtcaagcgtcatttaagttcaattttaacagaacaatcaggtgacaataatcaagcaaaagttcctgtaattggtattattcaggcaggaaattctcgtcaactggtgcgttttggtaagaaatattgggtacaagattctttcttaactatgcaatctttaagaaatgctcacttctctgctcatgtaaaacaattgacggatacttagtaagtattcagctatcagtaatcagttagctgaatacttacgttttgctgatagctacaacttatgtgatttgtgataacatttccagtcagagactggcaacgagataaatgagatttgagaaaaaatcaatgtcaaaatgaggtaaactaaaaatgttcaaaacaatactgttgcttttcattggttttttgccgtctctatggtccttgtgggtacttggcaaaaaccagcaacggacaagcgcacggaggagacaagtaactcttaactattcccagatagaatcatatataagaccagttccagacgattgcgccgaacatatcgacgaaggcgatcgctattatttagaaggtgtaggctatttaataggtgatattagttgtaaatttaatgctcgatctggttacgtccgttgtgctgtcaaccctagtggaccttgtcaaaactgccgtcactatgaacctagagagttaaccagtagcaagcaaatttaactatacaacaatataatataaaattattgcattctcaatatgaaaaaaagaatcattttacagggatatttttcatgacaatctacttttatcatactcgtgaacaatatggttgtttttctaacttttcaccacatggatttgcattagataatttatattggtttacaagtgaacattactttcaagcacaaaagtttattggtacaacacatttagaaaaaattcgtcttgttaaaacacccaaagaagctgcaaaaatgggtaggcaaagaagtcgtcccttgcgttcagattgggaacaggtgaaagatgatatcatgcgaaaagcggtgttatgtaaattttccacccatgcagatattagggaaattttgttgtccacaggtaatgaggaaatagtagaaaactcaccgatagattattattggggttgtggatctgatggtagtggtaaaaatatgctgggcaaaattttaatggaagtcagggaaatcatccgactgaactaaaacttaactaaatactcagactagaaatattgctgaatttcaattaaaattttcgtaaaatcttattatcatcaatttttatcctagttaatggctaaaataggtattgtagaggttttatttgggattcataaaaattcaagtcactatctgtggattaggagttaaattactatggcattcctaaatattatatgaattatgaattatgtgagaaaatctattacttgttgtccgttacctgcatcgaaaaataagtatggctagaccatgcaaaatactacaaatgaaacacaaatgaaagaggattgcgatatgactacattacaaaaaacaaagaaatattacaaatggtcttgggatgtatcacttgggggtgaatatgattcttggggtcgtagtacgtactttatggaaattgatagtgatttatatgcccgtagacaaatagaagtttatgaaaatggtaatgtattattctatgataaaagccattcatccgatgattatggaatgctatgcgataaaaaattagatgataaggatattgaggaatttgaaatttccgaggcagaatttgaacaaatatggcaaagtaaaacccctattaataaataggagttagaagttaggagttaagggaattacctgtattaaaaatctgaaaaattcatcaaaatgtagatgataactgacctaaattgactgttatcgaggaattaaggaaagtccatagacgcaaatcagtaaaatcgggaatgtccatgaatgtccccatattttgtaagacttggggatcatgggtagaagcgataccaatagtggggatattagcagcaacagcagcacgaataccagaaggagaatcttctaaagcaatagcttgttctgctgtaattcctaacttattgagagcaactttgtagggttcaggatcgggtttacctgctagacaatcatctgctaaaacaatagtatggaaaacttctttaattcccagaacttccaacataaattccgcatttaactggggagcattggttactaatgcgcgtttgatttgatgtgttttggtccattctataagttcagcaaaaccagctaggggttgcaggtgggaagcactgtgacggaaaagagcttctttttcatctgcaaatttttcacctgctgctgatgataaatgtggtaaaatatccttgacaatttctgggttaattctgccactaatgcgggatttgtagaaagtttcatcaatttcgatgctgtgatttaacagcatttctctccaagcttggtaatgtataggatcagtattgacaatagttccatctagatcaaagagaattgctgtcagcatgatttttttgctaaaatgtaaacaactattaagttaatttacttagtttagcgtaaatgagtccataaaatccccacattctttttttatcttgtcaataaattatgaatactgctacaacatcttttcatgtcgatgatctcctggtgcagatttataaatcggaaacagaaatggcgcaggatgttgctgaaattgtacagaagtatctatataaactgctgcaagaacaggagacaattgctttattattagctacaggaaattctcaacttaaatttttggatgctttaattactttaggtgggatagattggtcaaagataactttatttcaccttgatgaatatttaggaattaatgctgatcatcctgcaagtttccggtattatttgcgggagcgtgtagaaaaacgggtatttccaaagcaattttactatatagaaggggatgctttagaacctgttggggagtgcgatcgctataccaaattattaaaagctcaacccattgatttgtgtcttcttggtgtgggagaaaatggacatttagcttttaatgatcccgcagttgctaattttgaagatgctgctagtgtcaaattagtaaaactagatcaagttaaccgtcagcaacaagtgaaaaccggatattttcccaacttagaaagcgttccccagtatgcttttactgtaaccatacctatgatttgtgcagctaaaaaaattatttgtttagcaccagaaacacgcaaagccaaaatagttaaagagatattacatgagtcaattaacacaaattgcccagcttctattttgcgaacacaaccacaagccgtattatgtttagatgtaaattctgctagtttactatcttcttaaactgctgaattttgtcttttgttgcagatattgttgatgtaatttccaactagagaagcaactttctaaatatggacaatcttcacatttcatttcttttccaggattttgacatccacagggaagatttacaaaacattcatcaggatgtttaggaagccatgactttctaaatataaaatataaagttgcttcttgtaagcaaataagtaaatcttgcaccataatacaattaattgtgaatctaaaatgtgaattgtctaatgtgaatttcaaatgtaaattgacaatttaaaagataagtaggtcagtggatagatacccgaattctccaataattcgggtatctgaccatttcctatactttacataaattactttacataaatggtaaaattattacctcattctcaaagtagagattttatccaccaaaagacataatttaaacctgaaaatttcctcattcttgtagagacattatcgttgaaattctttactcattgaaagagttatgaaacttgtttaattaacttaccatcttccatgtgaatgattcgatcagcaatatctaaaatgcggttatcatgtgtcaccattaaaatcgcacaatgttgttcccgtgctaattcttgcatcaaattaacaacatctcgacctgttttactatctaaagctgcggtaggttcatcagctaaaactaatttaggatgactaactaaagcacgagcaatagcaactctttgtttttgtccaccagataaatcagatggataataattaatgcgatcgcctaattttacagcatgaagcatggcttctgattgcattctaccttcccattcagaaatgtttggttgtaactctaaagacatttgcacattttgtctagctgttaaaaaatcaagtaaattatgagcttgaaaaatataacctatttggcgacggacttgcactaatttattatttcctgctccacataattcttctccaataaattttaaacttcccttttgtacagaacgcaaaccgccaatcaaagttaataaagtagtctttcctgaaccagaaggaccagtcataatgacaatttcaccagatttaattgataaattaatgtcaaataatatctgattttttaatttgcttgtaccaaagtattgattgaggttactaatttctaaaattgcgtttgattccataaaatccataatattatatgggttgatcaaagtaactattcagaatccagactagcgaaaaataacatattttccagtctaactagataattatcataagctctgaaagctttctttctattcctggtttcaccagcaatctgactcctgactcctgaaatattaattagaaaatttctgctggatctaatttgcgtaatttattggtagagaaaaatcctgaagttaaacacatgacaatagcagaaattaacactattaatgctttgttcatatccatagtaatgggtaactgagttgcgtttttggcaatatcataaagtcccaaggatatagcaaaaccgggaatataacccaaagctgctaaaattaaagcctgttgaaaaaccacccgtaagagatatttatttttaaaacccattgctttaagagtagcaaattcaacgaaatgggtagatatattactataaagaatttgataaacaacaattaccccaaccacaaaacccatgatcaccatcaagttaaatacaaatccaatcggtgttcttaaagtccaataacttttttcaaattcaataaattctttacgagtcataacgataacatctttgggtaacttagctgataaatttgtcaaaacttttttggaatcagcaccaggttggaggtgaattaaacctatgtctatgtcatccacatctcgcccagcaaatattcgcataaaagtagaagaaccaacaattaaattaccatcaactccaaaggaaggaccgagactaaataaaccactaactttaactctgtaacctactaaacctgtataactaaatatttccatagtcacaggtttattttgctgataatattcagcaattggtccaaattctggacgtgaagcacggtcaaaaaatacttgatcaggtatttgcagtgactgaaaatcatcttgcagttctggtaatttaaagattgattttactggatcaaatcctaatacatagataggatacttacgcccattaatgggatttttgaacttagcaaactgtacatataaaggatcaactgctgacacatctgcaaaacctaaagtttgatataaacgactgcgaggaaaactttgattagaagttaaagacctatattgggcgctaattaaaaataagtctccttgcagatttttatgcaattgtgtagcactagcatacaaagcgtcttgaaaaccgatttgcataaacatcaaaacagcaacaaaagcaattccagctaaagctacaaaaaagcgaactctttgtttagctaattgtagccaagctagaggtatattcaaaatcatatttaaaacctctaaaattatacattagaatgattaaatgtcagcagtcagctttttaattgttaaagattctgactcctttacgggcgttcgcgaagcgtgctggaagcatcagcattcgggcgaacaattatcaatttttatcacaggttattttcctgtaagggcgaagcattcgggcgaacaattatcaatttttatcacaggttattttcctgtaagggcgaagcattcgggcgaacaattatcaatttttatcacaggttattttccgaatgcttcgcccctacgactcctgaattattagcttatattttgatcattacctcaacctgtaagttagttaaagctgcgactttttggttgtcttttgggtcattaatacgaattttgacatcaactattttgttgtctgtatcagcaccgggattattattaaagatattttgtttaccaacttgcaaaccaatgtctgtaactgtgccttgaatttttcctgtaaaagcatcagcagtaatttccacagactgacctaaacgcacttttttaatatcagtttcgtagacttctgcgactacatacatttgttgagtattacctaattcagcaatgccattactaccaattatttctcctggccaagcattaatttttaacacttgtccatctattggtgaacggatagaacttaaatctagttctgcttgagcttgtttaacagatgctttggcaatttcaacatctgctttcgctgcttgcacatcggtaggacgaacttcggcaatactatcaagtctagcttgggattcatttaactgtttttgcaacgtttctacagttcgatttaaggcagctttggcttcatttaattgttgttgtacagtatccttgcgtaagcgtttagtatcagcatctgaagcagaaatagcaccatcttgatataatttctgatatctttgattttctgtttctgcattatttaattcagcttctaaacgagcaattgttgctttttgtgcagaagtttcaccccttaactcagcttctaaacgagcaattgttgctttttgggcataaatatcacctttttttgctccagcttctacttttttcagattagcttcagcaacttgtacttgtcgtttagctttttctaaagctgctagattaggagcgtaactatcaagaattgctaatacttttccttcacgaacttcatcacctttttttaccaaaagtttagctactcttacaccccccaattgtgtacctggagcagacaaacgaataatttctccttgaggttctaaacgtcctaaagcagcaacagcagtcactattggactaggactgctgataggaactggttcgtttgatttagatttggaattaaaacgtgaaagactgtaaaaatatactacgccagtagctacaactgtagtcattgccaaagttattgacaaccaatttacagggtttgcgaatgactgcttttctttgtgtaccataattatgcctttaattatgcccttaattatgtttttgaattggcaattagcacgttgtttttcccctcatggggttaatagaagctgctatctcgatcaataaaatcaatcaaagagatagcgcagtacacttgatagcattccctgataatgttggtgcaacttaacctcagcattcagttgtcagcagtcagctttgtaacggttacgctaataattactttttgataatcaaccaattgatcaaacattctgactcctgactcctgactcctaaatcctgaattcttatgttttttgtggttattaatatttgataaattgggtaaagatagagctaggaagatggatatatatccatcaattccttagctgtatcggctgtgagcagagctatttagtattttctgcacctgtaaagtgcatggttatttgttgagcatcacttctgttttctttttcataatcgccaagtattcactgcgagttccatccacacgataatgatcacaaatttggcacaatttaaggatatccaagcggctgaatactttttgatgttcaattccgttgtcgttgcgccaccgccaaaaagttgttctatcaattcggcgatcgctctctggccatctacgtcgtgatagaaattctaccaattcatcttcataaaaagagtagccttttggtaatttcagcagttcttctctcaactcatttagcggtatgagtggatctaattcagatagtctcatgccagcaagcccttatagtttcttgtaattaccattttgcagaaatctacacacaatctacacacaatctacacacaatctggttaaatcgcatgaatttttactgcaatactgggcggttaagagtagatagattgatgaattaataaagtgaatttatatattcactccacctaaattctggatctacccactacgttaaacgaacagcatggatttacatttacatcattcaatcacacacaataaactgattaatgatcaatttcaagtcctatgcaacaaatttattcaagaaaatttgcacgtagcttgacagattgaaaattcatcaatatagttgatttgcatttgatacttaaatacctaatttaaacgcttttctagtcaaaaaaatgattagtctcatactttagatatagccgttagttattaaaattacagatgtttttctcttctgataaaatatagcttcatcaattattaaagacgttggtaatttaaatattatttaaaacttatttaaataagataaaaaatctgctctgggatagatgcaaaattcacaaacttgtaaaaatacttccatcagtgaataactggttgaataaatatccttgttgttacctgatatttttttgttctttctattccctattccctaccttcaaagatatgcaatttatatgcaacttttgtaatcaaataaaaatcatcagctaaatttgatagtaattggataagcaaaaagctcacgaattaatatatttcaagctcaagcaaacttaggtttcatccaacttgattaagttgcatctaagttgcatataagttgtaaaagatttgtcaccagtctaatatcaagataagttagcggcaatttaaagttacagggaagaggattaagttttttctatgaaactatccttgcttgagccgccgagcaaagcattttaccaaatttaaataacaactttctcaaaaaaattcaatcgcacaagaaacaaagatattgtcatggctgctgccaaatttgaagctgcattagcacaattgcaagatgaagttagtaattgtgaaaaggctttgctcaagcttattgaggtgaaaaaaaatatgcgcgatcacaaaaacgatcacaccaatttagacagtaaaattaatagccaattgcaacaaactaacatcgcaattattggcatggcttcgatatttccccaatcaaaaaatttacaggaatattgggagaaaattattcaaaaagccgattgtattactgatgttcctccttctcggtggaatatagatgattactatgatcctgatcccagaacaccagacaaaacttactgtaaacggggtggatttatcccagatattgattttaatccgatggaatttggtttaccaccaaatattttagaggtgacagatatttctcaattattaggtttggtagttgcgaaagcagcaatagaagatgcaggttatagtgaatctagagaatttaaccgcgatcgcactggggtaatattaggtgtagcaattggtagacaattagcagtacctttaggttcaagattgcaatatccagtgtgggaaaaagttttgaaaaacagcggtttatcggatgaagatacccaaaaagtaattgagaaaattaaaagtgcttatgtacaatgggaagaaaacgccttccccggaatgttagctaatgtgatttctggacgtatcgccaaccgactagatttaggcggtatgaattgtgtagttgatgctgcttgcgccagttctttaggtgcattaaaaatggcaattagcgaattagttgaaaatcgcgccgacatgatgataaccggcggagttgatactgataattcgatttttgcctatctgtgttttagtaaaactcctgcggtttctccgggagaaaaagttaaaccatttgatgcagaatctgatggcatgatgttaggtgaaggcgtgggaatggtggtactcaaacgcctggatgatgcagtgagagatggcgatcgcatctatgcagtcattaaaggtatcggcagttccagcgatggcaaatataaaagcatttacgccccccattcccaaggacaagtaaaagccctccgtcgtgcttatgaaaatgccggtgtttcaccagaaactgtgggtttaattgaagcacatggcacaggaacaatggtaggagatcccacagaatttagatccataactgaagtttttagtgacaacaatcccaaaaaacaatatattgctttgggaacagttaaatcccaaattggacacaccaaagccgccgctggtgcagcaagtttaattaaaacggcgttagcattacatcataaagtattaccaccaacaattaacgttactcaaccacatccaaaactgaatatcgaaaattcaccattttatttaaacacagaaactagaccttggattagtaaccaacccagacgcgctggagtaagtgcatttggttttggaggcacaaattatcatgttgttttagaggaatacaccaatgaacatgaacactcgtatcgtttacacaattctgcaaaatccatcctcttatttgcacccacaaccgcagaattattatctcgctgtgagaatatccaacgacaactagaatcagaaaataaagaacaacattatcaacaactaattacagaatctgaacaattagaaattcccatcaattatcccagagtgggatttgtagcagcatctttgacacaagcaacagaatttttaccagtcattattgacttactaaaaaataaaccgcaatctgaatcttgggaacatcccaaaggaatttattaccgaaaaaaaggaatagaaactacaggaaaaatagtggctttgttctctgggcaaggttcgcaatatttggaaatgggacgggaattagtcattaactttcctaacttacgtcaaacctataatcagatagataatttgttttgtaaagatgggttaaactctttatccgaagttgtatttccgccgccagtttttgaaccagaacataaacaaaagcaactagaaacactgcaaaaaaccgaatatgcacaaccggcaattggcgcttttagtacaggtttgtacaagatattacaacaagcaggtttgaaagcaaattttgttgctggtcatagttttggagaattaacagctttgtgggcggggggtgttttaagtgaagaagattattttttcttggtcaaagctagaggacaagcaatggccacacccacagaaattgatgccgggggaatgttggcagttaaaggtaatgtcagtcaggtaacggaattaattaaagactttcctcaggttgctattgctaattgtaattctccaaatcaagtagtattagctgggaagaaagcagaaattaccaaagtacaaaatgttctgcaagaaaaaggattttcgacatttttattaggagtttccgctgcttttcatacaccattagtagcccatgcccagaaaccttttgcccaagcaattgaaaaggtaacttttaatcaagcgcagattcccgtttatactaatgtcacaggggaattgtaccccaatcaactcgcagcaatgcaaaaaattctcaaacaacatttgttaaatcaggtgttatttcaacaagaaattgagaatatatatgcggctggtggttattgctttattgagtttggacctaaaaatgttctcaccaacttagtaaaagaaattttaggtgaaaaaccccatatagctatagctttaaatgggaactatcgtaaaaatagcgatttggtattaagagaagcagtcatacaattgcgggttgctggtatacctttgcaaaatctagatccatatcagattgaaactgaaatacccgaagttaataaaaaggatcaaaagaaaattttgaatgtgcgtttgaatagtacaaatattaccgacaaagcacaaaaagcatttgctaaagccttagaaaatggtcatgttatcaaagcggaaacagcaaaagttaatgaacatcacccacaaccacaaccagttgcggatatcaaaattaccgtcccaaaaaatcaggaattgttagtagaaaaaagcagtaatggtaagactgtgaataaggatagtaacggccaattaaaaaaaatagaacaacctgaaaaaatagaacaatctgaaaaagttgaaattcaactttctaattatgacagagtaattgacagattagaacaatcattagcagaatttactcgccaacaaggtgaaattacacacgcacatgaacaatctttgcaaaatcaaacagagtacacaaagacattttatgaattaatgcaacaacaatattcgttgttagcaaatgacgcaagaaatgaacatcaagcgcaaacacaacaactagcaatttctagttgcgaacgtagcataatgcgattgcatgatcatcaagctgaaactatccgcattcatgaaaaatatctcaactatcaacaagactacgccaataattactttcaattactgcaacaacattatgatttttggcagattactgatgatataaatcaaaaccaatgtccttctcaacctcttcctcaccatttcctaaaagcacaagaaaacggaaaaagcttaattaaagaaaatgatttgaatatttcccctcaccttgtaggagaggggttaggggagaggtttatttcccctccccaaccagaggagaagttagaagagaaatcaaatactattaacgtcgttcccacaactccaattaatatagatacctccaccctcagtcaaactctactcaatatcgtcagtgataaaacaggttatcctgtagaaatgttggatctatcaatggatattgaggcagatttaggaattgattctatcaaaagggtagaaattttaggaggacttttagaactttatcccgacttacccaaaccgaatccagaagaattaggacaactgcggacattggggcaaattgccgagtatataaaaactctagttccagagttgctaaatcaaaaatcagaacacaaagtagagagttcagaaacaaaagaaccccaaaaattacccgcaccaatgtttgtagaagttcctcatgaaactgttgaacatgaaccgcaatttttagcatcttctaaccatcttagtaatacacaaactgatgcggcaattgtcatctcctctaacgaagatgtattagttaaatctgaaaatcaagaaataaaaatccccacagatttgagtaacattctgctcaaaattgttagtgataaaacaggttatcctgtagaaatgttagaactatcaatggatattgaagcagatttaggaattgattccatcaaaagagtagaaattttaggaggacttttagaactttatcccgacttacccaaacccaacccagaagaattaggaaaattgcggacactgggagaaattgccgagtatatgcaacatcaagctgagggtttaacccagttgtttacgcaagaaaaacaggatgtcaaagaacaggaatttcatcacaaaattcttcgcagtccagcaaaattaaaaccactaccccaacctgatattttagatttcaccattcctgaaaatcacattgttttaatcactgatgatggttcaccaacgaccgaaaaattagctaggattttaacaagtagaggttgtaaaattgtagttttaagctttccctctacgcaatcagatttacccgtaggaattaatcaggtaagattaaatgattggcaagaagagagtttacagcaacagttaaccgatatttctaataagtttggtcttgtaggttctttcattcatctacaccctgtattgagtgatagttcggaaacagaaaaaaccattctctgtcatgtctttttaatcgccaaatatctcaaagaatcactcaatcaagcagaaacaaaaggacgtagttgttttttaagcattgcgcggttagatggggaatttggattaggaaaaacaaataattttagtcctattagtgcgggactatttggactgactaaaagtttaaatcaagaatgggaaacagtattttgtcgttccctggatttaagtcctgatttagatgcagaaacatcagtaaaatacatccttgcggaattgcaagatccgaatttattagttacagaagtaggatataccaacaaaggtagatgcactttagttgcagaacccaccccattaaccattaccaatcaccaattacccattaccaaagaccaagtatttctagttagtggtggtgcaaaaggaatcactgcccaatgtgtgatcaaattagcccaagaatatcaatgtaaattcattcttttaggtcgttccagtacagaaccagaaccagtttgggctgagggttatgaaaatgaagctgaattaaaacagcgaattatggaggattttctggacaaaggagaaaaaccaacccccatcatggtgcaaagaaaatatcaattaatttactctcaaagagaaattaaaaatacattaaaagccattgaaaaagcaggaggaaaagctgaatatttgagtgtagatatcaccgatagaaatttattaacagaaaaacttgcacctgtaattgaaaggttaggggcgataactggaattatacacggtgctggtaacttagctgataaacggattgagaaaaaaacaattcaggattttgaaacagtttatactgccaaagttcaaggtttagaaaatctcctgcaatgtgtaccaccaagtcaactacaatatttagtattgttttcttcagtggttggtttttatggaaatgtgggacaagcagattatgcacttgctaacgaaatcctcaacaaatcagcccatattatcaaacagaattacccccattgtcatgtagttgctattaactggggtccctgggagagtggcatggtatcaccagaattaaagacagcatttgcagaaagaggaattgaaactatacctctagaaatcggcacacaaatgttagttaatgaactggtaaacaccaattcaaatacaacacaagtagtaattggtagtcccttagtttatattcctaccaccttacccagtgacttaaaaacctatcacattaaacgtcaattaacattggcatccaatccatttttacacgatcatgttatagcaggtcgtcccgtgcttcccgcaacttctggactattatggatggctaacacttgtgaacaactatatcctggttttaaagcctttagttgttctaacttcaaagttttaaaaggaattgtctttgatgaaaattcagcgaatgaatacactctagaaattcaagaacttgctaaaatagaaaacaaagaaatacaaatagctgctaaaattagcagtatcacccccgacggaaaaatcagatatcatttcagcaccaatctgattttaaaacgggaaattcccacacctcctaactatgaattggtgaacttaaaccaagatgaacaattcctatctaccaatccattactatatcaaaatggaggaggtagcctatttcacggaactatctttcaaggcgtaaaatcagtattaaacgctagtcctggtaaactcaccatcgaatgtaaattaccagaaccaacaccacagcaacagggacaatttccagttcagacattcaacccctatatagcagatgtgcagattcattccctttggatttggacacaacactttcatcaaataggttgtttaccctcagaaattctgaactttgaacaatttgcacccgttccctttggggaaacattttatgtaacttgtgaagtcaaatccaaaacagaatcaaacgtagttgctgatgttattacccacaatcaacaagggcaaatttataatcgcatgattggcgcaaaaggtacagttctagttaagcaaataggttagatacctcacgcagagacgcagagcaaaaatgtagattttaccctctgaatctcgacattagataataatcttctgctctttgcgcctctgcgtgatctcttctcttaattctgaaacatggagaatcatcatgaaagaatttacacaaaataaacttccaaaaatagcaattatcggcatgaattgttttgttagtagttctccagaattagacgattttgaacgcagtatttaccaaggaaaacaatatttcacacctattaattatagtcaaaacgatagtcaaacatcatccttaccaattcccttagcagaaattgaaaaattatcaccacaacaacaattaatgttaaaagtggctgataatactctcaaaaataccaaactgcgaccagatacaaaaattgcagtgatcatggtgagtaaatcccaaactcagcaccaagataaattagccagttatatttcccggctttgggatgcaacaagtccagcttttgctgaagaaaattctgtttttttagccttaaatttagcgcaaaagctattaacaaataagcaagtggatgctgttttggtcgcagcaatggactttgctaaacaggaaaatcaccgcatagatatacagaccctcagttatgaccgaaacgctcatgaaactttaacaggagaaggtgcagcagcagtagtattgcaacttcatgatgtagccagagaagagaataattgcatatatgcagtaattgatgctttaagtgtattgcaaaattctccatatcaaccagaaactgtcacccaagcttgtcaaacagctttttctttggcagaaattgaagccaaagatattggttatctggaagtttatgctagtggaattccccaacaagatgatgcagaaattcaaggtttaatcacagcttatagaacaggaaaaaccaatttacattgtgctttaggtagcgttaaggctaacattggtgacactcacactgcatcaggaattatcagcttaattaaaacagcactttgtttatatcatcgctacattcccgcagttcctcaatggactggagtcaaaaaaccagatatttggcgtggtagtcccttttatgttgccacagaatctaaaccttggtttttagaatcaggtgtgaatagaagaatagctgctattaatagcatggaagctgatggcagttatgtacatttaattttgtcagaagataccagtcaaatagaacgcagcagtaaatatttagaacaaatgccttattatttatttgctatagctgccaaaaatcaatcctcactcctagacgaaattttcacactacaaaaaaaactccaaaattatcctactttatcccaactagctaaccaaacatttagagaatttcaaaaacatcaaattcaaaactatcaaactcaaaactatcaaaatgccaattataccatagcaatcttagcacgtaatcaagaagaattaacaatagaaatagatcgggcaattcaaggtgttaaaattgcttttgagactggcaaagattggcaaactcctcttggcagttattttacagccaaaccacagggaaaaaaaggtaaagttgctttcgtttatcccggctctttcacatcttatcttggcataggtcgtaacctcttccgactatttccgaaaatttatgacgatccagtaattaacaacgtctatgaacgagttgctaagattgaaaaaacaatttatccccgcagcatcaataaacttgcaaaaagacaattagaagtcatagaacaacaattaatagatgatccagtaacaatgctggaggcagaagttggcattgctggactcatgacagcaattctcaaaaattattttcaaattcaatctcaatgcgcttttggctacagtcttggtgaaaccagtatgatgttagcccaaggtatttggactagctttaaaagtaccagtgattacttgaactcatctcctttatttaaaacccaactatcaggacaaaaaaatgcagttcgtcaagcttgggggataccgttaaatagcaatgttccagaattttggagtaactacattctgatatgtccagtttccgaagtgaaggaagcaatcaaacatgaaaaccgtgtgtatatcccattaattaacacaccggaagaagttgtaattgctggagaaacacaagcttgtaaacgagtcattgaaaacctcaaatgtgatgctttccctacatcaataaatcatgtaattcattgtcaaccaatggaatcagagtacaatgaacttgctaaaattaacacattgccgattcaaaatataccagaatctactttttattctgctgcaaattacgaaccaattacaattgatagtcaaactataggacataacattgctaaaagtctctgtcaacaacttgattttccccgtttaattaaccgcgtctacaatgacaacatcagaatatttattgaagtaggagttggtagcaattgtacccgctggataaattcaaccctcaaagaaaaagaacacctcgctgtatctatgaatagaaggggagtagatgatcatacttcaattattagaggattagccaaactcgtcagccatcaagttgaattagatttatcacccttgtattctctttctggggtaaatagtcaaactcaaattcaattagaacccaacagtaatttccaaaatccacctttaatttctctggaagatttaaaatctatcacccatcatccctctaatctgcactatcaaaaattgagtgataacaatgcactcatgaataaagctcacagttttttattaaaatcacgccaagcatcattacagcaaatcaattgtttaattcaacaaaaaataggcatttacaaaaagatagttgaacaaagagcaaaaattaaataacctgtatttgtggtgtatgtgtggggtgggcatcttgcccgcccaaataagggaatttactaatagataaagggatcaggtgcaggaagtttagataatatcaattaattggataattgatttttcggagttcccaaaaccaaattagatgttaagaggttgactcaaatgtacaatacagaaaatagatcgaatcaagaaaataatctccagttttctaacttattcatcaaccatcatcaaaattggcaaggtaattttaacaatgtttcctttgatgcagaacaaattaaattaaaactgaggaatttagcaaaaccatgttatatagttagaaatgaagggataattggcatcacaaacgaaggtaatttatctcatgtcaataatggtaaaacagcccagatggaaatgttaatggctgttccacccttagcaattcaacaactaggtgatacaagtttcctcgatttttatggtgtaaaatatgcatatatgactggggcaatggctcaaggaatagcatcagaagaaatggtaattgcactaggtaaacaaagaattttaagtgtctttggtgcaggaggtttatccccttcccgtgtcgagagtgctattaacaaaattcagcaagccttaaatcaaaaaccttacgcttttaacttactccatagtcccagtgaaccagcaattgaacgtcttagcattaatttatatctcaaacatcaagtcagaattgttgaagcatctgcatttttagatttaactgacaacattgtttattatcgagccgcaggattaagtttaaattcagccaatcaaatccaaatcaaaaataaagtcatcgccaaagtttctcgccgtgaagttgccactaaatttttgcaacctgcacctacaaaaatccttaaacaattagttgaacaaggtttaattagtgaattacaagccaatcttgccagcaaaattcctatggctgatgatattacagtagaagcagattctggaggtcatacagataatcgtcccctgatatgtttattaccttccatcttagaattacgagatgaaattcaaaataaatacagatatgaaaaccccgtcagaattggcgtagctggcggaatttccacaccaaaatcagccttagctgcctttattatgggtgctgcttatgttgttaccggttctataaatcaatcttgcattgaagccggaacttctgaatataccaaagaattattagctcaagccgaaatggctgatgtgatgatggcacccgccgcagatatgtttgaaatgggtgtaaaattacaagttctcaaacgtggtacactctttcctctccgcgctcaaaaactatatgaattatacaaaaattacaattctattgaagatattaccctcgcagagaaagagaaattagaaaagcaaattttgaaaaagcctgtgcaagaagtttggcaagaaacagttaattatttatcccaacgcaacccagataaattaaccaaagcagcaagtaatcctaaactgaaaatggctctaattttccgttggtatttaggactatcttctcggtggtctaacagtggagaaaaaggtcgagaaattgactatcaaatttggtgtggaccggcaatgggtagctttaatgattgggtgagaggttcatacttagctgaaccaaaaaatcgccaagtagtagaagttgctgaacacattatgacaggagcaacatttttatatcgcatccaaaacttaaaaatccaaggactacaaattccagatgaatacagtcaatattttccagaaaaattatgaatatgccagacaacagagaattaagcagtctggaagcaacaatggaaatcctcaatagccgtgctaaaacctggaatttagttactattagtcgcattaacggcaacctccaagaagcagttatcagacaagctttagatattattcaatatcgccatcctagtctaaattctcgcattatccattctcaaaatcgtttttattttaaacccataggtacagaaaaaatccctttgcaaacagttataaatttagatgaggaacaatggcaagaagttgttaatcaagaaatgaatcaggtaattgatagtagcaaatgtctaatgagagttgtcatagttactatcaaggatgagccaaaaattaattatctaatttccaccttgcaccatgcaatttctgatggtttatccagtattcaactgcattcagaaattttcacttattaccaaaaacttacatctggtgataccattcaagaagttactaccttagaacaactaccacccattgaaaaactactacccaaatatacacaaggttggagagggaatacaagcagatttttattattgttaaaaattggatggcaaaagttttggaaacaaccaaaaacattaaattttgaaaagtatgtacctatttatcaacggaattgtgcaattatccataaacaaatttttgcagatgcaactgaaaactttattgctcaatgtaagctagaaaataccacagtcaacagtgctttatgtgccttactaatgttgacagtagctagaaaaattatcaaaccaaatcaaaaaagtgtctgcatgaattgtctatcttatcttgatttacgcagacgtttgcaacctgcaattaataaggaaaacttagctgttttagctacatctctgatggggtttcacaccataaacaaaaatacatctttttgggaattagcaagggaagtaaaacaaaatttagaatcgggaattaagcacggtgatatttttaatatggtattactggctaagtatctaaccaagttttgttttatctttcctcaacaagtagcagctacagtttcagtatctaatattggcaaggtaaacattcccaaatcctatggtgaattagaactagaagagatcagttttgcaggttctcattctttatatgcaggtatgtttgtgattcatgtggcaacttttcaaggcaaaatgctgttaaactttgttttttctcaaccttcaattagtcgggagacaatggaagatatggtaaatcaagttgtctgttacatccttaatttatcatccaatactgcaaaaattagaggtgcataaataaatgagcgaaaatctttatcaacactctgtaaaaacagcctttaataccgcagatattcaagcttggctaatagataatatttcccacatattgggacttaacccagaggaaattgatattagagaaccgttagatagctacggtttagattcatctcaagccataatacttgcgagtaaagctgagaaatttctgggatttaaattatctctaatccatttgtggtattatcccaccattgaagaattggcacagagattagctgaagaattagaaaattcagactcagaaattttgcagatttaaacaatacataaacatttttgtaagaatttagcttgtaatttccagcatttttcgcaaattaacacgacacaaataaagacacgaataaattggcaattctttggtgttagctgattgctgatggctaatagctgaatacttacaaattttcaagttttcctcctctaagactgacacttcgcacgaatggaggaaacatcattcagcgaagtgtcttcttttccttatgctttttagttcgttaaaacctgggagatttagtcatgaacgcatccgaaattttagcgaaactcactcaacaaggcgtggaattttgggttgaaaatagcaaattaaatattcgttctcctaaaggagtaattacaccagaaatacaagcggaaatagccacatataaaggagatattttggcattattacaagaaatgaatatcgctacaaaatcagcttctgaacctctgattcaaggaattagtttacaaactattggcaggttaataagtggttttacgggtgaatcacctataggatatcagccaccaattattaatccacaaatgatggctcaaaatctcagtgtgacatttagacctttacctcatggttatcataatcaaacaattattaaattccgccaagaattagcaattaaattaaaaaacttgggtgttactgttatcccttggcaagaagcaaccacggaaattttctatgatattaaaattcctttagttaattggaattattctttaaaaatcaagggtgtacgagcagaaattgatgcagtcatagatgtagaacgacctaactcatggttgagaaaattaggaatatttatagccgaaaatttttatagtttatcttatccctggctagtaaatcagcaaagactgtctgttgttcaaatcgctaaattaagtagttgggcggaagatcatgcagctaaatatgtggaagatcccacaaatactcaagtgatcattattggtgaactagatgaggagtttgtaaatcctttaaccaagtatcaagacaaaattagcattggcatcaatacactcattaaaacattttccgaaattgtcattggcgtatctaatgataaaatttccattctcaatatgaatctatcagattctattttcgagagaacagaaatagataattttatttccaaatctctgattcctaaagtttttgttcccatcgctcccctgttaatgaatagatttgaaatcggagaatataatccttatatatctagctatgctcataaattggtgaaactaggtcaagaactagcatcaactggtttatttccaccaggttttaaattagcggaagttattaaaagaaagtcccacagagatattgttaatgtcatcgtcaatggtagaacgggagtttcttatggttttgtcgcttatgcagaaccaccttattatgtaggaaaaccagaaataactgctgctgaatgggaaaacctattacctgttggtggatttagtagtaatgaaattcgtacaaatgaggcaggtagacgttatattaaaatcctcattgctggagaatatgtatttaaacaaatccccgatatttggttacttagttctcgttccggtgctaataaaacagacttaaatcttgaaaaagatatccttcgcatcgggttaaaaaataatttacatctgcaattaccactaggcaatcagtcaaatacactagatatcaaaccttcctatgatatctatgtcatgctggcaattactctaggtgcggctttatatacaccagaattaattgcaaatggtgcgccaattgttcactttcatggctatcctgcttatgattggtttcaagaaaatgaatattgttttggtgttgataatccttctgtaccctgtggaacttatgaatcaggagtgtttaattttttaggtttttctaacttagctaatcaaccaacaaaaaatatcaaattacttagtttaatagaaccagatcatggcacaaattttattgctcgtgatatggactatttagttgatagattaaaaaatggatgtgtagcagaacaaattgaattaggtggacaacattttgctgctctcaaagcaaatataagtagtaaaaatcaattcatcattcataggaaatagggaacagggaacagggaacaggtaattgggttattaatctccctggtgaaaaaattgagtaatttgtgagaattatgaacatcaattccaaaacattactgattacgggaatagataactttattggtttacgtgctgctgaattagctttagaacggggaatgaaagttcgtggtttacaaacttctgggaacagaaaaaataccaataatttggatattgatttattatttggtaacatcacggattttgccattgcccaaaaactttgtcaagcagtagatattgtttttcataccgaacaattagcagcagaaacaggcgatatcaagaaatttcgggaaataaatgttggtggtacaatgaatatcgcaaaagccgccaaagatgctggtgtgaaaatttttgtgcatctttccagtgtcctggtttatggttttaactatcctcatcaagtgacagaatcagaattgctttgtggagaaaataacccctattgtcaaacgaaaatagaagcagaatctgcacttttacaattgaacgcaccgccagattttaatattattattatccgcgctggtgatgtttacggtccgggttgtattccctgggtagtgcgtccacttttattgatgcgtcaaaatttatttgcttatgccaatgatggtaaaggtgtaagtaatcatctctatatagataacctcattgatgctatttttttggcagttgaaaaagaaccatcgggagaaatatctggagaaatatttaatatcacagatggacaagaaacttcttggaaagagtattttacaaaattagctgcaatagaaaatttaccagcttttatttctctacccaaagatgaaatgaaattattgttgcaagtgcgttaccaaggtcaaaaactgttacgaaaaaaagccgatattctgccagaatctttagattttatcactcgtccttatgcctattctatcgctaaagctaaaactatgttgggttatcaaccaaaagttgatttgactgaaggaatgcgtcgtactcatgaatggttgaaaaaaactgatatccaaaaattgatttagggagtatcccaactttgaaaaaaatcaacacagccacaccaaaaactctctgaaactctcttacctttgcgttctttgcgccctttgcggtaatgcctccagcacgctacgcgaacaatcatatcaggatattagtgcatattatttccatagataaaaataaatttacacatttgggatgctgccttgatttcaagctaaattcactttaaacctgttcattttaatcacctattgggagttcaatatgttgagtaatttcacttctctgcctgaaaacttgttaaataactttatatcccgccctaatcactatcccttgagaagattgttttggaaaggatggtataaccttttcgcggctaattatagcaacataaaaattacttttatcaactatggttatgcagatgtagaaccgaataccaaacaactagaattgaacccatctgaagaagaagaacgttattgtcttcaactttatcatcatgttgccaaggctatctcactgcaagaattggatgttattgaagtaggatgtggacgtggtggtggttcttcatatattatgcgttatttacaaccaaaaacaatgaccggggttgatttttccaaaagcaatatagcattctgtcaaaaagcacattctattccccaactaaattttcaactcggagatgcagaatctctaccatttaatgattgttcctttgatgtggtcgttaatgttgaatcgtcacattgttacggttcacctgaaagttttttcgctgaatcttttagaattctgcgcccaaatggttactttttatttactgattttcgcccaagaaaagacattgaaaaaacaaccatatcattaaaaaatactggctttaaaatattaaaatcggaaataataacacctaatattctcaaagctatggatttagaaaatgaaagaaagctaaaaataattaaccagtatattcctaaatacttacacatagtcgccaactggtttgctggatgccaaggaactcccatgtatgaaggatttaaaaatggagatcaagaataccttttttatgttttacaaaagtaacttttctttcaacaaaaaatgctcgatttaaaaatttatgaaacgttcattgctatgaacctctgtggaaaaacacttcttatttctggaatcggtgggtttatcggcttacgtaccaccgaaatagccctagcaaaaggtttgaaagttcgtgggctgcaacattcccaaataaaagctaaaaaagcccaaaaattaggcgctgatgtcatgattggcagtgtaactgatcctgcgactgtacaaaaagcttgccaaggagttgatattgttttgcatacagcagccattgtcaaagaacatggatcactccagcattttcgtgaggtaaatgtgggcggaactgttaacatggccaaagctgctcacaatgcaggtgtgaaaacctttgttcatctttccagtgttcttgtttacggttttaattatcctgatcatgtcaccgaagctgatccaatttttgccgaaaatcatccctattgtcagacaaaaatagaaagcgaaaacgcacttttgcaacttaatttcccccctgattttaatattatcattctcagaccaggagatgtttacggaccaggaagctatccctgggtaattcgaccactacaattgatgcgccaaaaaatatttagattagccaacaatgggcagggagtaattaaccatttatatatagacaatctcattgatgctatatttctagccatagaaaaagaagcatctggagagatatttaacattactgacggacaagaaacttcttggaaagaatattttacacggttggcggaaattgcaaatttacctgcacccctttctctccctaaaaatgaactcaaacttctgctgcaactgcgccatcaagggctaaaactgattcgtaagaaacctgatattttaccggaagctttagattttatcacccgtccccatgcttattccattgctaaagcacaaagtgtattaaattatcaaccaaaaattgacctagacgaaggactgcgacgcacacagaaatggctgcaaacattggacttgaaaaccttagatcagatgggttaaaatgggttaaaaattatgaaatatacacacaatcttccctgtcaatcggtaacaactttagatagtcttcccttcacttgggaacgtctaattcccaaacaaatacccagcgatccagcaagtcaaaaactttttgaaattcacctgcgacggtacgaaactgcggcaagttatgtacaaggtaaacgagttttggatatctcctgtggtacaggatacggtagtcagatgcttcgtcttgcaggggcgatcgctgtcgtcggggtagatatctgcccaaaaaccatagaatatgccagaaaccactatcaagaaaacaatgtagaatttgtctgtgctgatgctcttacctttgagtggccacagcaattcgacgtgattgtttctttcgagacgatagaacacctaccccatcctgcaaaatttctagatcatctttgcagtttgataattcctggaggtgacttactgctgtcagcaccacttggtgaaacccgacatatagatccctatcacctccatgcttttagtcaagaagatatatttacactacttgaaaacgcgaatttttctgtagaccgataccgttgtgatgattggtgtctgactcgtggggatcttctactgtggcgacagctttatccagcagccataccaaccctacggcaacagtttttcactttcagaggctggcaacttctcagcgattttttcttccggggtgtgattaatgtacctgaactcatggttgctgccaaattaattaccacctaaaaagatcaggggcagaaggcagaaggcagggagcagggagcagggagcagggagcagggagcagggagcagggagcagggggcagggggaaaagaatttgcggatttctgcacacacaagttatatcgcaagtgatttaggacttacgcaaaacagaatgaaagtaggggtaattcatgaattacccctacgtcagaatcaggttttgagtccaatcttgcataagtcctatttttaagaaaacagtcactagctactaaccccaccctagccagaacaacatcatcggctgagatttgcgccataaagcgagaattatggcaggatggaaacaagctcatgcaacgagaagtccaaaagctggttttcactctgaggaacttcataggaggcaggaggcaggaggcagttaacagcaaacagttaacagtcaatggcgataactgataattgataactgataactgatccacagtttcgcattgtcagccaaaaaaaattctggacgaagactgcttattatcgtcggaatgactgtgtgagactgcgaaaaaagaatatatactcccaaccttgactattaaatgaatccagactactcagaaacttacatcaatcatccaacgtggggtttactatataggatctgtatggttgatgataaccaggatctgtttactacactatatgcccaacgcttattttttttggtaacaaatgacgttaaaggtattaaatttcagtctattggccggactgaagccagaatgatgctggaaaatcgtttgcgtactttgcgtcgcagtggcaagccacaggagtacgatcagcttcagagtgttttccaacgcacattccaatgacaagttcaattagtgaacgtattgctaccattcgtgctgaacttccgccttcagtgcggttaattgctgttagtaagcaagtaccaaccgaactgatgcgggaagcatacagcgcgggcattcgtgattttggtgaaagtcgcatccaagaagctgccagtaaacaacaggagttacaggatctgccagatattacttggcacttcattggacatttacaaagtaacaaagctaaaaaagctctggaattatttaattggattcactctgtagataatctacatctagcccagcgtctagataccctggcgcaacagctaggagtgagtcccctggtttgcctacaagtcaaaattctccctgatcctcacaaggctggttggatcatcccagaactattagcagacttgccagcacttgatcaatgtcaaaatttgcaaattcaaggtttgatgacaattccgcctctaggtttggatgagggggaaattttgaatgtgtttaaacatacccataaacttgcccaagaaattgcctcacaaccatggagtaatatcacaatgcagcatctatctatgggtatgtctggggattatcaattggcaatccaaggaggtgcaacaatggtcagattagggactattttgtttggggatcgctcccaaatttcccacatctcaccagataaaactgtattttaaacaactcagcactgacaattacgtcagtgcctattggggaaaaccaagtagctagatttatatacttgacaaatgtaaatactaagacaaaactataggtaaagaactttgcataactccatctttaggatataattttaactcattgttatgtcaatataaagttctttctagaacagtcttttgttcatgaaaacctgtactagaaaatacaaatagcaataaaattgctcaaagcagcagcacttactagggctaccacaatttaaatctggatcaattaaggtaatttccactgggagcgtagataatgaacaacatattttctaaactaagggattttgtgggcttgaacgagcaggtagaatacgaatattacgaggaagaaccagataccgacagctaccaaaatctgtatcagcaagaaaatcctcaacctgctccacaagaaacccctgctcctaatcgacgttggcgtgaaaactcctctacaatgggagaagaagaagcagcaggatcaaagcctatgagtaatgtgattggtatgccaggcgcaattaatggaatttctgaagttttagtccttgaacctcgcacttttgaagaaatgcctcaggcaattcaagcattacgtgaacgtaagtctgtagtattaaacttgacgattatggacccggatcaagctcaacgggcagttgattttgttgccggtggtacttatgctctagatggacatcaagaacggattggcgaaagtatctttttgtttacacccagttgtgtgcaagtcagcactcaaggcggatttttacatgaagtaccccaaccaccagtacgtcccgttcgtcctacaggtactactcccacttggggtagcgaacctaaccgcatggcacaataatgaagttaaagttagtcgtttgtcaggttcaaggcaaatgactaatcactgatgattaatgactaaataactaaatgactattaaatttggtttagttggtggcggggtaatgggagaagctctattatcccgccttattgcacggggcatttatcaaggttcagaagttatagtgagtgaaccccaggaggctcgtaggagttttttacagcagcaatatggggtagctgtgacaactgataatagtttggtgttgtctcaggctcaagaggcggtaatgttggcagtgaagccacaaatattaagtgcgatcgctcaagaattagcagatattttacctataaaaaatacacctctaattatttctattttggcgggtgtgtctttaaaacagctagaagcggcttttccccaactgcctgttattcgcgctatgcctaataccccggctacagtgggtgcaggaatgacggctatttgcacaggtgcttatgctcaacccagtcatcaagcaacagctaaggaaatttttacggcggtgggggaagtggtggaagttccagaaacgctgatggatgcagtgacaggtttatctggtagtggtcctgcttatgtggcgttgatgatcgaagctttatctgatggaggcgtggctgcgggtttacccagagcagtagctaaacagttagctttacatacggtattgggaacggcaagactgatagaagaaagtaaaattcatcccgcagagttgaaagatagagttaccagtcctgggggaacgactattgcgggggtcagcgagttggaaaaggctggttttcgttctgctttaattgaagcggtgaaagctgctgctcatcgttctcaggagttggggaaagggtgatcaattaatttaaagttcaaatttagggaagtttcgcgcaaagacgcaaaggagcaaaggcgcaaagattgatatcaatcaatattttcatgcacttatcagcgaaacttcaatttcttcagcccgccaagcagcataggccagtgattcatagatatcggcttcttccaggtaggggtaagccttgagaatgtcattggaactgtatccagatgccattaagcctacgatagtaccaacagtaacacgcattccccggatacagggtttgcctcccattacttctgggttgcgggtaattctggtgaggttttgcatggctgattagattgggaaagcagaaatggctaaatcaattttttctattattgctgtctgccagtgtaaatagaaagttagtttggctattatgaggtttcgagaaaaacttttgcagtccattttccccactttctggaatttctagattatctgttaaaaattttctctaaattgtacagttatatttatatctccatagacaaattgattatatcaaatttatgacttattctaacagttgcttatctatccaattacattgttcacaatgatatcttagcgcatcctgttgtttagtagcatcttcaccagttaaacaacttgctatttttattcctctaatatcttgatagtctttcgctatttgttccgatattaatacttctctggttgttggatgaatagctatgaggtgtgcatccaaaagtctatgcaaatctactctcaaaagtaagccattagcaacatcatgagaattttgatcccggtagggaataatatgtgctgcttcaataatttgttcaatgtgacaaccactgattaaacattgataaccataagtttcttttagttcttctttaaattcttgttgtccttctcgtggtggtggagattttactgttttaacttttttcttggttaataattctatccattcggaattatgatatttttggcgttgctgaatcatgggatgatttcgcccaatttagaacgaattttcaacggtttcaaacgccaattcatccctctattatgcaacgccaaatctctttcacctttgttatagagttttaaaagttctatatcttccatttctacttgactagaaatcatacaactccttaaactaacttaataaataaaattgtctattctgtaggttaaatatattatacttaatatattagggtttttacaaaaaatttatcaaatcactcatcacgctatgatagtaaacaatgaaagttaaagaagttctggaaatcctagaagatgatggttggtatatagatcgcattagaggtagtcaccgtatcctcaaaaatgaaaataaatcaggtattgtagttgtacctggaaaaccaagtgatgatattccagtaggtacactttcatcaatttggaagcaagcgaaattaggagaaatataatgattgagtacacagtaatttatgaacgtggtgaaacaaactggggtgcttatgttcctgacttacccggttgtgtaagcattggggatactttagcagaagtacaggaaaatattaaagaagcaatagaattgtatttagaagtattgaaagaagatggacaacccatacccgaaccatctacagaagttggtaaagttgcagtgacaatataatcacaactaccgaaaaaatccaccatgcaaggactagccgttactgaaaccatcaccaccattgctgaagcagaaaaacgatttggtttaactcgcagtgaatctcaggattttttcacagaatggcatgatcaattacctgagattaaccctaatgaccgcaccaacctagaaattttatggaaacgttatatttatcatcgatctggtgggcatttgttagaaagtacggtgatgctattacttgtctctccattgctgactgttgctggtttatatgacccacctttccgcatcaaagctgaagaatctgtacaaatcacaatagccgatagcgaagaaactctacaaggtcgaatagatgttttagtattgaaagatcgcctttggataattgttttagagtccaaaaaaaccatgttatcagtttggtcagcattaccccaaactcttgcttatttaatagccagtccgaatactgatttgcctacttttggaatgttaactaatggtgatgatattgtctttgtcaaagtcaaaaatcagcagtatgccatatcaagagtatttgcacctctaactactcaaagtgaattagagtctgtgtgtcgagtcttacgcaaaattgcagaaacagtaaaatgattgataaaagtgtaaaattaaataaaagggaaaatgctatgctaactaaaacagattatgctctctggattgaagaaacggttaatctattgaaagaaaaaaactatcaaaatgtagactgggaaaacttaattgaggagattgaaagtttgggcagaagcgatcgccaaaaagtgagaagttttttaagacaattattggcacatctacttaaacgctgttatttaccacttcctcaagaatttcatcactgggaagtagaaattcgtaattttcgcgtagaacttcaggatatttttgatgattcacccagtcttaaacgctatgctaacgaagttttgccaaattgctggcaagttgctttagaaggagttaggcaagaatataaaggttttgattttcctgatcaatacccttttgctgaagatataaagggaattttacatgatactttttgggtagagcaattataattacttaaattgcgtgattttacgcataaataatctactatgcaacccaccaataaccaataaccaataaccaattaccaattactcatcacctcttccccaatcaggttatgatagtagatagtctggatgcaaaagatgattgagtgaactacaccgcaccctcttcagaaattaatttagggtcgatttttccctttgagttggatcaattccaactagatgcgatcgcctctctcaatgctggccgctcagtggttgtctgtgcgcccacaggatcgggtaaaactttggttggggaatacgctatttatcgcgctttatcccgtggtaagcgtgtattttacaccactcccctgaaggcgttatctaatcaaaaattacgcgactttcgggaaaaattcggatttgatatggttggacttttaaccggagatgcttccattaacagggatgcaccgattatagtcatgactaccgagattttccgtaatatgctttatggcacacccataggtcaaatcgggatctctttaacagacgttgaggctgtagtcctcgatgagtgccactacatgaacgatcgccaacggggtacagtctgggaagaatctattatttactgtccccgtgaaatccaactggttgccctttccgctacagtggctaatagtgaacaactcacagactggttaaatcgtgttcatggacctacagacctgatttattctgattttcgtccagttcccttagaatttcacttttgcaaccctaaaggtttatttcccctcctcaatgacagcaaaactaaaattaatcaacgtttaattagacgcggtaaaaagggtataggagaacgaggtaaaggtaatcgtccagaaccaccagcaatagtttataccctgagtcaattagcccagcgcgatatgttacccgccattttctttattttcagccgcagaggttgtgataaagcggttgctgaggtgggtgatttatggttagtcaataatgaagaatcccaaatattacgtaggcagattgatgattttttagcccgtaatccagaagcaggacgtactggacaaattgcacccctgtacagaggtattgcggcgcatcatgcgggaattttaccagcttggaaagttttggttgaagaactttttcaacaaggtttaattaaagttgtctttgctacggaaactctggcagcaggtattaatatgccagcacggacaacagttatttctaccctttctaaacgcactgataatggacatcgtttattaaaagcttcggaatttttgcaaatgtccgggcgtgctggtcgtcgaggcatggatttacaaggtcacgttgtgacattacaaactccctttgaaggtgcaaaagaagctgcttatttagctacatctcccccagatcctttggtgagtcagtttactcccagttatgggatggtgttaaacctcttgcaaacccataccttagaacaagcaaaggaactgatagaacgcagttttggccagtatatggcaactttgtatttaaaaccagaatatgatgaaattgcagctatcaaagcagagttagcaaaaattgaagcagaattagccgcagtagatgaaaatgaaattgcactttatgaaaaattgcggcagcgtttaaaagtagaacggcatatatttaaaactctacaggaacaagcacgggaagacagacaagagcaactttccatgatgttagattttgccgtgacaggaacgctgttgagtttaaaagataaaaacatgacagcgactttaccgttaacggctatattatatggtaaagctcctgaaattggacctacttcttacttagtttgtttaggacaggataaccgctggtatgtagcgacaacagcagatgtaattgatttatatgcagagatgcccagagtagaagtaccagaggatattttaccacctgatgaactaggtttaaaacggggtcagtcagtgcggggaaatgcagcaacagaggcgatcgctcagagtatacccgatccgagcgaatatatgtacatgacaccggaagtagctgctcaactgagtcgggtgaatgcagtacaatcacaaatagaaaatcatcccttgcataaatcagggaatattgccaacatatttaaacaacgagcgcggtgtgtagaattagaagcggaactagaagagttagaagaacaagtaaaacaacactcacagcaacactgggaagaatttctgaatttaattcagatattacagcactttggcgggttggataatttagcacccacagaactaggacaaatggccgcagcaattcggggtgaaaatgagttatggttaggattggcgatcgccagtggagaactagataatttagatcctcatcacttagcagcagcagcagcatctttagtcacagaaacaccacgccccgatagtcgggtacgttttaacctcagtaacgaaacagcagacgctttagccaaactccggggtattcgtcgcaagctgtttcaaattcaacaccgtcataacgtagctttacctatttggttagaatttgaactcattgcagttgtagaacaatgggcgttaggaatggactggttacaactttgtgctaatacaactttagatgaaggtgatgtagttaggttgttgcgccgtactctagacttattatcacaaattcctcatgttccctttgttactgatagtttacgaaaaaatgcccaaagagcaatgcaattaattgatcgtttcccggtgaatgaagcgatggaataaactaagcaaaccgagttcattgatcatcccataaaaccagcaaacaacaaaggtaaaagtatcaaagctgatcctattaaaaccaaagttgctggatcaattttgatgtgatttttttgtggatctggtatttttgacattctctaaaattggtagtttagctaattttaaatcattaataactgtaacctgtaacctgtcacctattatctcttttaccaggaaatttagtacccatttccgttagcgcagaaaagatgagataggtaatgagtaaagcgaaacctgcaaaaaaagcgagtaaatcgttgttcataatatacctgattttacctacaaaactattataatagttgaagataccaaaaaagtaaaaaaatgggagtaaacaatggggcgcattaatccttacaccctacaaatgcaaattaccagaatgtttgcggaaggacaatcattctttgctttaacaaaagtgcaagattggttaaaagaacataatcaaaacccgttagaatatgagattttttttcataaaaaacctgcacctcctggttctcaagaagtgatggtaatagaaatagaactgaaacgtaaagatggacaacctgtggactcttggttacaagaacaagtaaatttacacgcttaactcatttgtaagcattcagctatcagcatttagcagtcagcaaaaaagaagaaaatcatcaataataggttataaatttctctcattaacacttatgtcatttgaaagaacaggagcatccttgttattacagcagttttcatgtctttagaccacagtcagggcgaagcattcggatgataagctgttacacagctaaattgtataggactaatattttaaactcttgtttaacaggcaagatgcctgttccacttatacaaattaaatgcacaacagcttagtcttagttacttaattccctattatacaatctagctacacaacagcttacttacactaatttccacaattatcaattatcaattatcaattatcaattcttaataatcactatcagccacacaaattcctttacatttaatcccatttgtagcagtgcgtttacaatggggacataggactttttcagttgcgatatcttgatttatttctatattgttacttgcgtgtaacttgtctttttgggtctgaattttttcactcataagcatcaaggaattttttgtggtttacaaacttctgtctattctggtgtttctgtgggttctggagtaggttctggagtaggttctggagtaggtatttctgtaggtgtttctgtaggtgtaggttctggttctgggggattttctgctgtcaccgttaactgataatctgtagatttaaaagctgtggaaactacgacaaattcataaaatcccgtttctggtaatgttttggatacagtccgcaccgtagaatcttctaaaaatgtgactttaccagagggagaataaatagataataacacctgagaactagcatctagtttaacttccatgatttgatcttttgctagtccagcgatgaaaactttacctcctcctggttgtagattaccagtaactgttttacctgtagtcccaggatcaaatactattcttgcaaaggcactattagaaaggatagcattgagtttatcattaacaaatgcgtgccaaacttgtccaacgggttgctctataaaatttttaccttgatattcagggaatacacggaaaaaggcagcatcacctaagtcatacaaagcacgactgctgacgtttctgcggttaacttctactttccagcgatcgcgttctgctggggtataagttcccatttgtctaagcgctctactactcaaaagagacagtttatctagggtttgggcggctatttgatcccattcttcccgtaaatcttcgtcttctggtgtattatttaaatcacgtccttggatattggggtttttctcccaaaaaagttggttgattaaactgatataaaagttattatctatacctagctgttgacggcgatcgctcaatctttgtttacgttctctttcttcaggtgaaaaattattttccggggtggtgggggtttctgtaggtgtaggacttaatgtaatatccgggttacttccatcttggttgttcccacggttactaataccccaccacaataaaccgatactactaaataacgccacagtcacaataaatacatttgttgtagtccaaatacttgtattttggggtgtgggagtagcaactgctggaggtgcgggagttttgggaggagaaactgctatagttcctgcggtggttggggaagttgtgggttttgggggttgagtagctggatatactgtaggtgcgacaggaggagagttattaactgcttttccattcagtgcgtctaaaacttgacgtgctgactgatagcgatcgcttggtctgggagatagcattttatctaaaatgtcccccaataaaggactaaggctaatttctcgccgccatagccattgtaaattttgtgtatctattaaatcctgtggtagttttcctgtcagtaaaaccaacactgtcacagctaaagcatataaatcactgtgaggatatactaaaccggtttgcatttgttctggaggtgcaaaaccaatttttcctaacaaagttccactacttccagaagtaatttcaccagattgataatattgagaagcgacagtttgagcgacttgtttcactcccccaaaatcaattaaaactggtaattgatccacaattctcaagattaaattatcaggagaaatatcacgatgaatcacacctacatgatggatatattctaaaactggtaaaagttgttctaataactgacgaacttcaatttctgtaaattttaaacctttttgtttgcgggaatttaataaagaattatacgtttcacctgctacatgatcttgcactaaaaagagagattctttaccttgtaaattaatacgtaatagttcccgaaagcgcggaatttgaggatgttgtaattgataaagaacactagcttctcgttgaaataactcctctgctttttgcacaatataaggagtttgcacctggggagaaaattcctttaaaacacaagcttctcgaaaacggttaatatcttcagctaagtaagttttcccaaacccaccttgtccgagttgacggacaataacatagcgatcgcctaaagtttgtcctgcttgaatactactattgacaggagtttctattatcttctcaccacactgaagacaaaacttactaccggatggattttgatgtccttgagaacaataaagattagtcatagggaataggagtcaggagtcaggagtcaggagtcaggagtcaggagtcaggagtcgtaggagcgaagcattcggacaacaaattatcaattttatgaaaaggctattttcctgtaagggcgaagcattcgggcaactaattatcaatttttatcacaggttattttccgaatgcttcgcccctacttcgcccgtacaggagtcaggagtcaggagtcaggagtcaggagaaaattaataccccagtcaccagtcaccagtcacttattccctacttgatcagatgcgatcgcataccaaaactgcataaaagtctgctgatttagtttcccacgcacttgaccaggaaacaatggatcaaatttttgatatgtttcctctcttaactcctgaaatgaacgatatttacctaatctaccaccttgagctagtctatcccatctttgggaatcttctatactataactacctattttcctccgtgctatctgactcaaattagcttgttctattttctttaacaactcatctgctgtactattccactgttcccgtaaaacccgatcttccggtttatctgttaatacccttccccgcaaccctggcctgatagcataaaatctttcatctactgtcttagtaaacaccgcttgggaaatttccaactcttgcacacggttaaaaacctcctcaacactgcggtttttatttcctacattggtaggattattgatagatggtataccgggaacttccactttaggtaaactaattgatgtaacacttcttaccataaaatttcctaaggcccacataccaccaccaattaaaccgactcccatagttatagtaaaagtgacagcaaaaggacgcaaccatataggcatcggtatattttgcaatgccatgtgagtagttctatatacttttttccctggtgcagctaccattgtttgtaacctgctcaggtgagtgtttttgttattaacagaaggttgcatagtatttggattagtatttatgttatggatagctgtagaaacagaaccagaaacagatgttggtggtggtaaatctttgataacttgatctgctgtttgatagcgatcgcttggtttatatgccaacatcttttttaagactgctgttaatttcggacttactttaatttcctttccccaataccaagtcccgttataactatcataaagtaaatgcggttctttaccagtcactaacaccaaagccgttaccgctaatgagtataaatcactgcttttaaatacttttccctgaagtaactgttcttctggtgcataaccttttttacctaataaagtaccatttcccaccaacttagtctgccaaaaaccctgataagctggtaattgttttacaccaccaaaatcaatcaacacaggtaaattatcaccttggcgtaaaatcaaattatcaggcgaaatatcacggtggacaatatctaaagagtgaatataactcaaaatcgggagaatcttgtgtaaaaggttaattacctcctcctcactcaaagattttccctgtgtttgcagttgttcaaataactgataataattagcaccttccacataatcttgcactaaaaagaaaaaatctttagtaccaattttagcttgtatagattcatgaaatctgggaatttgcggatgtttgatttttttaagtacgttcgcttcccgttcaaataactcttgagctttttgtaaatcttcttttttagtgacttggggcgcaaattcttttaaaacacacttttcacgggctttttgtctatcaatcgccaaataactccgcccaaaaccaccttgccccagtatacgcccaatttcataacgattattgatgacctgtcctacagtcagcggtaaagattctccgcactgagtacaaaaactgttaccattattatttgcgtgttgtttgctgcaatagacggacatggtagggaacatagatcaatatactgatacagttctacaatatcaaaaaggtaatttacgaactattgtggtgattggggactggtgactggtgattggtgactggtgactggtgattggtgactggtgactggtgactggtgactggtgattggtgactggtgactggtgactggtgactggtgactggtgattggtgactggtgactggtgactggtgactggtgactggtgactgggttattaacttaccctacttcttctacctcctgaactccttccttatgaacccaaaaacacaaaaagcgattcaagaactagaaaaatttgtttctactcccttagcagaaacactggaacaacatcaaaaaactacaccacaagaaatcgccattaacttatttaaaactgtagcagctaccgtaccagcttacaaagcgtttttagcatcacatcacatcaacccggcaacaattcaaaccttagcagacttccaaaaattaccagttatttgtaaagaaaattatatttctctttacaccctaccagaactatgtaaagatggaatattaggaagctgtgatatgatcgcggcttcctctggctcaacgggaaaacccacattttggccgcgtttcttcactgatgaattacaaatagccacccggtttgagcagatttttcatgatagttttgatgcagataataaaagcaccttagcaataatttgttttaccttgggaacatgggtagggggaatgttcactaccaattgttgtcggtatttagcaactaaaggttatcccattacagtcattacacctggaaataataaaaccgaaatattacgagttgtgcaagagttaggtggtaattttgaacaagttgtattattaggatatccaccctttttaaaagatgttattgatacgggaattaccaatggtttacagtggcaacaatatcatattaaattagtaatggcaggagaagtatttagtgaagaatggcggagtttagtaggtgaaagaataggatcagaaaatccttgttatgattttgcgtcaatgtatggaacagcagacgcaggagttttaggaaatgaaacacctttaagtatttgtattagaagatttttagcagcaaacccaaaagcagcaaaagcattatttagtgaatctcgtttaccgacattggtacagtacgatccttgtagtcggttttttgaagttgaaaacggtagattaatattttctggtaataatggcattcccttaattagatataatattttagatcatgggggtttaattacttatgaagagatggtgaaattcttagctgaatgggggtttgatccggttgctgagttgggtgaaaatagaggaatacatcaattaccatttgtttatgtttttggacgtgctaattttaccgtttcctattttggtgcaaatatttatcctgaaaatgtgactgtgggattagaacaaccgataattagagaatgggtaacgggtaaatttgtgttacaggtaaaagaagatcaagataaaaatcgctttttatctgttgctgtggaattagcaccaggggtagaaggtagcattgaaaaaactgcaactattactaattctattcttgctcaattgttacgtttaaatagtgagtttgctaattatgttccggtggaatatcaaacaccccaagtagaattaaaacctactggtgatgctgaatattttcctgtgggtgttaaacatagatatactcgcaattgataattgataattgataattgataattgataattaatctcgttaatctcgttcccagtctcagactgggaatgcaatgatataggctctgcctataatagaattgataattgataattgataattgataattgataattaatctcgttcccagtctcagactgggaatgcaatgatataggctctgcctataatagaattgataattgataattgataattgataattgataattgataattgataattgataattgataattaatctcgttcccagtctcagactgggaatgcaatgatataggctctgcctataatagaagtcagagacttcttaattgattaccatacagagtatgggaacgagtaaacgattaaacgattaaaatattgattaacaatcatatcatcatccatagaaattgtcactgataatgataagattacctagaggttatttagttaattaatgaatagttctggtataaagtctatccttcatccgttgcgaattggtgaacacattgcccgctatccaattattcaaggtgcaatgtctgtgggtgtatctggtgctaaactggctggtgcagtggctaacgctggtggaatgggtgtcattgcttcaatgggaatagggttaaattctctgtattttcacaaacgccaacggggtagtttttttacagcgaatcagttagcattgaaagatgaaatcagcaaagcacggattattagcccagaaggaattattggtgttaatgttttagttgctactagagattatttgacattagctcaaactgcggcagccgcaggggcgaatttaattattactggtgcgggattacctttgactttaccagaatttacggtagactatcctgatgtggcattagtgccgagtgttgctaacgtgcaagctgcaaagttgatttgtgaaacttggaaaaatcagtataatcgtttacctgatgctttgattttagaaaattgtcaaaaggtgggaggacatttttcacagtgcgaacaggcgaattttcctggttttgccattgagtgggtaattactgaattacgcgagtatttagcacaacaagaaaagagcataccattaattattactgggggaataagcgatcgcacagaaattgatcagatattagggatgggagcagatggtgtacaaattggtactcgctttattactacagaagaatgtgatgctgatttgcggtataaagaatttcatctaagagcaactccagaggacattgtgacagtaccgagtccagtaggaaaacccagtcgtgctttaaaaaatgcctttgcggaaatggcgatatcttcaataagctgcgctaacgctgatttatcattgttagaacgtagatgtatagcaaattgtttagaatcttgtttatgtagagatactaaaaaaacctattgtttactgcaagcactttctaaagcagcgtgtggagacatagaaaatggtttaattttttctggtgctaatttgggatcaggcgatcgcatcatctcagtttccgaattaatggcagaattaacctgttgatagaaaatggggagatggggaaaacattctttacatagggtttgctgaaaaagtcccttcgttgaggcagggaatagggaatagggaatagggaatagttttagctatctgttatccccagattttctaatttatcagacccaaaatgcacagtttttaaggtatacccttcaaaaatcttgcactttctttcctcctgatcagcctcaaacctttgatttacgagtattttgggtttattcagcaagccctacatattccctattccctatgactttagcggtggcgatcgcatttaataaacatttaataaaaattcgcccaatctataccattaaaaactaatatttgaattaaaccataagccaaagctgcactaccgataggaacagttaaattatcaatacccagaaacgaaaaagcttctaaaaatgtagctataatagctacaattattgatatcagccatatttcccaagagtttccttgggttggcagtaaaatcaacacagtcatcaaaaaactaacaaacgtcatggttaaagaaccttcccaacttttgtttgcaccaaaaagtttatatttatgtttaccaaatctttgcccgattaaagccgctagtccatctccccaagccataattaaaatacctaatgcagcatattggggttggtgtaaataccaaaaacaagcaactaaaatcccaatactgactgcataaaaaaatgtacctaaactttgacgaccaacgctattaattcctggtaaaaggggcaaaaaataggataataaagtaataatgccagctaaaattgcagatgtaatgccaataatagcagggatattgaaccaccaagctagtaaaattacattacctgcgccaatatggactattttacggataatttcgggttcactgtcggtaaagcgactaactaaccaagcgatgaggataacaagtaatacccaagccgcagcaacggaaatttgttgccacaatgggagaatagattctaaaccaagaaatgtcatcaactatgtaatcaactatgtaatcaactatgtaatcaacaatgacgcaactgataattttgagactgtgattcttgttatttaaacctaatactactgtaggcgatttgggcatgaaaatattattgattgggctaattaaaggttatcgcttattcatctctcctctgtttcccccgacttgtcgctttcaaccaacttgttcaatgtatgctatccaagctattgagcgttttggggtgttccgtggtggttggatgtctatttgcagaattttacgttgtcatcccttccaccctggtggttatgatccagtaccagagataagagaaaagtcttgttgcgaacatcgggagtaacagatacagaactggttggagaaaattgggtactggaaaactcattcaaaacctactacaaaacttactattttacaagctgagttgataatatgcgtccatatcaccaaatttccattattgaatgtggtgaacctttagtaaaaattcccttagaactgtttgcggtggaaactccccatccttatgaaaagttaggtgctgactatgggggatattctgcttattttttgcgtgcaagtgtggtgcaaaatttaattgaggcacaaaattatttacaattgctacatcctggttggtatattcaaatatttgatgcttatcgcccggtagctgtgcagcaatttatggtagattatagttttgcccaagctgtgcaagccaggggattgattgagagtgatttatcaactcaacaacgggaagaaatttggcagcaagtatatgaaatttgggctgtaccaagtttagatatgaatactcctcctccccatagtacaggtgctgcggtggatattactttagtcgatgaaaatggggaagttgtgaatatgggttcaccgattgatgaaatgtctgagcgatcgcaccctgattattatgcccattctgatgcccatcgtcatcaagaatatcatcgccatcgagaattattactaaatgtgatgttaaaggcaggttttcaacgtaatcctagagaatggtggcatttttcctttggtgatcaaatgtgggcttggttgtgtaatcagccaaccgcacgttatgggcgtttcaataatgaataattagggttggctgaaaaagtccatctcatctatctctctttctaattctgttgtgtctgcttttgggttttggcgttttatttccaggattttatctaccattcttgtaacacacgcatcctgcgtgtctgtagctttgggaatagataacagtaaaatatacattggtttatattctagaaatccgccttgtcttgtggctgcactttgggaaactaaatattgtgttacaggagaatttaaaactgccaataaatacaaactatcataaacatttgccagtttaatacttttattttagtatcaatattttgttttgctgacacgctggaagcgtgtgttactttatccatcttttgtgtttgcgacacgctggaagcgtgtgttacagtgctgatgatgctaggataggctatagctgtaaatacagatagtttgattatagatcatcgttttccactttcttcaattatctgaatctcttgttctgttaatccatacaatttatacactatctcatctatttctctttctaattctgtcgtatctgctttcgggttttggcgttttatttccaggattttatctaccattcttgtaacacacgcatcctgcgtgtctgtagctttgggaatagataacggtgaaatatacattggtttatattctagaaatccaccttgtcttgtggctgcactttgggaaactaaatattgtgttacaggagaatttaaaactgctaataaatacaaactgtcagaaacaattaaactagcaggtgcattaatataataattgggttctgcaaaagtaaattggggttgtgttgctaaattaccccaaacaattttattttcttcaaactctttataataagcaatattatcctgaatttcgtaccatttataactacctgcttttctacctccaggtattccaggagttaatctttctctatattgacttaaatgatttaaaatagcaggatattgattaatatcaatgccgcgacgggtaaaaattagccataaatcaggattattaactacccatcttttaacatccttaccccgtaaaaatggtttcaaaacttcctctgatgaaggatgttcactaattaatctatctctcgtttctctatcaacaataaatgcttcattaaacccggttaaaacaccacgataaaacctgccattaacatattctcctaatggtgttcctgtttttcttaacttttctaataactgtaaaacagtattatcttctaattgccatccttgaggctttagtgctttttgttcaatatgaaaactgtctgtattcaaaacttcgataaaattatcaatgggtttacctatttgccaatttaatacttttattttagtatcaatattttgttttggtgacacgctgaaatcttgttttacagtgatgatgatgctaggataggctatagctgtaaatacaggtgcatctccaaagtctattaattgttttaattgatttttcttaactaaaaattcccgtaacttttctccatatcctgaacgaaaatatttattagaggtaatataggttaaaattcctttgtcttttaaaagtttgattgcttgttcaaagaagtaaacatataaatcagcaactcctgtaaaacagctatattgttgttttaaaattggttttagttccttaattttctcttgtcttacataaggaggattaccaatacaaatatcaaaagcatcaacgccaaacatccattctggatcaaaaaagttggctgataaattctgattatataaatcccattctgataaatttaaagcaatttcatcaggtaaaccttgctgttttaataatttaccaatttcttgtcttaactttttatcatcttctctacattttctttttgtttgaggggttctagctttaaaatgacgttttcttacttctgccaattgtttttctttatccttaatttcttcatttcttaaatctaattctaattgtaatttttgaggtttattaatactgactaaagaattagcagcaacaaatttagtctcaaggttcggtaagggtaaaatcccccgattgggttgattattattcaccctttggtcaacaattaaggagataaaaaagcgtaacttagaaatttgtactgctatcggttgaatatctaccccaaaaatacaattttcaatcaagaataacttccggggatagtccatctcattattctcaaactcatcttctatttctgctaacctttcctgtaacttctgtatcgcttcttcccttgcttgttcataactaatctgttttactacctgaatatcctttaaaataggtgctatggttttttccttctgttgctgtttccatttactattattggggtcaagtttccctaaaataaacaccaatttctgtaaaattcccataggaaacgcacccgaaccacaagcaatatcaatgatttttaggttatcaatggcattaattaaacagtcaacttcatcatcattaaattgatgggagtcatcactataagataacaaacttcttaactgactctctaactcatgttctcttccctgaaaacgactattttctaacttagtttgtaaacttaattgacccgttttatactcattaccaaataaattagtctgatttgaacccacttctatataacttgaaccttgacttaatacagcattttgtaaataagcaattaaggactcatctaccatataattaacaatttctctaggagtataaaaagaccccgtttgcttcctagctgtagtttccgtttctgggttatattctgctaataaattctcaaatactttacctaacaattccggatctaatgctatttcttcctcaatgggagtattttcatcaatggtaaatttataacgattaaatatattaattaagccttggactttatactttttatttttagttccataggtttggtttaaatcaacatctgttgcttctccaaaaaagagaacattaggaacatttaaaacattatcttctctatcggaaaaaccatcaattctaattttggttttctcttttccttttggagtaggttcagaatcatcatctttatctctatctaaacattcaaataatcccccgttcaaaaaagggatattactacataaccttaaaaactcatcagcattagtaaaataatcgtggtaacgataaacattagttatcccataatgtgcatctctcccacccttttgctgatttttacccctaaacttgcggttatcagccttttcatcagtgttcatttctgtatttagggtagcaaaaaagagattctgtaagatggctttataataggtactttcctctgctgataaagatttcagtaaatttgttagctggttttcatcaaataaagcatcaggaactaaccccttttcttttaagaaccaagcaaaaatcaaccgtgtaattaatctaatcacactggtagcattacggatagattcatccgcttctcctccagcaggaaatgtgacggtttgagttgcccaaaaataccaattagatacttcctgaaagaatttattattcagttccgaagtattgagaactttttgccaagctgtatgtagctggtcaaaattctggacatctgggagagatggtaaagctaaatctgctaatatttcaatatgcgctcgatggggagagttaatattaatatctttaattaaggtaatcttttctaaaacatctttatccctatctaacttattaggacgacgattaattattgacaaggtaacataattaccatagcaaaataacaccataatgggaatattagactgacggttaatttcacgggtaatttttgctaaatcaccacgagaataagcagttttttgtaaagttaaacccagaaatatataagattttaaataatctgtgtcaaaggaaggctgaaataatttaccctgtccattttgggtaatttcttcttctgtcacctgaaataaacaattaactgactcccactcctttaataaccccttatcttcccgaaaattctcccatccaaatacttctagcacctcatcaggggtttggttatctaacaagacttcccgtggagttgagtaacccaaagtttctagcagatgcttaataccatcagcgggggaaacttgatggaacttttgtaatgcttgtgtaatagcggatttaagggtgttttgtatcatcttcaataattaaccaaaattaaccaagttatcaattcaaagtctgtggtttttgtcacttgttgctgcttgggaggaataataccccctttccctgaattaaaaagatttttagtgatacggttagtaaatgtacgggtgatagaatcaactgctttatttagtagttcagtttctttacctatattagatccattactggtgcgctggttaaataactgacacaaatctttatatgggtgggttttccccgcacataaaagacggtatatctctaaaatttgtttaggttgggcaaaggtatagcgaacattaccatcatccctgacatagaccaaaaaataaggttgtagggggttaacttgttcatttcctgatgtgttccctatctgttgcagacagaaaataatcccaggtttgatcacctcatactctttttgggtaggggtagggacaattccatataatcctaacggggcattttctaacagttgcctgtttttttgcaagtaatttaataaatctatacgaaaatcatctaagctaaattctgttaaggaaatgctgtcattaaaatcttcaatgtctaaaacttcatcttttaaccgtagtaactgttcatctcgataactcatttcttcggtaaataattcttgtagttcatctacatttaaaagattatcttccccggtagctgtaatatcaactaaggccattcttgcctcaactcgatttttcagattaatatatctatttaagtcttccgttggccaaaaattaactaattgcactgtatgatttaaactaccaattctatcaatgcgtccaaatctttgcataattcttacaggattccaatgaatgtcataattaactaaataatcacaatcttgtaaattttgtccttcagaaatacagtcagtggcaattaatatatcaatttctcctttttggggcattgattttatcttatctcgttgtttggacagaggtgaaaagttcgtgagaatttcctcaaagcgggaactaccaaaggtggttttattaccactattacctccagttactaaggctatattgatatttaattctgtttttaaccacgctgctaaagcatcatataaatatctagctgtatctgcaaaagctgtaaaaatgatgacttttttattttccttatcctgtttattaaaagtgggatgagtaacttttttctcaatacattcttttaattttgctaacttggcatctttagaaacatctacatctttggcttgaacatataacttatgtagttgtcttctatccctagctaaatcaactaaccatctgtcaatatctaaatgttttaattgatattttagttctctacctacttcaaatgctgcttgtaattcttcgtcgtcagtatcttctatttgataatcttcacttttgagcatttctgtttgatactggtcaaatgttttaatttttgactctaactgttgaattttcttaatggttctctctagggtgattctaaaagaataaacggaactttctaaacgtttgagaaaattcactttcatcatgccaattaagtaattttctcgattactttgagtaaagttattttggataattttcccttcatacaaatctttgtatttttctaaaacataattggaaggtttaaacaaagataattgatagtcagaaatttgctcattaatatcatcataatctaagaaattatcttctaaatcaatatgagaaaataaagaaataggtttgagtctctctgggaaacctcctaattctttaattgcttcttgataatacttttgaatatgtttacgagaacgagcgattgttaaaccatctaataatgtaaaaaagctagaatttaagttttccaataactcattactatgatgttgctttttctttgaccaaatggtaaattctttttgggcagtggttaaggtttgttggatactgtcaatccccaatgtttgactaaaggcattatctttatcttccacaataaaattaatctgattccttaaatcttttaagtctgtatttacaggggttgctgatagtaataagactttagtaggaatcccttttttaattacatcttccatgagacgttcatagcgactttttttaatcacatttccatcttcatctcgtttccctttggtattattccgaaagttatgagattcatcaatcacaactaaatcataattactccaatttaaggtttctaaattaatatcccctgaatatccagtatctctactcaaatctgtatgagacaagactgtatagttaaatctatcttcaactaaaatatttaattcactgttattagcagcatggtaaattgtccaattacttcttaattttttaggacataataccaagactttataattcaataattcaaaatatttaatgatggctaaagcctcaaaggtttttcctaaacccacactatcagcgataatacagccattatattccatgattttattaatcgcacctttgactccatctttctgaaaatcaaataataagttccaaatcttggtatcagttaagtgacgttgtttagtgagtaaatcactggctgcttgttggtctaggaatcgtttaaataaatgaaacaatgttttatagtaaataaattcaggggcattatcctgataaagttgattgagataagtaattacttcatttttgacatcttgtactagattttgattattccataactctgcaaaccataactgtaaatcttgtctgtccctgtcactatcaacaattaaatttaactcaatattactatttctgttagctaatcctaatccctttaaggtaaaattagagctacctaaaatggcagttctcaccccattattatcaatgtggtacattttgccatgcagtaagttaatttgtttaatcgagcgaatattgacctttttttgtatccattcttggcattccctagctaatttactctgtttcaggcgatcgcttagttgaagaccagtatcttcaattttaaaagctttttggtcagtattagtgccgatggcttgaataaaccgaggttctccaaacagaaaatctaagttatcaatagaccataattcctgttttaaagcttcaaaggcataaatcgtaaaataagccgagacgatagataatttagaacctagttcaatcttatctttgagaaaatctccaactgtaccccggttacggttgtctcgaataccagattgaaacacagaaagctgatgatctgacatagtggttgagaaaaaaggttcttcagtacacattggtgacaagttaagcctgaaagaattttgtcaacaggcttttgggggatgatggaaaaagaattgatcagtcccacgttgaacatcgggaaagagatagttcatccgctacggcatcacctaaatctaccaacacagcataaaataaccaagtagcccaaatctgtaattgaattttatttctacattaattgtcaattatcaattgtcaattatcaattgatgatggcattcccagtctggagactgggaacgagaggttagttagcttttttgtatcggaaattaaagatttaccatttatgtctgatccattcgtaaatctctaaatatttcgcaccgggaatattccaagaattatcatacaacataccctgaatagctagttttttaaactcttcgggttgctgataccataaatctatagcccgtcccattgctgattctaatgctaggttatccatgtcataaaacacataaccattgcgtttttctggtggtaaattttgatcataatctctgtcaaaaacagtatttactaaaccacctacaccccgaacaatgggtacagttccgtattttaaaccgatcatttgggttaaaccgcaaggttcataattactgggaacaactatcatatctgcaccagcataaatcaggtgagataattcttcattgaatcccagttctaaatgcacatctgggttattatttaaaaattgtttttcatggtaaaaatgagcgttaattgctgattctgtagctgaacctaataatacaaattgcgctcctctattcaaagcatagtacatggcgtggtgaaccaaatggacacctttttgattatctaaacgaccgatgtaagcaatgatgggttttttctcatcatgacctaacatcaatctttctcttaatgcttttttgttatatgccttttgttcaaaatcatcccagttgtaattattggggatgtatctgtcaatttcaggattccaaaaatcgtaatctataccattgagaacaccactaaatttgtctttttgcaaatataatgtatgtcctaaaccacaacccacatcactggtttgggcttctattgcatgatttggtgatactgttgtcactgcattagcataattaattcctgctttcataaaattgatcgcaaaaggattaaaattatcccgcagtttgtcgtattgaaaataatattctgggcgatttaaattggtagcttggagagtttctacaccacccataccttgatgtttaaagttgtgaatggtgtaacaaactctttgatattccatgccatgatatttataaatttcatacaacatgacaggaattaacccagtttgccagtcgtgacaatgaatgatatccggtcttttattactttgcagtaaaaattctaaagctgctttgctaaagaaagcaaacctcatgttgtcatcatcgcaaccatagtaacaacctctattaaagaaattgtcttgactgtggggttgaatgaagaaacaaacccgaccatgtacccacccgcagtatacagaacagtgaactgcgccaccataccagggtacccacaggttgaggtaagcatcgtgaagaccccatatatgatcgtaacgcatacaatcatacattgggagaataagttcaacagtgtttccccgtccttctaactccctgctaagtccataaacaacatcccccaaacccccagcttttattacaggagcgcattctgaggcaatttgtactatgtacattcctagccctcgccttacaaaactttatgtttactatatagcaatttatgaaaaatgtactcattgacaactgggtattgggatggtggatgaggattgaatttttgggtgtggggtgtaggaattttcattttcactcttgcctcttgcctgtcctcacagataacataactattcaaacggacttgatattactcctgactcctgatagcgtagcgtaagccacattttgctgtaaattaagatgtcagcaagggaatctatcctcagaattattatcaaagcattaagtttccagacaaaatcctgggatttatgtctgaaaagagtatgcttcaaaccagaagatatcgaaattttgtattacagcagttttcacctagttataccacagtagagacgttgcgtgcaaattctctacaagggttttaaagattgttttgtggttcatttacctgaaaatcgctgtcatgtaatttggtaatctcaatctatcaaggtaaaaatttcagacacaattgtgtggtttaggttctgacataatatctaaaaagatttttaatatgtgaattttccattattggaacttagtaattttaaaatttagtaattttaaaatatacgaattacatttttagacaaaatgatcggatttatgtcctatgatcatgtgcataaagctttatatgtatcgggactttggattattttaaatctagttatgcaaaaacatttaaaaggaattaactcctaatttagaggataaaacaatgaagaaaatagtaattgcggacttaaaatataatgcaggaagcctttttcgtgagctatctgtggttgaaacaaagactgtatctggtggtagtggtgggagcgtcaataattattttatatcgggtaatactggaaatgtggagaatacagggactggtgacgttaaaggtgtagatagtggcatcagggataataaggtcgctactgtagactattccaggtcaatatacgtcgtcataaattcttggtgattaattatttgtattctggtactgacattaagaaatttttagttggttgagggtaaaacatttttttagggcatttgtttttacagattttactcctcataaatcataaattttcatacctgctcatttctggattggtaaattaagacaatggctgcaatcatgaatactgaattacattctgttcaagtcaatgggctttttcagaaactgactttagaagaaatggagtcaacgtcaggaggtaatactgttattcctttatggagtagtggtttagcggctttctctctcaatatgttttgtgatgagttaaatagtttattcagtgaatattacatacctccgatttttaacgacaacaagctttttacggttgatttttcggaaatagatgtctatttggtagtttaatcatttgcgggggttaaaaattggtttgtaccgactcttaacccctgaaaaattacacggctattgtctctaaagttcgagattgttgctgacgacgaccgtggtaaatcatttgaataggtttatcttgacctgtcaccaaaccacggcgttttggtttaacttcacgagtatctgctagttccatttcccaaccttggaggattttagctagtgctaatttcatttcaaattgggcaaatgctagaccaatacaacgtcttgcaccagcgccaaaagggataaattgatatggtgaaaattgtttttctataaagcgttctgggttaaattgtttagagttgggataaatatcttctcgatggtgagtgaggtaaattgaacccatcacaactgtacctggttctagttgataaccatctacagaaataggggtttttacccgacggggaaaagtcaacattcccacgggataaatccgcaaagtttcattacaaacggcggtgagataaggtaatttaaaaatagtattggaatcgggattttcgcctaaagtatcaagttctgctaataatttttggcggacttctggtagtttatgaacccaatataaagcccaggctatggctgtagctgtggtttcatgacctgctactaacaaagtcattaattcatcccgtaattctacatcagtcattggttgaccgtcttcatcccttgcagacattagcaaactgaggatatctgtacgtgatgggtcgggtttttctctgcgttcttgaatttctgcatacaggagttggtcagctttattttgacgacgttcctgtatttcccaaagtgtggaaagaccaatcactttttgtaacgctggaaaatataataaagccactctccaaacttcactacctgcttccagaatttcacatagtaagtgttgtaatttttcagcccgttcaccttcataaagtccaaagacagcttgcatcatcacccccagagtaatttcttgggtagctgttcgcacattaaaaggttgattgatttgctgtttgccgatgactttttcggtgatattattaattacatcggcataagttcgcattctttccccgtgtaagggaggcatgattaactgccgttgtcgctgatgttctttaccactttgagaaatcagagaatttttacctagtaacccttcaaatagttgatttaaatcgcctggtgcttctaattctttggtatctttgctcaaaacctcctgcattgcttctgggctatgaataaagaccaggggaggtaaattttgatccagcttgagagtaaaaatatcaccgtaggttttggcgcattcttccatgtaggacatggggctaaatacccagcgtagcatttgcagggtagctggagttttgggtcctgtgggtagaggcataaaagttttttggtagatgttagttttttactaaatatcttatagcaaaattcagaagtcaggagtcgtaagggcgaagcattcgggcgacaaattatcattttatcaaaagcctattttcctgtaagggcgaagcattcgggcgacaaattatcattttatcaaaagcctattttcctgtaagggcgaagcattcgggcgacaaattatcattttatcaaaagcctattttccgaatgcttcgcccctacttcgcccctactttgcccgtacagaagtcaggagttaatgagaaaacgaaccacacaggcacagaggacatggaggaaagaaggttttagagatattttgcgtcagcttctacacccgccatgaaatgaatttcatggctaataaatcaagtaaactaaagtttactgaagaattttctggttattgagtcatctttagatgactttggctattaccaaagaaatatggctaacgccacgcttcgctatcatttccttgcgggctattggtttgtcatgctgctttcataatctctgcttatgttttgcattctaaaactgcaataaacctttacaaccgtgaagatgtaaaattttggttacattacagtagttttcaagtcttcagacttctcttatttcccctttgcgcctttgcgtctttgcgtgagataaaaaagtcattcatgaaaaccactgtaaaccagcatttaaagtttccgacgattttattaaggtactcagcatgacagcaactacaacaaaggcatcttccgcagttccaagtttttgtgaaggtattcaatattttggggaagcattgccagattttgaaacttatggtgcaacgccggtgatagaatcgggcaaaggtgcgatcgcctcaccaacagacccaaaagcagtttatcaaaccctactagctgccgatgccctgcgctacctgaccctacaaattactggtagtaaggcttctggacatcccggcggttttgccagccaagcggaagcttatgcagctttggtcatgctgggacataaaaacattattaccgaagtgggacaccacgcccctggtttttatagtgccatgtttttggatcgttctttagaagacatgggcatttctacagtacaacaattgcgcgatcgcttccgagaaaaacacggtttaatcggacacctttccggttacattcctggtattctcgcccctgctggtcctttgggacaaggacaacattttgcgatgtctgctgcactgctacaccgtgacaaactcttccccttcaccgtgggagatgggggactaggtgaaccctacatcatgagtgcaatggcgcactttaataccgcttaccccaatgtaaccaacttcctacctatcctagtttggaacggttacagccaagagcatcatagcatggtatctttaaaaaccaccgatgaaatgatcgcttattggaaaggtaacgggtttgcggaagtgatcattgttgatgccaaggaatttgacgaccaaaaccaaccgggagattacgtagatagcaccattttctctttccaaaaacggttagaatttaccaaagcggtattagtaggcattgataaagctgcccgttctgctttgagtggcacattaacggtatttatcattaaacaactcaaaggcgcgggtgttcacgctttaggggcaaaatctcacaacctctatcctcaagataccttaaccgcgcctcacattgtcacagccttacaaaaacgcgctttatctgtggaagcatggcaaacagtccgcacaaacgcagaacgtgccggaggtggacccgcagcgaaaactgtagttacagaatttgaattacctttagtagacatcggcgaattaccattagaagaatatgcagttggcggagatccaaaagtttccacaacagcaatgggaaggttagtaggaataatcggaaataaagataaaaacttcctagtaacaaacgccgatggtaacgccgcttcaggaattggtaatattaatgaagccttaaaaatcattcaccccacagcagatgaaacctatcatcaagcgccaggaggtcaagtttacgaacctttgagcgaagatgcttgtgcaggtttagcagtgggtttatccttaatgggggcgagaagtttgtggtgttcctatgaatcttttgccatcaatggtttaccaatttggcaaactgtcacccaagcaatggcagaattaagaagaaaaacaccttcaaccattaccttatttactgccggtgcattagaacaaggtcgcaacggttggacacaccaaagaccagaaattgaagcttactttgcttcgatgatgagaaatggtaatgtatttcctgtttttccccccgatgctaacagtattcaagtctgttatgactgggctttaggaacaaaaaataagggaattgtgattactgcaagtaagtcacctttacccattagaacaactttagaacaaaccaaacaagggttagaaaaaggcgcgattttattacatgaagttgccggaggaaaacaagttgtctttgctgtaattggcgatatgaccttaattccggtgtttgaagctgcggcatttttagagacagaaggtattggggtgaagataatttctgttattaacccccggcgtttatatcgtgctgatgatacagcttgggatacttgttctgaacctgatggtgggtttttgagtgatgcagaatttgatagtttgtttgctggtgatgcgttaattggtgtgacaggtggtgcaggtgcgatgttagaacctattatgttacgcagtaccagtaagcgggatattttcgcttggaagcgtggggaaactaccgcaagtgcgggtgagttgatggcgtttaatgggttgactgcggaagcgttgactaagcgggctattgagttggtgcattaattagaacgcagatgtacgcagatgaacgcagatgatttggtgtttgttgcgtacatttgcggtttttagttaaaagtattttttgtagatcattttttgttaagcaataattaaaagaaaatcatgttataatcttataataaattcatataaactattatgcaaatactttctaaaagcttcgataatagaataaaagcacacaatattttaacagaaatgcctatttctgaatacttagaaatagctagaaatacagaaatgttgaatgtcgttacaaaagtttacatattcagttatagtagtcctattaagggtgaaaatgtcaacatctcatgatatcttccatccaatgaacataactaatttgttgacacatacaa

SEQ ID NO: 16 - DNA, 82534 bp, Sphaerospermopsis sp. LEGE 00249
  LEGE00249_27
cccaatgcccagtccccattcaccagtccccagtccccagtccccagtccctatagcgtgccaaaaccttttttctttttctctttctttttctttttcgctgctggtgcgccgccgggataaccgcgccaaccgggtgcaggacggtttcctgcggctagggggttgcccataccaccgccaaacattcctggcattccggggaaatttccttgtcccatttgctgcatgagcgatcgcattttttggaaatctgctaccaacttactcacgtctgattctttataacctgaaccagaagcaatgcgtcgccgccgactgggagaactggccaatagttctggatcttttctttcctgcttagtcatggaattaatcatggcttcacagcgttttagctgggtttccccttgcttcaactggtcatcagaaagtttacccataccgggaatcaacttcatgatgccacctaatgaacccatatttttcattaggcgtagctgttttaagaagtctgtaaaatcaaacttcgctgacagcattttctcctgcattttctcagcgtcggcgatgtcgatttcttcctgggctttttcaaccaaggtaagaacatcacccatgcccaaaatacgggaggccatgcggtctggataaaaaggttgcagcgcctcgactttttcacccacaccgacaaacttaatcggcgcaccggaaatttgccgcactgacaaagccgcaccaccacggctatcaccatccattttggtgagaatagccccagttataccgatttgttgatggaaagtacgggtcagatttgctgcttcttgccctgtcattgcatccacgactaacagagtttcatctggttcaatatttgacttgatgcgggctaattccgccatcatgtcttggtcaatttgtaagcgtccagcggtatcaacaattactgtgttaataccttctgatctggcacgttctaccccttgacgggctatttctacaggatcggcatcactgcccatctcaaatacgggtacgttaatttgcttacccagtgtaattaactgatcaatagctgcgggacgatatacgtctgtggcgactaacaaacaactacgatctaattttcttaaatgtagagctaatttagcagtagcggtggttttaccagtaccttgtaaacctgccatcaagacaacggtagttttatccttaacttctgctaggggaacattttcctcccccatcacctgtaccagttcatcataaacaattttgataaactgctggtcaggacgtacaccagctatgacctcagatccctgggctttggtttcgacttcagctataaaatctttaactacctggaggttaacatctgcttccaacaaagcccgacgcacttcgcgcaatgcgtcttgaatgttggattgagagattttatcttgtccccgcagttttttccaggcggcttctaaacggtcagatagtgcatcaaacataatgtaattacaatgtacgtgagtcagtgagaaagtttaaaccaagtttaaaccgctggttttgcgctccagtccaggcagaattttaggtaaagttttaacctgttataataccagcttagtaggttttatcccaagtgtggcaactggattattgaacgtgcctctttcctttgtgtcctttgcgtactttgcggttcgttcttccaggatgaatgtgttggtttgaatcatcaacaaagtaaaataggcgttaaaatcgatccagcctttgtattttcgtggttttgttggaaataaatcagagtgcggttcactgcataaatcctcactgtcaacgtccttatccccaaccttggggcaacaaattttgtaacagctgtggcagtccgttaaagttagtagaccgctattacccactgaaacctttaggttcagggggttttgcccaaatttatacggtttgggatgtcaaaactcaaaccgaaaaggtactgaaagtcttggtggaaaattctcccaaggctttggagttatttatcctagaagcggaagttttaagtaatttccgcaattctggtgtgcctcaagttgacgctgatgggtattttcaaatcagtgtgactcatcctaaaccacagcagttagcttgtctggtgatggaaaagattgatggttatactttggaggaagtgcgtaaaaattttcctcaaggatgtccagaggatttggtgttaaatttgctttcccaagctgtaaaaattttacaggaattacatcaccggaaaattattcatcgggatattaaaccttctaatttaatgttgcgtagtcctgcacctaatgcacttttacaagcagaacaattggtgttaattgattttggtggggctaaacaatttagtgggggaatattgcgatcaccttctccttctactcgtttattttcttctggttacagtccaccagaacaaattacaggaggtaatgttggtcctgcggctgatttttatgctttgggacgaacaatgattgaattacttacaggtaaatatccacaagaattggaagatccgattactggggaattaaactggcgtaagtggtgtaatgttaatattcaactagcagatttattagatgaaatgatacaggcggatgtgcgatcgcgtccagcccatgcagctattattcaaaaacgtttattagcaattaattctgtaaaatccaaaaaattacaaaaatcacaactaggcttttttacccaaattaaaaatactatcgtccaaactatcacagaaattacccaagctgtaggtaatacaactttatttacagtgcaagcaattttcaactttttgaaagcttgtttagcgacaatttgggcaataattttaagttttattggtgcgagtgtgggaactattggtggttttttactggcttatcaaactaaatcaggtgcttttgtggcagaatttatatcacgccaatcatcccaattcatccccaattttacacctactaatcccaaggaaattatcatttatgctgttgctggtttaggtactgcttggggaattactttatctggaagttttggacaaaaacgacgttttttagtatcagccatgatggctttaataggctatagttcaggttggataacttggcaatttattaaaccacagaataaccctgaaggattaattgcctggatgttaatctcaatttctttactcactttgggtttaggtctgcgtacccattacctagcttacgcttttatagctgcttttggtagtgctaatattgtcgcaggtttaattcatttagggataaaaacttcattggttgatttttccgatccaccaaattgggtagagttattacagcatatagctttttttggttttattggtgttttaattagtctttgtttaggtttaagttattacattattgttccttgtttgcgttggttaggatggagataattgataattgataattggtgattggtgattggtgattggtgattggtgattggtgattggtgattggtgattggtgattggtaaaatgttttataaattaattaggacttacgcattgacaggaacaaccaaatatgaggtatggctttcgggcattttaacatgattttttgattatttttgagcgatagcgaagcgctgctgcaagcagttcgccgatagcgtagcgtggcgttagccataaacttttcaaacatcctcttagttagggcttgctgaataaacccaaaatactcgtaaatcaaaggtttgaggctgatcaggaggaaagaaagtgcaagatttttgaagggtataccttaaaaactgtgcattttgggtctgataaattagaaaatctggggataacagatagctaaaactattccctattccctattccctattccctgcctcaacgaagggactttttcagcaaaccctagttaggtacaaatggaaatcataaaacccttgtggaacaggcatcttgcctgttagctttgtagatcataacttaggaaagggctgtaactatacgtttttatatatttaaatgtgattaagtaatataaatattaactcaagccccttaaaacaagatccccctagcggcttttttgtccaaactagggggatcacatattgcgtagactataaatctttcggtataggcaattaagtcaaatatatccaatatatttcattttgcctacccctagaacgatgatttaacaaaattttatattatttttacaattacctaagccttgagaagtagttgctaattttgtatatgctgatacaaaaggctgggactttatcaggcatatcagcacaaaaaggacaagcgatcgcagtcaaatattcacatctgtggtacaaaaatattatcaatttttgtctgcatctgtgatgcaaaatgtgaaagtgtgtgatatactagttgtgagttcaaaaagcgtagatccttgaaaagcggtgaaagtcctgatctgagagtgcggagagttagaattaacctaaccatagttcctgtgtgccaggaaatcctataaattagacgaaataaaacattttcaagagtagctaatcaaatcagaactgaaaaaaggtaaaagtagttcggaactctatctgatgatagaaaccgaatattgtggcttgtagttagccatctaaggtgtagaaccttagcaagctagaaatatttgactatatttttagtaactatgttatacttacaaaagtatatgtaagggcgcgtggctcagtggatagagcaacagattccggttctgtgggtcgggggttcaaatccctccgcgctcgttttgtagtttaccagattatttgtccgcgttgacaaattgcttgtcgccccctcaagtcattgccatactataagtatggcaaaacttttcttgcgttgcacacagtatggacaatgcaccgtatcaacccacaattcatccctctattatgcaacgccattgtttctagcgggagcatcataaaaacccttacttttagggttttcagctatttaattcaaatgccaggaaccagacttgaactggtgacacgaggattttcagtcctctgctctaccgactgagctatcccggcgcgggtttttttatgttcgccacgattactaaatgtagcagaggaaaaaggattagtcaaggggtttctcaaaaaaaattttatttatttttgatagcaaccgccaagatgagaaaaccgatatataaaaagactttcacccccatcacttgtcagctgttccctattacctgcttcccgaacttcaccccagcaaaaacaaagacgaacaccaggaactgcactagaacgatactcggaccagaggccaggttaaacactccagaaaccatcattccagcgatgctactacaagaaccaactatcaccgatagaatgagaaagcggctaaaatggtgactgataagtttggctgtagcagcgggaatgactaaaaaagcatttactaataaaaccccaacagctttaattgccaccgccacggctaaagatagtaaaataacaaacccatagcgatataattgaacaggaacgccctggacttgggcaacatcagggttaagggttaacaaaatttgcgatcgcaaagttgacaataaaaaaatgctgctacccaacagcaccagcaacgtcaaaattaaatccgtcctatcaatagccagaatatcgccaaataataccgccatcaaattaccacgatatccctcaatcatgctgctgaggatcacaccaatagctaatgacccggataggactatactcagaacactatcactagctaaatctgttttgtcaattaaatagaggacaactacaccaaaaattaaagtaaatggcaacaacatccaatgaggatttgtatttagtaacactcctaatgctatccctactaaggctgcatgaccaacagcatgactaaaaaaagataactggcgcaaagtcacaaagctacccagtaaaccgcccagtatccccattaatacagcaccgataatggcacgttgcatgaaggggaattgtaataagtttaccaattgagaaaagttattaacaccaaacaaaaaccagttgctttgaacataaatcaataaattcatatctttgattttacaatgattttaatctatcctagagataaggtgattggtgactggtgattggtgactggtgattggtgattggtgattggtgactggggaaaataaagttcaatgttaaaacttctattcccaattcccaattcccaattcccaattcccaattcccaattccctattatttaatgatggtgttgataacgactaaaaccaggaccataagttgctaagagattttgtggtgaaagggcaatttctggatgtccagaacacactaaagtttgattgagacagatgacgcgatcgcaatgacgatttaccatatcaatatcatgggaaacctgcaaaactgtccaattttcctcctgttttaactcatttagcaaggcataaaaatcagccgcacctcgcatatctaccccagcaaaagcttcatccaatactaggaattttcgcggaattaccaaacaataagctaacaataccctttttagttgaccaccactaagagtaccaatagcttgattttttaaatgataagcatctgtacgttgtaaagctgctttgactgcggctgatttttcttgtttgttttgccaaaacttggataaaaatagatgtttattttgaccttttaccttttccctgtcacctattcccagttctactaactcacttacagaaataggaaaactgcgatcaaaaataaagttttgaggcatatatgccaattctttacgcaaatttcctaaccgagaaatggggcgaccaaaaatttcaattgttccagaactacgaggaattaaatctaaaatagctttaaccaaggtacttttaccagcgccatttggtcctactattgctgtatctgttccgggaaataatgcaaaggaaacatcccgtatagctaaatagcttccttgatagacggttaaaccttctacttttaatattggcaataatgtttttgattcttgttcgtcagtcattcgattttagattttggattttgaattatcaattatcaattatcaattatcaattatcaattattgacatcctgctgctaaactctgcaaattatttctcattgcttggaaataatattgtgggttggtttccccagtttctaaagaactaagaggatacaaagttaatttcaaatcttgagaaaggctattcagtaatttattgtctactcctggttcactaaataaagcttttacttggtactttttcactgcattgacggctttttttacgtctgctggtgaaagttgatcttcgggaattttcaccactgcaacttgcttgaggttgtatctttgggctagataaggaaaggcatcatgaaaggtgataaaagtacagttgggtgttttgcttaaagtctgctgaaattcattatttaatttttctaattcttgaatataagtggcagcattagtttgataaacttctttattggctggatcagctttaattaaaccatctctaatattgatcacttgctgtttggcaaaaactggatctaaccaaacatgagggtttccctctgcgtgttcatgtttgtgatcatgatcgtgattgtgaccttttacttcctctattggtgatatatcatctactactttaatacctttactggcatcaatttctattaatttggaattttctgcatttttgatggtattgctaagaaattcttccatacctaagccattttttactaaaattctggctgtggcgatcgccttcacatcatccggtgtagcctgatattcatgcacatctgtacctggtggaattaaaatctctacatctgctacatctccaactacagcttttgtaaacaaatacacgggtaaaaacgtagttactactttagttttttctgagttttgtaccttttctactggtgacggtgatgactgaaccgcattttgcgctgtgttgttttgtgtttgctgacaaccagaggcaattaaacagcaaaataaagtaaatattagcccaataggctttttatagacttttatctcttgttttgtaagattaactgtcatttgcttttcctctctttagcagaatttttgattttaggtcaatttttcattgaaaattatactcattatacattaatataagaaccattatcattttcacataatactgacaacaaaattatgcactatttacaagatgctttgatttaagtaatgtagattacatttttttctgggagaccgctttaagattagtttttttaagtgctgagggatttttggctacatggttgtaaaaatgaccttaattagctttgtcaaaaaacgtagcaaataaacttctcggtacagttgtgaaataacaatgggtgtgtggaaaaatggctaaaaagtggaatcatcttaccagtccagctatttgcagcattatactatgtgcaaatacatctgttttcgcaaatgaaccagcagggaaaacagaaactaattattctcagcaagagttaatatcacaagttacttcagtatctcagttgtcagatgtacaaccgggagactgggcatttcaatcgttacagtctttagtagaacgttatggttgtattgctgggtatcctaatggtacttatcggggaaatcgcgcattaaccaggtatgaatttgcagcaggtttgaatgcttgtttggatcgggtgaatgaattaattgctactgcaactgctgatggagtcacaaaacaggacttagcaactatccaaaaactgcaagaagaattttctgccgaactagcaaccttacgggggcgtgtggatgctttggaagcaaagacttctgagttagaagcaaatcagttttcgaccactactaaactgcaaggtcaagttgtagccgttgttagtgatgttttatcaggtgatcaagttaacggaacacctattgcagataaaaatactacccttggggcgcggacaagaattgaatttgtcagcagttttacgggtaaagatacactgtttaccagaattgagagtaataatattgccactgctaacttgctaacaggggaaggaaagttggcttttgcaggtagtggtactaccacttctgtactgggaacactatcgtatagattccctctaagtgagaaaacccaagcaatagcgatcgcctccggtggtgcaatagatgacattaccagtacagtgaacatttttgacggtgatggtgcttttggtgctttatctacctttggtacacgcaacccaatttatggacaaatggggggcgctggtttgggagtaacacaccagtttagtaatagagtgggagtcagtttagggtatttagcaggttcagctaataaccctgccagtagaagtggcttgtttgatggtccttatggtgctttggcacagttgacagttaaacccagcgatcgcattacccttggtttaacttacatcaattcctataacacaccactagctacaggtagcaataacgccacatctaacttttttacaggcaattcattttccagtaattcctacggtgtgcaagcatccataggcattagtgataaattcgtgttaggtggttggggtggatatacaaacagtaatgtgttaacaggtgcaagaggagatgttgacatttggaactatgctgtcacccttggtttccgagacttgggtaaaaaaggtaacttagctggtattatcgtcggcatggagccaaaagttaccagtacaagtaccaacttagcagcattcaaagaccaaaatacctcatatcacattgaggcattttatcaatataaactcaacgacaatatcactattacccctggcgttatttggttaaccgcaccagaccataacactaataataatgatgtagtcattggggcgttgagaactacctttagtttctaggaacaggaaatagcgaatagcgaatagcgaatagcgaataggggcaaccacgggggggttgcccctactttgttaaatagggtttgctgaataaacctaaaaccttgatatatcaaaggttagaggctgataaacacagaaattagtgcaagggttttgaagggtataccggaaaaagtgtgcattttttgggatttcaagagatggcaaagaaattttcaaatctcctcctgactcctatgccctcacggaaagactttctcagcaacccctaaataaaaaaccagccttcccacgggctggtcaaaaaaattttaaaacgttgttcgtgttgtcttctcagtagagtcaaaaccaaattgcgcgttcccaaaatgtaacgggcaacttttcttaacaagattgtaacaggcagtacagatttttctatgaaattctcaaaaaatatcttccctcagttaaggaagtctttatatttacaggcagatgaggaagatccgtcaaggtctaaaagtcaggaagttatgacaggagttcaggagtcaaaaggtaaataggggttgctgagaaagtctttccgtgagggcataggagtcaggagtcaggagtcaggagtcaggagtcaggagtcaggaggagattggaaaatttctttgccatctcttgaaatccgaaaaaatgcacactttttctggtatacccttcaaaacccttgcactaatttctgtgtttatcagcctctaacctttgatatatcaaggttttaggtttattcagcaaaccctaaatatttctccccagtcaccagtccccagtcaccagtcaccagtccccagtcaccagtcaccagtcaccagtccccagtcaccagtcaccagtccccagtcaccagtcaccagtcaccagtcaccagtcaccagtcaccagtcaccagtcaccagtccccagttaccagtcaccaatcaccaattacctgtggcaatattgtaatgaagtaatattacactcaacttagcaaccgagatgataggaaacacacttgtaggaagataccagattatccgccatctgggaggagggggatttggagaaacttatgttgcttctgatactcacttacctggttctcctcagtgtgttgtcaaaaaactcaagcctcaatctagtaacgctgcaactttagaaatagccagacgtttatttgatactgaagcgcaggttttgtacaagttaggtactcatgatcacattccccaacttttagcatactttgaggaaaatgccgaattttaccttgttcaagaatttattcctagtcatgatctctcccaagagttattaccaggaaaaaccctcactcaagatcaggtaatttctctattacaagaaattttggaaattttagactttgtacatcaacaaaaggtaattcaccgtgatgttaatccccgcaatatcctcagacgtgatcaagatagtaaactaattttaattgattttggggcagttaaagaaattaccacccaagtcattataccttctggtcaaactcccgctactgttgctattggcacacctggttatatgcctggagaacaagcccaaggtacaccaaaattcagcagtgatatctatgctttgggaattattgctattcaagcaatgactggtttattacctcagcaattagaaagagatgcagatactaatgaaattatttggcggaatcataccactgtcaccccagaatttgccgaatttatagataaaatgatttgttatgattttcgtcaacgttatgcttcagccacagtagcattacaagcactgcaagaattagttaaacctctctctggaacaatagtttttagtcctcctgcaccagttaatcatatcaaacctcaaccatctaaaaaatttctattgttcaaattagtatcaggaatatttttattaagtttagggggaattgcatcaatatatatctttaataaaatcaatactcataacgcagttgatttatataaccaagggaatacacttttacaactccaaagatatgaagatgcactggcaaattatgaaaaagcagtaaatatcaaacctgattattttccaggatggtatggtcaaggtaaagcattatttgaattgaaaaaatatcaacaagcaatcacagcttatgataaagcaattcaaattcaacctgattatttagaagcttggattggtagaggttttgccttatcaagtttacagcgatatacagaagcaatttctgcttttgataaagccttacaaatgaaagatgattatccagcagtgtggaatgctaaaggtgatgctttcagaaatttaaaacaatatgataatgctattaagtcttatgatcaagcaattgaattgcaatccgataattatgaatcttggtataaaaaaggtttgtctttacaaaatatcaaacaatataatgatgcaattacagcttatacacaagcagtagaactaaaaccagactatacagcagctttatataatttgggtaattccctagtaaatttaaaccgctatgaagatgctttaaaagcctatagtcaagtcgtccaatatcaacccagtcattaccaatcttggttttctagaggtaatattttagtgacattaagaagatatgctgaagcaattgactcatttaaggaagtgattaaatatcatcctagtaattatcaagcttggtatactttgggatggtcactacatcaaagtcaacgttatacagaagcgatcgatgcttataaaaaagcaatttctttgaaagcaaatgattatcaagcatggtataatttaggaaattcacaatataagttacagagatatgaagatgcttttgcatcctataataaagcagttacttacaaaaaaaaccactatgaaagttggtacagcatgggcaatgcgttattcaatttacaacgatatcaagaagcgataaaatcctatgatcaagctattaaatataagcccgattaccaacaagcaatagaagcccgcaaacaggcagaaaatcaaatccaacccgacaaatctctcccaattgttgtacctattttgcccatgtctaattaatgaaaacccctcgacacctgaaaattaaatagtgtagattgattaaactagtaaactaattcatgtcagatattcacttctcgcgggtaatctggtaaatataaagatgtcgttttaatatctgattcaatctgattccatctatagatttgattcataaaagaaacttttttactactgactacttcttgcagtttctctctaatctgttgcttttccttatactcctggattttgatttgagattgaggatatacatcagtatcttcaggaattttttccaggaatttgattgcaccagcaaagtctttccttaaagctttatgataagctgaatgtaaaaaatattcggctctaatttgccttttctgattgtattcagctaatttttgttgcactatagcaccagcagaactttctggaggaatttggcgcagatattctaaagcagccgaaaaatctctcttttctgcgctggcgtaagctttatttaataaagtttgtgtttttgcttctaggttagtttctgttttttcaattagttgttctcgtttagaacgccaataggaagtgtagggaatttgcgtcacagcgtccatggcatctaacaaattaccttcatctaatgcttgttcagctactaaataatttttagtatcattgtgccattgcttttgccattctgcaattgtctcttgagcttctggatagacgttgctataggagggaattgttttggctaaactaattgctttttctaaattaccggtttgatattctgtaattgcttcagataaagttgctgtttctgaattagcttgagaactagtagctaaagcataaactcccaaaccaactaccaaagaattaatggtgattccccatttcattcctgctaataatggatctaattttttatttttatctgcaacagcttttttggtagtaatgggaaactttgaagtcgcaattgcagatgcccgatgcttccatgttatgtgtttaaatacccatagtgcttcgctggcagattgaaatctttcctgataattatagcgaatcatttggctgataaaaacagccagatattcgtcaatgatcgtatcttcacaagtccaaggaatttcattattagcaggatcaatttttaattgcagtggtgttaatcctgttaaaccttggagtacaatcattcccaaagcataaatgtcactattgggttgtgtttgtcctaaaaattgttctggtgggatgtaacccaatgaagtcacgggaatctgggaaataggtaattcggcatccgtgctaaaatcaatgggttgaattgaaccaaaatctattagcactaatttatcatcactagaacgtctgattaaattttctggtttgatatcacagtgaataaaaccttgagaatggacaaattcgaggatatttaatgcatcttcgagaaatgtcatcgcttgggtggtactccacttctgtcccttgtttttatttatctttaattctacggataagggttgtccgtaaatatattcctgtactaaataaaactgttcattttcttcaaagcaggtgatcagtttaggaatttggtcatgttctcctaaatgcttcagggtttcggtttcggtgagaaaacttagtctgaggtagtcaaagtaggaattagattgatagtggttgacttttagctgtttaacaacgtatctgggtctttctgggtaatcaacatctttggtatcttcggcaatataagtttgcccaaatacacctgcactaaggctttgaataatttggtagcgaccttgcaataattttctggtgatttgttcagtcataagttccttactgagaaatctattagatcagttgttactcacctcttctcaaatttcttcctctctccggaatagggagaaatgattttttgtagctttcaataagggggactttcaataaagactgctcttgaatctctataaatgccgatatatagccaaaaataacccaatatcaactttttacagggtttttctatctcacgattcatcaaaatatctgtcaaataaaatacatacaaatcccgatgttttattaacacctggaataagtcatattacttgcatatatgtctatttatttacttctttgacatttttaagcagtctgatgggttttaggtcttaggatcaggatgggagaaattgaaatcggtttggtgcagaaatcaaaaagtggtaatttacttgagcgatcgctattgatatgtggacgcaggactttttcagcatcccctaattagatacatcaccatttccatcaattttgcaattgagtcttgatttatgagtcttgatttcttagctattagttgccgattattttctcccttacttctccatcttgccatctgccccaggttctagcttttattcaccatctgtcaaaggttttacgactttagcgatcgcctcttggataaatacttttataaattcgtctcggcgattcatctgaaattgctgctgtactacttccgtcattcccccatcaccccaatcttgatcatggcgaaaatactcaataaagcttttcccggcaatgcgcgttaaataagctgctgttactccttgaatagcgcgaccaatgataaaagtagcaacatgaagttgcaaagccgttgatagtaattcaatagctcctttaacaatacctaaaccagcaatggtttttcctaaagataaggctaattctcgcccccgttccatattcaaatcacaaccgtaaaccctgccaatttctaccaccatttgggcgttaactgcggcggtagctagtaagtctaccactggtaaaggagttacagaaaccacaccagcgccgatccattgatagcggtctacaattttatcagcttgacggcgacgttgagaatcaattaattttcgcgcttcttctcctaagcggagagattgtaagagaatattatctgcaactaaatcttcaccttcagcccgtagtacagaagccatacgtcgcaataaggagactatatctggttctggttggaaaatttctccggtttctaattgtgcgggttgggggttagcagcgatcgccaccacatcattactagcaatataatcttttacccgttgacgcaacttagttaaaatggcttcttgatcttcatctgtatataaatcagttttattgagaaccaagagcgatcgcttaccaatttctgctaaacccttcaacggctcatattcagaacgccgtaaatcattatctaccacaaataataataaatctgcttccgtcgccaaagccctggccagttgttctcgttctgtgccggcaactcccgcttctaaaattcctggggtatcggtaattaaaatttttcgttctaatccctttaagcgtaaacaataggtttcacccacctgggttgtacccattggcgcatttacctgcccgactatccgccccataatcgcatttactaaggaagttttgccagcactccctgttccaaacaccactacttgaatttccccccgtgctaaattcgcttctatttccttagtgcgactcagtaaagcttgacgggtaacttcatcttgaatttgtgccacctgttgacgtacagcttgcagagtgctagaagccgcatcagacttagccgcaggaatttggctaggagtaacacgtctgcgattacgtcgtgatttttcctcaccagaccgcaaaaccaaaacataatatataaaggctgcaaccaaccctgccaaaagaacaatcagcagcaacagcagtagattacctaataggggagaataggatagttgccaataaagccgagtcagggaatcaatcagccacagggctaaccccaaaatgataatcaaaccaacaatgagcgtcactaggcgagacagaggcatgaatcacaaaaatgagaggatattaagtaggcagatgcttctgatcttaatcgtcgtcatcaactacgtacagtacaaaaagacaaattttgctaaactcagatgcagtgcatatccaatgttcccttaaattcagtcaacagcgaatagtgcagaagattggtaatataatgttaagaatccgcgtttagttggttcgcggaagtggggagttagaggatttgaaaagcatctaattttttatttagaaagggatgagtatatttaaattgttcgattaattcatgctgcacgggatatttcacagattttagctgaagaagaatagttatgattaaggtaaaaatatacgatcaaatggttgcttgcgataacgccgataaatattaaagtctttgtctagagttgcaatagcagagatatttaatctttccgaaatagcaatcagcgataaatcggtaaaatctcctggtagatcctgataacttgtgttaagttcctggattctttcatagtccgatggcagtaaatgttcacataaaaatacttccagtgataaagcagataaaaattcgttctgcacttttgtatttggggcaagtaaccacatcacttctgtaacacaggcaattgttgtgatgagttgactggtacaggtactaaaaaaattaataactttttggtgatacttgtctttacggtcatagaaggcaacaagaatcccagtatcaattaatattaggggataattattattcatgagttcttgtttgatgtcttgcttgaattatgtcagaaattgcttttttgcgtacatctctatctgacaaatctcctgatccttctagtaaaaatttgggataaccgcccattctttctaatactgttttaggtcgagcttgatagttgttaacagatgtttctaaagatgagataaattttaaaacaagtgaaatttgttgatcatcaaggttagcaatcgcttctaatagtttttggtgtggactggtggagtacatagaaatttattactgttgtgataatttacagtttagcaaataagaaaagcgatcgcatcttttcacatttttcaaatagcgataccttcggtaagctatctctacgagacgctacgcgaacgctaacgcactccccacatccccaaaaagcgatcaatctctcattctcactgtagcagaatagcagttttaggtattgggtttgaataacaaaagtatagtcatatatccatattttgttatctcaacccaagctattgctaaacccgtacaaattcaacggataaaccccctctaagtattaacacaaataaataagtctaaactcaacaattcttaaatattaacgcctatacacaattataaaatgcttcccaaaaattcaagaagattcttaatatttgcaacaataatgaagataacagcttggagtcattacccgtgaaccctcctaccaccaccccaacacaaacccaaaatcgcaaagcggatcatatccgcatctgtcttgaggaagatgtccaatgtcagcaagtcactactggactagaaaaatatcgttttattcattgttgtttaccggaatgcgatcgcactgacattgatatcagcacgacttttttaggaaaacagcttcacgcaccaatcttaatatcttccatgactggaggaacagaacgcgcaggaatgattaaccgtcgtttggcagaagtcgcccagcaatataaactagcgatgggtgtaggttctcagcgtgtagttttggaaaaaccccaagttgctgatactttcgctattcgtaaatacgccccagatgtgcttttatttgctaatttaggtgctgtacaacttaattatcaatgtgggattgatgaatgtttgcgaattattgagcttttagaagctgatgctttgattttacacattaacccgctacaagagttcattcaacccagaggtgatactaatttccggggattgtttgacaaaattgccgatttatgcagtaaattaccagttcctgtcattgccaaagaagtcggtaatggtatttctgggaagatggctgaaaaacttatatccgtaggaatacaggctattgatgtcgcaggggctggtggtacatcttgggctttggtagaaagcgaaagagcggaaacatcattgcagcgtagattaggtaagacttttgccgattgggggataccgacagcagaatgtattaccagtattcgcgcacagttaccggaaatacctttaatagcgtctggggggttacgtcatgggttagatgtagccaaagcgatcgctcttggtgcagatatcgctggtttagcaatgcctttcctgcaagcagcagatgtatcatcaactgcactacaagaattgacagaagtcttaattgccgaaatcaccaccgtgttattttgtactggtaacagaagtttgtatcagttaaagcaatctgacagcttgcagcgtatacaataaaaagaggcaggagtcaggaggcaggagttatttttttaattgttctgttccctgttccctattccctattccctttcctaccagatatgatgggtattcaaaaggacatattataaccaatgaataacttttttaaacaaacttgtgctagtttaattggtagcgtactaggactgattattttctccggtgttggtagtctaggcttattatttctgattatcgctgctactgctaaagatacaagtccacaagttaaagataaatctatgttggtgtttgacttgtcaatgaaaatcactgacagtcaaccgagtgctaatgacttgctgcaaaaaaccttaacaggagtagatgaagaacaaatcacactccgcaaagtgattgaaactgtggaaaaagcgcaacgtgatccgcgcattgtgggtatttatatagatgctactaagtcaggtacagcgagtagtttgggttatgcttccctcaaagaaattcgtcaagcgttagataaattccgtgcatctgggaaaaagattatcgcatatagtacagattggaatgaacgggaatattatctgagttcagtagctgataagattgtactcaatcctgtaggcatgatggaaatcaacggtttgagttcacaaccgatattcttaacaggagcattggagaaatacgggattggtgttcaagtagtacgggtagggaaatttaaaggagcagtagaaccttttctcctggataaactcagtccagaaaatagacaacaaacccaaaaattattagatgatgtgtggggagagtggcgaacttctgtaggtaaaagtcggaaaattcaaccagaaaaattacaggcgatcgccaataaccaagctattttagaatctaccgccgcaaaagctaacggtttagtcgatcaaatagcttaccaagatgaagtatttgctgatttgaaaaatttaactgctagtgatgaagatgataaaaacttccgacaaattaacatgactgattatgtcgaagttcctggtaaatcaatgggagtagaacgcaactcagaaaataaaattgcagttgtttatgcagaaggagaaatagtcgatggtaaaggagaagatggacaaataggaggcgatcgctttgcccaaatcttcagaaaaattcgccaagatgaagatgtaaaatctgtagttttaagaattaacagtcctggtggtagcgccacagcttcagaaatcatacagcgagaaataaaattaactcgagaagttaaaccagtgattatttccatgggtgatgtagctgcttctggtggttattggattgccagtgattctaatcgcatttttgctgaaaagaatactattacaggttctattggtgtctttggaatattgttcaacggtgaaaaattagccaataataatggcatcacctgggatacagtaaaaacagcccaatttgcagatactcaaacagctgctcgtcccaaatcaccccaagaattagcactgtatcaacgcagtgttaaccgtatttataatatgtttattaataaagttgccgaaggtcgaaaactaccccaacaaaaggtagcagaaatcgcccaaggtcgagtttggtcaggtgtagcagcaaaacaaatcggtttagttgatgacattggtggtttaaatgttgctattgaatatgcagccaaagccgcaaaattaggtaacgattgggaagtagaagaatatccaagagtgacaactttagaagaacgtttttttggcagaacactacaagaagcccaagcaaaattaggaattgaaaaaaatctgattcagccaaataacccacttttagcagaatttgagaaatttaaacaagaagttgccattttacagaaaatgaacgacccccaaggcatttatgcccgtttaccttttaatttgaaaatagattaataagcctggggactggggactggggacacttcgacaagctcagtgcatcgctggggactggggactggggactggggactgggtaatcaattttatgtttcccaatcaactatcaactgtcaactatcaccaatcatcaatcactaaaatatagtgtagagtagtaggaattttacctcactactctactttacacatccatctatggatataaaaacgaaacgcttgttactgcttgttgtttcctgtagtttatctggtgttattttaggcggaactgctagttgggcagaaagtaaaatgtgtatgcgtgctgatacaattaccagtgaatgtattacccaaaacccagtcgaaaaaacaattcaaggtatgagtacgggattattagctggtgcgggtgctgcttttggtgcagcttggaatttacgtcatcaagactaaacccagatccccgacttcttggagaagtcggggatctatagcgataactgttaaaaggtcaaaagcgataattgcgatcgcctatccacatactcgttggtacagcattaccttgaggatctactttcaccctgacaatgatcggtgttctacttccatttcggttttgctgtgcttgcaacaaatcattattaatttgttgtctttgttcttcggaaagataataattttccaaaccgtaattaatcaacccatcttgataattaccctttaaagctacctgattattagctaaataaatcgggcgatcgctactcacacgcactggtttccaagctgcgggaacattacgattaaaatcacggttaaaatcacgattaaaatcacgattaaaatcacgattaaaatcacgattaaaagattgttgttcctgcaaaatcaaatataatgtactgccttgattgattctgccatttctcagagaattttctcttacccaatctctccaacccggtaatcttcgcaaattttcggtacgagagatattataatcaaaggacaaagcagaaccctgtaacacattattagaatatgcaggtaaagtttgcaaaatcacacttttacctgtcatttctgtatacattgcttgggtgggaactgctaaaattaaccctacttgcagcattagaggtgctactaaccgccaaattggtaacggttgattggccttttgttcagtagcaattaagtaatcacgaaaagttaacttttcggaaaattccttttctggagttaaggttttattttgttctggtgagttatttgtcataattggtgattggtgattggtgattggtgattggtgattggtgattggtgattggtgattggtgattggtgattggtaattggtaattggtgattgggaaaatacaaataatttacccttattccctattccctattccctattacccatgactaataggatttataacgcagagatttaatatattttttaattctaatttccgcaattgtagccgtagagaaagcggttaggacattaatctaaactaaaaccttgacactcaaaggcgtttagcactgtcaactgtcacctgtcacctgtcacctgctattgttttttaacagtaacacgttcctgtaaacgacgttcaaaccataaaccggcagaaatcagaccagaaccgcacaatacaaacaccaatgatctaaataataaatcagtgtcgtactctagaacccggctgataatttgcaggataaataatagcataccacaccaaaaagaagttctgttactcaactttaaaccttgttgcatcagtccccaagctaaggtgatcaacagaacattgaaaacaaaaatgcctagttcagtaatccgacttatagcttgatgccaaaaaggtacaatgacaataaaacccagaaaaatgctaatgacggtgatagtaaaaaatacttccctgcgggttgggttatgacgatgacgaaacagaaataaccattgcaacactgctaaaccgctaagaatgcctaaatcaatgataggcaaagattgaaaaacattggagaaattatttggcgaattaccaaaactgaaagattgccattgccaacggaaagacaataaataaaacaccatagcaaaacaccccaaagctaaattacgggctatattttgaaataaccgataattaacagttgggaacaacaaatcatcataactccaaaataaagcaggtggtaatgctaaagcaaaagaagcaacccaaggaataacatcagaaaaagttaataatggtaaaggattgagattgtattgtagagaaagagtaaaagcgatcgctgctaagataaaaatcacccgtgaacgacaaatatacgccaaaggtacaaacaacaaccaagaaattaacggcgtatgtcgcacagctaaacgcgcccaattaaaatcactaccagcagaccaaaattctctcagtcctaaccaataaccaatttgtaacaggataatagccacaacacccaaagaattgagtgatagactataagccatgactaaaacaccaaacccccaagctaaaaataactgggtggctgaaccgctaatattaaatatttgcgccatcagcattaaagttgcacccaaaattaaggcgctgagaatgagtaaagcttctcctaatagacgtttgttgcgttgtggttttttaccttctcccttagcaagagtaggttctctccaagtcaaaaaacccgtgatagcagtagacaaaaacaaactcatcaacaagataaatttaacttctcttgaccatgtttgccaatttgctgctacaaagataatgatacctaaaattaaaagtaaaccaccgacagcaatggctattaaaccagaactttcttttgcagccgcttctattttgttaaattgataacggtcggcaatttgctggtattgggaagaactgataagtccttcatctcgccaaagttgtgcttcttggcgcagtttttgcggaaaattatctaagatcatgacctctccggtgcaaatgggttaaaggaggcaggagttgaaaggcaggaggcaggagggaggtaggagggaggtaggagaaagcttacagggggattcaaacccacctttaatcgaagacagctaaatctgagattgtggctcttgacttaaacccatacaggcgaggcaaaaagactttattgtttattgacaattttcccttctgcctcctgccctctgccttcagcctcgcccgaagggcagttaatttaacaactgtcaaaaaacggttagcttctagccaaaggccagaagccgcgccggacgcgctttaaaaacgcaatctcaatggtggtcattatcttttcagtatgcagccaaatgccttaattacattgttctgatgtaacagtttcaatattgtgctaaatagctaaaattacccaatttttggatatggaaaaaccttcaaatttattacttaaagttgcccgtcgtttatttgatgatgcagatgaacaagcaaagtttattgcagctttagttaatcccaaacctttttcaccttgtattctttggtgtcaagataagcctgaagtttcaccttttgcagtagaaacaccaacattttggcaaccagaatttgtagaccgtttacaaattggcgaaaaaccaggtcaacattctttacatcaacaaggatatttttattgtttagatttttcttctgtatttgcggcttctgtgttgttaacaattaatcaaccagtacctttagtatttgatatgtgcgctgcaccaggaggcaagagtgtatttgcttggaaagctttaaaacctgatttattaattagtaatgaagtcattggtaaacgtttagggatgttaatttctaatttgaaacgttgccaaattcaacctagttgtgtggtaaatcgagattctagtatttttgtagagatgtttgcagaatctagtaatttagtcttagttgatgcaccttgtacgggtcaatctttactagctaaaggtgaaaaagcaccgggttgttttcatcataccgcaattaataaaagtgctaatcgtcaaaaaagaattattgctaattcagcccaaattgttgcacctcacggttatttagtttatatgacttgcacctattccccagaagaaaatgagcaggtttgtgaatggttgttagcaagatttccccaatttcaagctgtggaagttagtcatttatccaaatatcaatcacgtttaacaaacattccttgttatcggatgtttccgcaggatggtttgggtgctggtgcgtttacggtgttgtttaaaaatatgaatgaaggagatactaaacaaatcaatttaaataatctagcaattatacatcaaatgtaaataagtaaataatcaaaataattctcgttcccatactctgtattatcaattgataattgataattgataattgataattgtttcattaattttcaattgtcaattgttcattcttaattgataatatacaccaaagtcttaatatgattgaaccgcaaaggacgcaaaggacacaaaggtaagagagttgagcgagagtttttggtctggctgtttttatttttttcccaatgggtatgctcccccagtcagagactgggaacgagcagtaattaattttttagtggttgtttatgttaatttttcagtcactttttgtacttcctcaattgataatgctaaagcttgggcaatttgttcaacagttaaacccatttgcaataatttgggtatagcttcttttctcgcttgttctgcttgttctgcccgttgacgttcattttctgcccgttgacgttcagcttcttctggtaacagaactaagtttccttgttgatcataaaatcttaaccaagtggcggtttctcttgttagtattccttgccaatttcctaaccaaaatcctaatgtttcacaccataaccagcctttttcattagctgttaaaggttgataaacaaaatgattatctaaatgccaaccttttaaggagtgaggatcaaaaggatcataaacaaaataatctctagttctaaatatgttttgataaagttcttttttgagaactaaatctacatttttagttgagggagacattaattcaataattacatctgggtagcgtccttgttcttcccaaactacccaaccttgacgagtttctttattggggacattcaaaacaacaaaaaaatcaggaccacgaaaatctttatttcgcagttgttcactactataatagatgaacatattcccgccaacaaaataatctggacggtctgaccatgtttgttgtaaagaataaattaaaacattcatggcgatgcggtggcggttactttccaagggaactccatcatcaaatattaaatcggttggtggtagggggggttcgtagtctgggataacctcaactggtggagtctgattttctgtaatattcgttaacatgacatcacctgagactattgacatatttatctatgatcttagctgtcaattgataagtattcagccatcagctatcagctttcaatgctaaaatacaaagaacaatcacaaatgcacagagtgtaagtttactcaattaatgctgctaaatctttgtttctgccattataagctgattactgattactgatagctgaatgctgacaacttctcaagttatggtaggtaagtgttgacgatttttccactatgccacaagtaattattgcctctggttctgaaatatctgcggatgctggtgctgctgttgctaaccaaggaggtaatgcggttgatgcggcgatcgctgctactgttgtttctatgtgtactgatttgggggtgatggctgccggtggtagtggttttatcactatctggccagctaatgctgatcctattgtcattgatggttatgcagagatgccaggacgaggtttggaaaatgagcgttttggccagggtattcgggaagttttctttgattatggtggtgaaattagtacggtgcttggttatggtagtattgccactccggggatgtttgcggctttgggcaaggcttgggaacagtacggaaatataccttggtccaatgtggtagcacctgcacgaaaatgggctaaacaaggttttcccctttctgggggtgcggcggaatatttacattacacccatgcagctatttttgggtggcatcctgacagctataagacgctacaccatgaggatggtactcccctacaacaaggggaaattgttcatgttcctggactagctgagagtctagaattgattgcccaggagggggtaggggctttttatactggggaattaggaaagcggattgttgcggaaattcaggaaaatgcaggtttgttaacggcggcggatctggctgcttatgaggcggtagagcgatcgcctatttgcattaattttgatcattggcaaattgcaactaaccctcctcctgctgtgggtggtgcttgtttagcggcaatgttgttacttttagatgataattctgtgcaagaatggaatttaacgactgttaaacaaatggtagaggtgcaacacgcagttttaaactaccgcaaccatcatcttgattttagcagcgatcgcactggggaaactgcaaaactcctagaattagcccgtgtgggaaaaccgcaaactctgttatcttcaccttcaactattcacatttccaccgttgatagtaacggtttagcttgttctattaccgcttctgctggttatggttcgggagtgatggttggtggtactgggttttggttgaataattctttgggagaaatagaattacatccccaaggatgtcaccatttaaacccaggagtgcgtttaacttctaatatgtccccaactattgctagatgtgctgatggtagggttttagctattggttctcctggtgcttctcgtattaccacagccatagctcaagtattgctgaattttgtgcatttgggaatgtctttagaagaggcgatcgcccatcctcgtctgcacgtggaaactagggatggtaaacctactgtagtcatggaagctggtattcccaaggatgaaatagggggttttattacccattgtttccctaaactctctatgtattttggcggagtgcaggccactttatggcatccgcaatatggtttatctgctgctgctgatccccgtcgtactggtggggttgctaggggtggtaattgacaattgataattgataattgtttaattaaaggtttaaaacctacccttgaaaggggaaaaagccaaaaattctgcttttgaaatcctctgaatttcagggataggtaattgtcaatttttaattgtcaattatgggagcatcctaaatgtgtaagtttatttttatctcacaacagcaaattaccccaggctttatttgattgaaccgcaagggacacaaagtacacaaaggtaagagagttggagagagtttttggtgttgctccatttattttttcttattttttcaaaatttggatgctccctcaattctcaattctcaattctcaattatcaattgatcaccaactcttgcaacacctgctgtaaatcacttgttaactcagataccgcttgtcttgcacctactcgactacctttataggtgggataacgttcagatacagatattggtttacctacggaaattttggctttttgtttacctaattctggacggtttaaaggattattacctttaattttattcaccatatcccataatagtaaagtcgtttcggcaaatctttctactgtgggtttttctcggatataagtcccagaaactgctacaaaactttctactaatctcatgtgccacatccgaaaataagcttcttcggcgattctatcccctaaatttttctcaatggttgataatgatttcatatctttaaaatcttccctaaatatataattccatccggcttgttctacccttctacatcgatcattccaattacctcttgatggtaaatcaaaatattgttcagcaatgaataacgctatattcattacagattgtaatcggtaagctaaggcttcatttctatctttaatttccccattagtaatcttttcatctggcaaggtttgatgataaaatttgctgtaaaaattctccatgatagctaataattgttctgccaaagtcaataatcggggataaagtaactcaaaggaactactattattagctgattgaaaatttaaaccactcgcaatttctaactgagttaataaattggcgatcgcttcccaaggttcatcaacataactatattttaacccaattgggacaattaaaacttcttcatttctccctgctttttgtaaatcttctacacaccaaaaacccatttgagcaatacccggttctaaagggctaataatttctgataaaccattagtagcaccttcgggagcagcggccatggggaacttaccattaatatataaatctctggcagaacgcaaccccatccagtcagctttccctctttgaataggagtaccacctaaattagcagctaaccaacctatatatttaccagcccataaaggaataccccgatcataaataaaatgggcatgaatgggatattgtaaatttatattttgctgttttgctaccttgggtaaaagctgagaaaataaataagttaaacaaaaaggatcttctgtttttggatgacgaaacgctaacataaaccgaattttcccagcttgaaactgatcataaagctccgctaaaacttctacattttctgcttcaatttggttaatgggagttttccagctgatccagtagggtaataacaaatgtacgcattttaacaacaaggggttaaaggctggggggataaattctaagggtggttgcgcttgatacataaaaaataggagatccaggagtcaggagatcaaagagtcaggaaatcaaagagtcaggagatcaaggagtcagaatgagtcagaaggattacttgtttaaaatagctttagcataactatctaataacctactcacttcctttaatttcaacattaattctgatgtatcaccatattgtaaatcatttgccagaatcagataatatctacattcttccacagaagcttgtgcaatattcataaatcttgctttatctgcatctccttttttcttaaacccttctgcaatatttgcaggaatagaaacagatgcacgtctaaactgagaagttagcccatatatttctgatttaggaaaattagccgttaattgatatactcctaatacaaattgatgtgctttttgccaaactattaaatcttcaaatgttcttgcaggttgcataattatgaaataggagatcaaggagtcaggagtcaggagatccaggagttcaaggagtcaggagtcaggagtcagaaatcatagaaagttcttcttcactgtcaccagtccccagtcaccagtcccctatgatggcgatcgcaaatgacagaattgcgagaaactaaaaacaggtataaaaaacgaaaaaaacggagaacacaatggcctggacaaaaattctcgaagttaacgccctatcccctggggcgcgagaagtggtaaaagtaggaaacagaaatattttagtgttaaaccacgaaaatcagctttatgccgtggaaaatagctgtcctcacctcaaattacccatgaaatccggtaaaattcaggacggagctattgtttgttctttccatcgtagtgcctttgacctaaatactggagaagtaaaaacttggtgtccttggccacccggagttggtaaattactatcaatggtatccgcagccaaaaccctgccagtatttcctctccgtgtggaagatggcaatattttgattgacttaccagaataaaatcgtaggggcgaagcattcgggcaactaattatcaatttttatcacaggttattttccgaatgcttcgcccctacttcgcccgtacaggagtcaggagtcagaattaatttttctccctatctccccagttgtaggggcgaagcatttgggcgataatttgactgaaaaatcagacatctagatatcccaaatgcttcgaccagcccccataaataagttccataatttcttttctggacaagtctaatatgaattactacgtgatttatgatggcaattgcaatctctgtgttactttagtgcaattgttagaaaatctagaccagggaaagctatttcgctacatccccatgcaagatcaacaactattatcccaatggggaattagcgcccaagattgtgaacagggtatgattttaatagatgctcaaactccttcaagacgctggcaaggtagcaatgcagcagaagaaattgggcgactattaccgctaggtagtgtatttgtggaagcttatcgcgccttaccgggtatgaaatgggcaggagatagattttatgaacaaattagggataatcgctataccgtgtttggtaaacgtgcgaatacttatcaatcagcgtattgcatagatgatgattgcaaaataggtaatgggtaattagacctagcagtgaaaattatcgtagggacaattcatgaattgtccctacattaaacaactacctcctggggcaaccacggggggtttgcccctaccccttagccctgagattttgataactggcaacttagattattataagatggacggattgttaccaaaatggggctattatggctcgctatacctgttcttttctcgtttctgttgccagcgactatctacaacctttactgttcgagctactacagtattgtgatttggaaattcaatactacacaccagattacattatggctcgtgaaattcccggaaatgtatcattttccaggttggtgacagtggaagtattgattgataaatccactgctacggacgaggaaacccgcatgaatattgtgatcaaaaatgaggaactaccacttaaattggacaatcattgccgacaagtctttgattttgtccgacagcagattgaacatagtcgcaattggcacttaatagaaagtatatctggttaaccgtctcccgactgtaaaaacacgcaatagcgaaatttttattaaaagtcgggagatatttatattgtaaatatgccataattttataattttatgaattaattaggctttcctgaaaaagttatctgtgaaagctaggtgacaggtgacagtttcaagataggaattaagtgcaatagacctctccaaaatagaataagctgttgtgcatttaatttgtataagtggaacaggcatcttgcctgttccacaagagttcagaatattaagattatacaatttagctgtgtaacagcttagacatctccagaaaagaaattatggaacttatttatgggggctgggcgaagcatttggtatatctagatgtctgattttttcgttaagttatcgcccaaatgcttcgcccctacaacttatgacaaattaatacattagacatctccagaaaagaaattatggaacttatttatgggggctgggcgaagcatttcggatatctagatgtctgattttttcgttaagttatcgcccaaatgcttcgcccctacaacttatgacaaattaatacattagacatctccagaaaagaaattatggaacttatttatgggggtagggcgaagcatttcggatatctagatgtctgattttttcgctaagttatcgcccaaatgcttcgcccctacaacttatgacaaattaatacattagacatctccgaaaattatcggatcactataaatatgcgtaaactgaaacacattcgtagggacaattcatgaattgtccctacatctttttcaccagaggtatcttatgaattagatatctccggtaattgccttaattcaaaactgctctcaaccgtttgagaactttattaattgccatgaaagtttcatttttggagagtttttggagagtaggtagatcactttgtttgataatacgattgcaggtttcaatagctttatttaagttattgatgtttactcggggtgttccagtagcctgagcaatggcagaatcccctttgagatttttagtagttgctactagctcttctgagcttacttgagctataggagtctcaacaattccacctaaggcaccgattaatgcttgtgcatcctgcgcgggaacaccatcaaccgttaaattatcagtgacttgatcggcagctgcgccggtattatcatttcctgccaatacgctggcaacagcggcagtaccacttgcgttaccaccaccagcgttaccaccaccaccagcgttaccaccaccaccagcgttaccaccaccaccagcgttaccaccaccaccagcgttatcagcaccagctgcgttatcagcaccagctgcgttatcagcaccagctgcgttatcagcaccaccagtgttaccaccacctggggcatcgttaagtgccgatattacttcagcgacagtagtgttcaactctatctgaatttcctgtgcaacaatctcaagacccacatcactaccagcagcgggagtagtaacaatacctggtgatagtatttgtacttgtggtgtttcaaacagtgattgaactctcgcagtatccccaatcagagcttctatattagttccttgagctgatgcctgcccagccaatgctggtttggaggaagcagccaaagcacctaataatatagagattaaacccaaggtgagggtgaatttttgtttaatcatggttttgccctttttagctgaaattgctgtggtggaaaaaacaaattttagaactggagactataacctgcacttaaactaaatccagaactattaaggttgtcagtgacatcggtaaagatagcattgatcaccataggactttgtttgaagggaacaaaagaagcacctaagttaagaccacttccagtccaactactaacgagggatgcttgtggtgtgactctataacctatgctggcaaataagttaggatcattctcacgggcatttctagcacctttggatctgaaactgccactaccaacacccacagaaacagaaagtgcgtcaaatctctggctaactacaccataaatagtctcttggggaatatctgcttctccccatttaatggcatttgaccaaccaacggctacggctgtatccctggacaggattctgtgtagttttaagcctacggtgccactatcagcaaagtctccaaagaagttatcttgaccaccgagactgataatattgaaggcgacttctagacctgctgatttgactgcgtttcctaaaccaaaaccgacagacatagaaccatctactttcccatcaaaaggaaagaatagtccaccaccaacaaaggcttgtccccaacctgcaccataggcagtgggtgtaccggcactggaaccaggggcacctttgaggggttcagcgatttggataatgggatcaatcagtagttcctggcgtagtctatttgcttctgcaaaggtatcacctacagttgtaccagcagagggatctacttgagcgatggtttgaggtggtttgggctgaagagaagactttttaacagaagagttttgatttgctggttgaaaggtatcaccgaagctggtagagaaatctagctgtgagatagtttcgggtgctggggaaaacttcagcggttgattgttttcaataactgtatcttgagattttatatcttgagattcttggctgaaattttgcctaaaattttgcctaaaattttggctggaattttggctggatactttttctagctgggtttctagttcgttgctgacagtagcaggaactgagttatcaaccgcagacgcgggttttatgccgacagatgtagatagtaaaaggcatcctaatacattgatgcttaaaaactgcatccatttggctgagatgatgttggcgaatttgcgtgtagtcaaagttgtactcctcacacttttatacatttgttgcgtgtcactgttatagcatttttttgctaaaaaccaaacttttaccagtgctgatatttttaaatttactcaggctgagtgaggatcaatatttttaacaagttaattactattttgtttatagtgctattttggtaagataatagtcaggatttacgagatatcttttttatcaaagatttattgggataaaatacatattttttgcttaaaaatatgctattttgttatatttactttgtttatcagtttttttttaggttttctgtcaactgcctgaagattaaaaactcttaacttttgaacagaaaaatgtaattaaaagttataatattaacaattattaataaatattaataaatattaatacgttgttaggaaatttgttaatttatcattagataagctgttacacagctaaattgtcaggacttacgcaaaaggaaacgaaagtaggggtaattcatgaattacccctacgcaagaataaggtttttagtcacatcttgcgtaagtcctaattgtataattctaatattctgaactcttgtttaacaggcaagatgcctgttccacttatacaaattaaatgcacaacagcttatctctcatatctccgaaaattaaataagcataacctgaaacctttggtagggacaattcatgaattgtccctacattcattaccaccagatgcctattagacatctccagaaaagaaattatggaacttatttatgggggcaggtcgaagcttatgggatatctagatgtctgatttttccgttaaattatcgcccataagcttcgcccctacaacttatgacaaattatgacaaattaatacattctattttggagaggtctattaagttaaatgattttctagcaaagatgcgatcgcctctggatggattttattatattgttttttacccaacattaaaacacaattaggggcgctactacaacgtttttgacagtcggtgtgttcaattttgactttatggagtaaaccgcgatcgcacaaagttttttctaattctgataataaacctttaccacctcgtttcacacagcctgatttttgacaaaccataattttagctgtattttctggtagttggtaatgaataggacaaaaaccaacttgttgaactcgataagcaataagtttaagtttactggtaagtggatttaatttactaatagcatgaatgataacttgttcaccaggtactaaattagcaagcaaggaacaaagtaaatcttgggtaattttaatttttaaagttcccccaggaatagctaaacgcaaatgtttatatttttcgggtttgttaccaacaaaacctaaaaactgtccttccagattcacttcagataatgtgagatatttttcacccatattgataaccatgacgagagaaaatgagagaaaataatattagctatcaacattcagcgaagaacagcaatagggaaaattcagaagtatgaattttgagaaaattacatattcttcttcattaattctgattctttgtatttcagcttttaagtattagctgataactgaatgctgatagctaaattctgagataaaatcctgagataaaatcctgagataaaatcctgagataatcttaggacagacgtttagcttctaaagtttgaggtaaactttcttgagtaggaatttcactaaattctaattcccaaccattagctaaagtgagaactttacctgcttcactgtctgtttgtttaacaacttcttcttctaagtctttcttagcgacatagacaaccaaagttccagcatcattcgtccgtagcatgactttcatttgatgtttcctcagcagattctagttctcttttgcgacaaccgatgatgtaccctgtatctaaaaaatgtacggcatagatatagtaagcttgtaaaaaagttcctatacttgccacataaccaacgtctccaattttggctaaaacttccccaatttctcgccctggaaaagtaccatcatttttgatgagtttcttaactcggactttttcaccaatttcaaacactggtggatcatttagttctatctcatctcgctgcatgaaaatacctctgttcttgtactaaattcaacaattcttctggagaaagattgcgttttttgatggttgattcatggcggactgcatttaaaacagcttgggtttcttcgtcattcaaaaatatcccatgctgtgctaataagttagataataaatgccttccagaatgtttaccgatgactaaacgacgttcccaacctactgcttctggtgcaaatggttcataggtttctgggtttttgatgacaccatcagcatgaattcctgattcatgagcaaaggtattttcaccgacaattgctttccaaggtggcacgtttgcaccggcagcattagcaactaattgagatagttttaagaaattttttgtatcaattcccaagtcaacattgtagatatgttttaaagccataacaacttcttctaaagctgcatttcctgctctttctcctaaaccattcacggtggtattgacagaaagtgcgccggctctaattcccgcaatagcattagcagttgctaaaccaaaatcattatgggtgtgaatttctacgggaattgataaagtagatactaatcgtttaactttgaggtgagttttaaaaggttcaaggattcccactgtatcacaaaaacgaaatctagatgcaccccattcttgagcatataaagctacatcttggagaaaattttcatctgctctggaagaatcttctcctcctactgctacccataaatcatgatctagagcaaagttaatacagtcttttagtctttgtaaactaactcgccattgaccatgaaatttggcggcaatttgaataccagaaacgggaatagcaatatgtattcttttgattccacaggcaatagaggcttttatatctgagataactgcacgattccaagctagtaatttagtatctaaatttaactcagaaattgctttgatagcacgaatttcttcctctcccattgcgggtatacctacttctaattctggtacaccaatggcatcgagaaatttggcgatcgctactttttcttctaagttaaaagcaactcctgccgcttgttccccgtcacgtaacgtagtatcattaatactaatttgactcatctcaaacattcctctagccaagtttttactgtaaacgttcagctattagtggtcagatttttgacgtttacgccataaaaaactatttgatcatctaagtattgatcaaatattctgactcctgaatcctgaattcttagtttttactaatgtcctttaatgctacaatggccattccacatagatataaagcaaatattaatttttgtagataactgctaaaaataacaggagttattgaaaacagttgataatatttaattattgctcaataactcacaccacatctgtatgttaggaaactaaatttcggtatcatttaggaagatttattttgctcatgtttgggatgttctacaaatagccagtagctaatatagctattagtaagtcctgtcagtaacaaaatacccagtccagcaattaaactcgtaatcataatatttacctcataattaagaagtcaggagtcaggagtcagaatatatatttctggaagatcctgatattgtttaattgtcaattgtcaattgtcaattttcaattgattaagcgtgttctgctaaccaatcaaaaatcttttctaactgttgtaaatctatcaaaccatattgccaaagcagcatgggaatgggaccttgatcaaattcacgatgtcgcaaagcaacagcaatatcagcttttgaaagtgacagttcgctatgtagaaattgcaataatttcttatcgctgttaccgtttaccataagttgacgttcaaaatatcaaaatagacacagatttacctgctaatttcactccattacagaagaaaatatgtcagaaaaattggagatttagcagatgggaaaaaataagtgaaacctaagcttaggttaattgtcttgattatgcaagcgaaattgtgagtgaacaataactttgactatgacagaagataaattagagttgcatcttgaatttacttctgatattgtggtgattaaacctaagataagtcgtgaattgtatcactcacatcggttttgagaattagccattataaccgcagtaccaacaactttctaaccattccactaattcctcacgagaagctaaaaattgcataatggtattttgcacaatcactgcttctttgaagctattaatttgcactcttaaagaaccatctggttcacaagcacacgcaatcattaactcttgcaagcggtgaaaaatttccgagcgatcgctcaaaggaacttccaaaaattgttcacctaaagccaaaaagttaccattcaaggacataaattactgctcgttgataggcaaagtttacagtttacttatatagcaggagtcaggagtcgtaggggcgaagcattcggaaaatagccttttcataaaattgataattggtcgcccgaatgcttcgcccgtacaggagtcaggaggaaaacccttttttcgagaaaactccatcatcaatttgtgaactaccgatatttccattgctatacatcatcttgttgatgatttttgagagtttttacttgttgttcaagttgttcaatgcgggaaagtaaagaacgaattatatctgcttccacatcgggtaattttccatgttctaaaggagaaatgcgttttttctgtttttgggaaataatgcgcccaggaataccaacgacggtagaatcaggaggaacatcacgtaaaacgatagaacctgcaccgatccgcacgcgatcgctaatttgaatatttcccaaaaccttcgcacccgcacccacaaccacgttattacctaaagtgggatgacgtttaccgctttctttcccagttccaccgagagttacaccttgataaatgagtgtataatcgccaactatggcagtttcaccaattaccacacccataccatgatcgataaatacacctttaccaatttttgcccctggatgaatttcaatacctgtaaaaaatcgtccccaatgagaaattaaacggggaataaaacccactttacgaatctgtaaccaatgagcgagacgatgtaaacaaagagcatgaaaaccaggataacaaaagatcacctctaaccaatttcgtgcggctggatcacgctcaaaaatgatgcgaaaatcactcattaatggctctaaaaaatcgccagagagtagatttttccgcgagtctgtatttgcagtttgggttttgagactgtctagagactgttgcatcggtactgtctggttaagagagccatgttgtgtttttctgcttatatcaggtgacttgaaagcagagaaaatcccagctaccgattagatttattgaatttattaagattgtactcaataggtttaaacccctatttaacagatatttaacacaaatttacattctttcttggggtaggggtactagccttttattacaggggtacgggtatttatgggatagggtttgaggttttttgtactcaattaaatctatttgcctgtgagagttacagcgatttaggcaagatattttgagatatattaagttgtactcagttgatgtgaaaagttgtgttaatgacaggaaattaaggttttatgtatttgctgttactattattagtgtagagttttggtagtcaaaagaccgatttctttattttgttttaggattttattttctgtaggggggaatacaaaatagcaataggtaggaagaaaaatttagcgattatagaattttacctagcttgggtttttatattgtgttataatcaagacttacgaattcgcctaatttttatgtaaatagtagttattagccctatgacattagcaacaccgcaaaccaaacaatatattgaacaaagaaatgaatgacattaccaaaaatgtgaacaataaataacagcaactatgaaattttcaaccctcaccaattcattagacaattttcttcaacaacccaatattgaagcttctcctgcttgggagtttatccagggaaaagcccagcaaaaacccatgccaacgctgtttcattctcgcctccaacgcaaccttgttaacgttatcaatagccaaactacagcttacgaagctattcaagaattgcggtgtattgtacctcccatgtcttttgtacctgatattgcggttgtaaaaagtgaacgttttacagatgaagatggatccctacaaggttcaccagactggttaattgaaattcgttctcctgatcaaagtacattagatatacaacaaaaaatcctgcattgcttgagtaacgggacacagcttgcttggttaattgatattcaaagaaagcaaatttgggtatgggaaaatcaagaattaccgcttatttatgccgatcatgatataatccctagcctagataacattttagaattaactgttgcaaatgtgatagcaatgactcagcaaagatgatataatgttatgttagaataatgaatatgtttattaggaagttgttatgactcaagtaaatgcctctcaagttcaagaacatttgactgatttcctagatagtctgactcagggggaaaaatcaattgttattgaacaagcaggaaaagcaatagcgactctcattagttatgaagaatggaaacgcttaaaacaaatagaaagttatttaatttcccaggacgatgaagaatcttttagtcctgaagaagtcatcacagcatataatctttagctaaatctgcatcaatgctttcattgtcaatatttgtactattatgaacattaagtgtgccaaaatgacgctcaaattttgcccgtgctaattctttttgtgcatctgtaggtactaccaaaactcgactaaaatattgttctagcaatgttgttgctaaactttctggagaaataccaatattattagcttgttgctgaatagcgatcgctatttgatcactcagttccagagttagaatttggctcataataggatactcaagaattggtgtaattataacattgattgcgtacagatgaaagataccaaggaaaaatcaccgtaaaaattaaaagcttgattattccgagtctacctgctttacaacctctaaaggtaaatctagcacttctgcaatttgttcatcatttaaaccaaaataccttaacttgtcaattttttctgactgagttttattatttttacgatgtttaaatttaggatgaataaaattatttttatctgatttatttttaggatttttagaaccgaattttatacaattaattacattactattaatactattatcacctaaagaaatatttacatttccctgtcgttccagaacagatttaagattttttttatccactggttcatcaaaaatatcagataacaattgtaaaagttcataacctacatcctttgcatgacccgcgctacaaccacagttttcagcaatatcagcatacttgtgatgattgagcgaaccttcaataactgcgcgttgtatgtcgttcagatgctcacctgtgttgagataaacagcgtcatccactaattgtagtagttcgtgaatctgcatatttagaaatgtaacacgacataggtaattttagcatactttatccgtatttatcagtctttttccgtccttttttgtaaatttttttataatccgcttttttccgcttttcaggtttgggtaggtggtgtagcgtgggtaaaaagtagaacttacgcaagtttcacattaaatatttattgtagggtgcatcaaatatcacaaatctgttgattgaaattatttatgcgcttttacgtaaaatagctatgactaaattgggtaagttctcaaaataaaggagatgtaatcatgactgacaatgaacgcaaatttatcaccagtgaagctatatccaatgacaaacatgatactcatgagaaaatttggaaaaccactaaagacagtttttctagtcgagattgtataggatattggcgttatcccttattctctaaagtaggagaagtcagaaaagaaccagacattctgattgttgatcgagaattgggattaattactatagaaatagaaaatattagcattgatcaagttgtagctgttaatggtgatcaatgggaatttacacatgatagtacagtgctttccaatcctgcacaacgttctaatcgttcattacaaacattattaggatattgtgatcgagaagatactatttttcgcaaaattacaggacgtgctttagttgctttaccaaaaattaccatagaagagtggcaacaaaaaggttttgatcaattacctaattgtcctcctattatatttaaaaataatttgggtaaaacagctttttttgaaagaatttaccaatcacaaccaatggttacaggagatcacatcaatgatgaacaatggaaagtattgcgtgctgttattagtgggactcctgtacttcgtaaaccttctatagctactttttctcatactaaaaatagatcagctattctttcaattcttggtgagtggctttatgaaactgacttacaacaagaacatactggtaaagaaattcctccaggagcgcaaagaatacggggaattgcaggttcaggtaagactgttttattgtgccaaaaagctgctaatatgtatttaaaacatcctgattgggatattgctttagtgttttttacccgttctttatatgagcagattgaaagtttactagatcgttggttaaaaagatttagtaatggcgatgtttcctatgatgaaaaagttaggagaaaactaaaagttcttcatgcttggggtggtagctatagagcaggtttatattcaactatttgtgagagacacggcgtttcacctttgagagctattcagggtttaagcccaagtgaaggattagctgaatgtactaagagattgttagatgggaaagaaatccaacctctttttgatgctattcttattgatgaaggtcaagaccttgtaagtgaagatgaaagaaaatttgaagaaaataatgaatctaaacaagctatttattggatggcttatcaagctttacgtcctgttgacaatgaatattctgaacaacgttgtttaatatgggcttatgatgaagctcaaagtttagatagtctaaaaataccaatggctaaagaattatttggtaaaagtttgacaaatttagtatctggacaacataaaggtggaattaaaaaaagtgaaataatgcaccgttgttatagaactcctggagaaattctaacaactgctcacgcaattggaatgggattattgcgctccgatggaatgctacaaggattaacagacaagaagagttgggaatcaattggttatcaagttaaagaaggagaatttcgttctgggcaaaaaattgttttacatcgtcctccagaaaattcgccgaatcctattcctaaactatgggaaaagccagttcttgaatttgaaacctatgaatctcgaactcaggaattagaagctttagccgcaagaattaaatataatcttgagcaagatggattaaaatctagtagagatattttaatagtcgttttaggttcagtgagagatgcaggtcagttagaaacagaagtaggaaagttcttgatgaaagaaggaattaatatttacattgcggctgctaaaacactgaatcagttaaatccaaattttcaagctggaacattaaatcaagataaattttggtgtgaaggaggtgtaacaatttctcgtattcatcgagcaaaaggaaatgaggctaatatggtttatgttgttggaattgataaaattgcagaaaatgaaaatgatcctaatttacgaaatcagctatttgttgcattaacaagatcgagaggttgggcttgtatgagtggaattggtgactatcctttttatagtgaaattaaccaagtgattaaaagtggagatacttttactttcacctataagaaaccgccaaaagtcaatacaggagaagaaacagaataatcgtagggtgggttaagcacctgagctaatcaagtagtaaaatacaatagacatctccacaatagaatgtattaatttgtcataaattgtaggggcgaagcatttgggcgataatttaacggaaaaatcagacatctagatatcccaaatgcttcgcccagcccccataaataagttccataatttcttttctggagatgtctaataatattgacgcacagtaacccaccatttaccatcaatgatcctatgttatcagattttctcgatgatttaaaaagtgctgacttagttggtatttccttaaatcctcaaaccctgggattacgtcttgactttaccttcggtcctgaagctgatgatgtcgcaattgaactttaccacattattcacctggttttttcccaacctctaaatacagaagatgaggatatttgtttttgggtaggagaagtcgaactcaaaaaaattgaagatgatcttcagaaatatttatctaaatactatccatttatcaatcaaaatcaagtagataacaccaatttaaaatcactaatttattttcatttgcaaggcgatatttgtttagaggttgtttgtaaaaattataaaacttttcaacaagtaagaaattaaataattttctaaatcacattcatttaaattgctgaaatgatacaaatggacaggtaggggtttagcaatgctaaacccctacgataaatataatagacatctccactaaaatagtgatataatcggcttacataattctctaaatcatagatatgtcccttaacataatcaaagaacatatagaaatcactcccggtatttgtggaggaaaaccccggatagctggacatcggattcgagttcaagatattgtgatttggcatgaacaaatgggaatgtcacctgatgaaattctctaccactatcctagtattactttatccgatgtctatgcagcgttagcatattatcatgatcatccagaagaaattaggcaacaaatatcagaatcagaagctttcatccaagaaatccaagcacaaactgcttcgattttgcaacaaaaactgaaacagcgcaatgacagaaaaaattaagttccatttagatgaaagtgttagtaatgccattgcgttaggtttacttcgccgaggaatcaatgtgactacaacttcagaagcaggattaattggtgtgtcagatagagaacaaattgcttttgctttatctgaaaaccggatcttgataactcatgatgatgattttgtcatgcttcatcgtagtggtataaatcatgcaggaattacatattgtgatcaaaaacgtcgttcaattggtgaaatattaaatactttaattctaatttgggaaacacttgaaccagaagatatgaagaatcgacttgagtttttatgaaaattaactcgcttttgattccaattcttcaatttccgagatatctaatatattaataggtggatggttaggaaattcaacaacaagacgcaactcaccacccatctcagtaatatactttcgcaaaattgcaagcattaaatcagtacgattttccatttgagaaacagttacttctgacatttgttcctgagtgagtttaagtgctaatctcaattgttgtcgtgccatttcttcagcaattagcaacttagattcttcttcaattttttgtcgtctttctggtgataactgttctaatttttcctttaaagttttccccattgttttatcctttcttttcttctgattgtttttttagttgagctaaatgtgcatcaaatctagcatcagcagttttgatcagttgcttataaaaacgactttcacttccacctgatttatcacctgcgctcatgccttccttttttgaataatctagttactagcttttacttcaggttcaagatataactctatagcttcattaatatttgctaacgcctcatctatattttccccctcactgatacagccaggtaaagagggaacataaacggtatatccaccttcatcacttggttctagaatcactcttagtttcagatttttaaaattattaagaccatacaaattactattttagcaaaactattcacccaaaactaacactacgataaatttctttaatcggtaattctacacctacagactctaaaaaaatagatttctctaaatcattaaaatcacccaataaccaaccttgatcttgcttactatatttttctataaaaacttcatcctgttcaactaataaatattcacaaaaactaggaattgaacgatacattctaaacttactttgacgatcatagtctgctgtagaaggagataatacttccacaattaaaataggatttaaaacctcatctttgcgattatcatttagttgtggttcaccatcaaaaaccataacatcaggatatactccctggttatgttgaggaatatatagccgtaaatcgctgttaatagcttcaaattgagtatcacgcagcagataggtaggatatgtcaaaatatttcgacctatacggctatgacttaatgatcctcctggcatgggtacaatttctccatcatgatattcattacgtccttccgctttttcttcaatagctcgatattcatctaaactataacgacgctcaacggtggtaatcataatttgttaactcaataatgttactagatataattttctaacttttttctaactttcttaatttttattcgcagcccaaagaatagcagtatcttgatattctttaaacattggatcagccgtaataattgtcgtgtcctccatttgtgcctgagctattaacattcgatcaaaaggatctcgatgatgtaagggtaaaatagctgttctaagtgcatgagaagctgtaatttccagatattttgcacctaaccgcaccatgcgactagaaatataaccatccagtggttctggtaatggtaacttaccgatcgccacttttatccccatttcccacacactagcaacagaaagccatagttcgttgttttcatcagctatctgtgcgatcgcctcttcatttaaacgctctggttgggcaaaccaccataaccaacattgagtatccaataaaaatttcactcttcactaccctcaaatgctgccaaaatatcatctggtaagggtgcattaaagtcttctggtactacaaaaagtcctttatcttgccctaaactgtcacgtctattagatgagacactaaaaggaactaacttggccacaggaacaccccggttagagatgataatttcctcacccagttccacacgagataacagacgtgaaagatttgttttagcttgatggatatttacagtttccacggttttttagctaagtttataaactaagtttagtacgattttcagattactgcaaactatttaagccgtaacagcaatggcaattttccccacagtcctttcaccctcactatagcgatgagcttctgttaattcttgtaacggatatgtgcgatcaatcactgtccgtaacttcccagcctcaattaattccttcaaataacccaaatcctgactattcggcttttccaaaacaattttcgccttttgaccaggaagaaacgctgtgaaaatactctgtaaaattacctccggtataggcaaagttgatacataaaccccattgggcgttaacacctttctgcaattagaaaatgaacttttagcaaccgcatcaaaaataatatcgtactgcacattaccttttgtaaagtcttgttgcgtatagtcaataactaaatctgcgttcaaagacctcaccaaatccaaatttttagcactgcaaacaccagtcacctcagcacccaacgccttagcaatttgcaccgcaaacacccctacaccgcccgaagcaccattaatcaataccttttgacctgatttcatatttcccaaatctcgcagggattggagagccgttaacgctgctaatgggacggtggctgcttgttcataactcatgttggtgggtttggcaactgctaaattttccgggatggcagcgaactctgcataagcaccccctggaaagctggtactgccataaatagcatctcctactttaaagcgcgtcacctgtgaaccaactgccaccacttccccagcgacatcaaaaccaagaatcaggggaaatttgtttccagtcaaaatgcttatcatccctttgcgggttttccagtcaatggggttaacactactagcgtgaaccttcaccaatagctgatcaggtttgatttttggttgttctacctcttcatattgcaagacttcaggagaaccataacgacgtatcaccatagctttcataaaaattcccatccttatatatatatttgtttgccataattatagtttagtcattgccaaaagttcagcaagacttatttattttttaccattgcctgtcaactgtcacctaacttgagattatttttcattccctattccctattcatcagcattcagccatcagcaaaaatcataaaaaacacaaatattagtctgtaaatttccctgttaaaaagctgtgaaacctgagaaattatgaaaaactttcaaaaagtataatttcatcaacctgtatatttacatctgaaagttgattactgattactgataaatgattgcttatttctattccctcccttaaacaaaataagattacttgcaaattatctgcattaagactatagtattattaaacgatgacagcctttagctaaaatcgggagcatcccaaatgtgtaagtttattttgatctcacggaaaaaatgatctaagggactgatatgattgaaccgcaaaggacgcaaaggacacaaaggtaagagagtttaagagattttttggtgttgctatggttattttttcaaaattgggatgctctcgctaaaatctaacgactcgctgaaagctgattactgatagctgaatacttaccgaaaaattaaaaaaatataaactgcatttttatctgaaaaaaaatgctattctagatacagaatataataggcatctttcggacttagtaagactttaggaaaagagttataaatgtagctaaaatcctgaaattccttatatattaagactttcagaagaaagaaatcaggatttgagtacattgtaaatgtaagcaaaaattaactaatatcttatcccaaccctgacaggtattgggttttgaatgagtacaaagaaatcctgaaccccacttcataaatgctcgtaccccaactaaaaaatactagcacccatacccgaaaaaatattatttaattattgtaatccttgcagagatgaggatttatatttttgagtacaaagataataaatccaataaatcctatcctagagatagcaaaaagccttatgaaaagtgctgctataaatcatttatcgccaattacttaacgctccttaacaaatcagcagcgaaaagtaagtggagggatgagatagcaccatgcctgaagtgaaaggaagtcgcggctgtacccgtctacccaaaacccaaagttaacacacaccagccaaacttcaaggattaattgcctgatcaattttggattttagattttagattttagatttgggattttgaattaaatgtcaccaaaatttagaatctatcataaattaccaaaattgatattattgccaaattaacccttggggcaaatagagtataaacgcgacttcagttcataggcattggaaggagcaacggcatctcccacagtggccatctagtccaccgacgtttgcgaaattcaatgacactaccggctacaggactcctcacctcctccgaacaggaacccaatctcaaagccaaatctggtggttgcggttgcgatagtaacacagcgccagaaatggacgaaaaactcaaagcacgcatcgccaaccatccctgttacagcgaagaagcgcatcaccattatgcacggatgcacgttgctgttgctcctgcttgcaatattcaatgtaactattgtaaccgcaagtatgactgcgctaacgaaagccgtccgggagtagttagcgaactactaacaccagaagaagctgcacataaagtattagttgtagcgagtaaaattccccaaatgacagttctgggaattgctggacctggtgatcctttagcaaaccccgaaaaaacatttcgtacctttgagttgattgcagataaagcaccagatattaagctttgtttatcaaccaacggtttgatgctaccagaatacatcgatcgcatcaaacaattaaatatagatcacgttaccatcacccttaacaccattgacccagaaataggcgcacaaatttattcttgggttcactataaacgcaaacgttatagaggtgtagaaggtgcgaaaattctgctagaaaagcagatggaaggattgcaagctttaaaagaagctgacattttgtgtaaagttaattctgtgatgattcccggaattaatgatcaacacttggtagaagttaacaaaatgattcgtgagaatggtgcattcctgcacaatatcatgccgctaatttctgccccagaacatggtacacattttggtttaactggtcaacgtggaccaacaaacaaagaactgaaagaagtacaggatcaatgttctggtaatatgaaaatgatgcgtcactgtcgccagtgtcgtgccgatgcggtaggattattaggagaagaccgcagccaggaatttactaaagagaaattcttggaaatgtccccagaatatgacttagaaaaacgtcaagaagtacaggaaggaattgagaaatttagagcagaaattaaactagcgaaagagaaagttaaggctgaaaaacaaacagctactaaggaaaaaattctcgttgcagttgccactaaaggcggtggtttagttaaccaacacttcggacacgcgaaggaatttcaagtttacgaagttgatggaaatgaagttcgttatgcaggacatcggcgaattgatcaatattgtcaaggtggatacggtgaagaagcaaccgcagaccatataatgaaagcaattgctgattgcaaagcggttttagtttccaaaattggcaactgtcctaaagagaaactgcacgcagccggcatacagactgttgaagcttacgatgtaatcgaaaaagttgctttagagttttacgagcagtatgtaaaggcgaaatagtaatgaatatttaggaagtcaaaaggagccagtgcgttgggcggctctgccgacttgaagcaactggcgttcaaaagtttgaagaatactgttctttttacttctcacttttgccttctctatttacccattactacagcccaaaacctcaaaggagaataatcatggcttacacaattactagccagtgtatttcctgtaatctttgtgtgtctgtatgtcctaatggtgcaattcaagaagttgaaggtaagcacgtaattgattctgaaaagtgtacaaactgcgccaatactatttacacagttcctcaatgtaaagcagtttgtcctacagctagtggttgtgtagaagaatcaacagattattgggaaatgtggtttgctacttataaccgcgtgattgcaaaattaaccaataaacaagattattgggaacgctggtataacacttattcccaaaagttagcggaacaattgaaaaaacaacaagcagcgatttaggtgacaggtgacaggtgacaggtgacagtaaagaagtttttagcaattaccaattaccaattacctatcaccaattacccaaatccaataagtaataaatcataactaagtaaatagtgagtgaaatgttaaagaattgcatctatctcgataataatgcaaccacaaaagtagatcctcaagttgtcgaggcgatgctaccttacttgacggactactatgccaacccttctagtatgcacacttttggcggtcaattagctaaagatgtgaaagtagctagagaaaatgttgcagctttattgggagcagaagattcatcggaaattgtctttacaagttgtggtactgaaggtgataatgcagctattagagcagcgttattagctcaaccagataaacgccacatcatcacttcccaggtagaacatccggctgttttaaatgtctgcaaacagttagaaactcaaggttatcaagttacttatttgtctgttaataataagggacaaatagatttgaatgagttggaagcttctctcactggcaacactgctttagtaacagtaatgtatgccaataatgaaaccggcacaatttttccaattgaagaaattggtgctagagttaaagaatatggagctatctttcacgttgatgcagtacaagcggtaggtaaagtacccttgaatatgaagaccagtacaattgatatgttaaccatatctggtcataaaattcacgctcccaagggtattggtgctttgtatgtaaaacgtggtgtgagattccgtcctttcttaatcggtggacatcaagaaagaggacgtagagcaggtacagaaaatgttcccggaattatcgctttaggcaaagctgcggaactggaactgttacacttagaagaggcgacaaagagagaaagaaaattgcgcgatcgcctcgaacaaagtttacttgctaagattcctgattgtcaagtaaacggtgatgtaaataatagattgcctaacacttctaatatcggtttcaagtatattgaaggtgaagcaattctgttacttttgaataagcatggtatttgtgcttcctctggttctgcttgtacttcgggttctcttgaaccatctcacgttttacgagcaatgtgtttaccctacactactttacatggttcaattcgtttcagtctttgtcgctacaccactgaggaagaaattgatcaagtaattgcagtcatgccagaaattgttgaaaaactacgtgcattatctcccttcaaaaatgatgatgcaagttggttacaacaacatgagcaaactttagtaaataggtaatgggtaataggtaatgggtaatgggtaatagcaaatatattgtttcaattaccaattaccaattaccaattaccaatcaccaattaccaatcatcaatccaaaatctaaaatccaaaatccaaaatccaaaattaactatgtgggactacactgataaggtattagaattattttacgaacccaaaaaccaaggcgcaattgaagataatcatgaacctggtgtaaaggtttctgtgggtgatgtaggaagtattgcttgtggtgatgctttaagattacatttgaaaattgaagaagcaaccgataaaattcttgatgctcgttttcaaacctttggttgtaccagtgcgatcgcttcttctagtgctttaactgaaatggttaaaggtctaactttagatgcagctttgcaggtaacaaataaggaaatcgctgcatatttgggcggtttacctgaagcgaaaatgcactgttctgttatgggtcaggaagctttagaagctgcgatttataactatcgtggtattcctttagcggcacatgatgacgatgatgaaggtgtcctaatctgtagttgttttggaataactgatgctaagatcaagaaagcagtaagacagaataacctcttcagtgcagaacaggtaacaaattatgtaaaagctggtggcggatgcggttcttgtttagcgaagattgatgatataataaaagaagttaagcaagagtatgagaaagaaatcgccagtaaaaatagcgcaacagctaacaaagaaatttccacagtagggcaacaaaaaccattaactaatgtgcaaaaaatcgccctaattcaaaaagtattagatgaagaagtccgacctgttttaatcgccgatgggggagatgttgaactttacgatattgaaggcgataaggtaaaagtaattctgaaaggtgcttgtggttcatgtccaagtagcactgcaactttgaagattgcgattgaatcgagattgcgcgatcgcgttaacaaaaacatcattgttgaagaagtttagtcacaattgacaattgagaattgacaattgacaactaacaaaacagtaattcttacaacccaataaacactatgaacacaacacaaaatctatgtttggtagagcgatcgcctccataagctgcgacgttctattacacgctcactgccgtagatacaaggcgtgagaaaccaacaaacaaaagaccagtaaaccactaatactaggaactaggaacaatgagcgacgaaaaaattagacagatagcattctacggcaagggcggtatcggtaaatctaccacctctcaaaacaccctcgcagctatggctgaaatgggtcaacgcattctcatcgtaggttgtgaccctaaagctgactctacccgtttgatgcttcactctaaggctcaaaccacagtattacacttggctgctgaaagaggtgctgtagaagacctcgaactccatgaagtaatgttgaccggtttccgtggtgttaagtgcgttgaatctggtggtccagaacccggtgtaggttgtgcaggtcgtggtattatcaccgctattaacttcttggaagaaaacggtgcttacacagacttagacttcgtttcctacgacgtattaggtgacgttgtatgtggtggtttcgctatgcctatccgtgaaggtaaaggggggttgtttagggtttttgttggtgcaattgtttgaggacttttgtttttttgttccctatttttgccctgggattttttggggaaatggggtttttgtttgggttttatggttttgtttaccctattttttaccttgtgtcaagggggatacatgatttttgctaaattggttactggttactcattggttattttacagtgatatttgattgtgaataaaccatcagaaatacagcaaaataaaacaaaaataaaacatttattacattttgttaaaaatgccgattctcccagttatcctttacatacatatataattatagtgtataatatattcttgtaaatttttattatattttgacagtcaaatggaagatacacgcaataaaattatcagttttgttgaatatgctcgccagttgaagggtgatgaaaaaggagaagcacaggtattttgcgatcgcctatttcaagcattcaaccatcaaggttataaagaagcaggagcagaattagaatatcgcgtaaaagttaaaggcaaatctaccaaatttgctgatttactttggcgacctcggttactaatggaaatgaaaaaacggggtgaaaaactagaaagacactatcaacaagcctttgaatattggctggaattagttccccatcgtccacaatatgtaattctttgtaactttgatgaattttggatttatgactttgatattcaattacaagaaccattagataaagtcacattagaagatttacaaaatcgttataccgtcttaaacttcctatttcctgaaaatcgtaaaccgctattcaataacaacttagttgacgttacacgcaaagcagcagataacgttgctcaagtttttaatcgcttagtggaaagaagagaaaaaaaagacattgcccaaaaatttattcttcagtgcgttgttgccttatttgcagaagatattgatttgttacctagaggattatttagtgaatttttagatgattgtcgtactaataaaatcagttcttatgatttaattggtggactttttaatcaaatgggaagtgaccgtcctgcacctcaagatagccgttatcgaaatgttccttattttaatgctggtttattctctaaagttgaaccaattgcattaactagaggcgaactcgatttattagcatcagcagcgtcagaaaaatggtcaaaagtagaacctgctatttttgggacattatttgaatctagcatgggcaaagaagaacgtcatgctttaggcgcacattataccagtcctgcagacattcaaaaagtagttttacccacaattgttagaccctggcaacaaagaattgatgcagccaataagctaaatgaattactagcactcagacaggaattaattaatttcaaagtccttgatccagcctgtggtagtggtaatttcctttatgttgcctatagagaaatcaagagattagaagccagtttattaaacaaaatccatgataatttcagtctgcgaactacatctagtataggcacaatatctttagtaaaaacaaaccaattttatggattagatattaaaccatttgctgtagaactagcaaaagtaactttaatgattgctaaaaaattagcattagatgaagaaaatcagctacttaatgtagcacaaaccagtttatctttagaaatggatcgcgcccttcctctggataatttggatcaaaatattcgctgtgatgatgctttattttgtgattgggtaaaagcaaatgcaattattggcaaccctccctatcaatcaaaaaacaaaatgcagcaagaatatggagaagattatgttagtcaactaagagaaaaatatccagaagtaccaggaagagcagattattgtgtttattggtttcgtcgtacccatgatgaattaagcacaggtggacgcgctggactggttggtacaaataccatccgtcaaaactactcccgtgaaggcggtttagattatatagtcaataatggtggaacaattaccgaagcagtttctactcaagtttggtcaggtagtgcagttgttcatgtttccattgttaattggatcaaaggtgaagaatcaggtcaaaagaaattatatactcaagttggagatgatgtagatagtccttgggaagttgtagaacttgagaaaattaactcttctttatctgcaaaacttgatgttactcaagcaaaaaaacttttagttaatatcaactcaggagcttgctatcaaggacaaactcacggacataaaggatttttactcactgcacaacaagcgaaaataattgctaaagatgaatcttctcaatctgtaattcatccttacttaataggtaatagtctattagggaattataaaagtcttacatctcgctactgtattgatatgaatcattgtcaagattctgtttcagctatgaaacatagcctagcatttgaacatattcagaaaaatgtttttccaaccatagaaaagaatgctaatgatgagagaaaacaaactggtaaagagaatggtccacgtcaatcacactttcgtcattggtggagattttggagaggaaggccggaaatgttggagaaaatttctctcattccgagatatgttgcttgtgcaagagtaactaaacgtccaatttttgagtttgttagttcttcaatacatcctaatgatgctctgcaagtattcccgttatcagatgattattctttcggaattttacaatctgatattcattggcaatggtttaatgaaagatgctcaactttaaaaagagattttcgctatacttctgatactgtttttgattcttttccttttcctcaaaatcccaaattatcacaggtgaagaaagtagccgcagcagcagttaaattacgagagttaagacaacaaattatgacagaaaataaatggagtttacgcgaactttatcgcaccctagaaataccaggaaaaaaccgtcttcgcacagcacatgaagaacttgacaaagcagttcgtgaggcttatggtatggaaaaaacaaaagatgtattaaagtttttgctggaattaaattttgaagtcgcagatagagaagcaaaaaatttacctgtaatagctcctggtttacctccctgtgtaactgatgctagtgagtttattacagatgattgtgtgaaaatgccagattgaaatttaatgttttacaccccacattctgcacttcgctttgtaatacatgaaaattacgaaaattggggttaatggtggttgaatagcgatcgccgaagggctataattcatacgtttaaatactgaataatatcaacattttttgtaaaatttattgaggtattaacgtattacatcttgaagtgcggaaagtcggcaaaaataagtggtatacgtagaggaaaaaagacatctcgaaacataaatgtttctatatggataagtgaaattactaaatctgttaaatgatatagttctttatatatctgatttacagcgttaaatagcggattatatttaaatgcactgatgccgcagtttaatcactgtgtaatcgttaagtaattatgcataggatgtgcaaagggttatatccctttttgaataagctcatcatctacttcgattacaagtttcatcaaatcaatttcttctgtcacttttgcactccgaccaaaaatttacactacacattataattgtaaaagtttttagtaaacatgaggatcttttgctatgtcacttttaaagctactacagacgctcatttccggtactcataatcctgaattggatgcggcgcgaataaatcatgacagcttgcctcaaagcgaatattttcagggtgaaaaactttcaaaagaccaattggaaagggataaacagataacttctcaaagaggttatcaattggggcggagtttgatagcagctatcgaagaacattactctgctccagaacaacagcgagttattaataatcttgtgaaagcaatagtataccttggtaataacgccaggatatttcctgatatggactataaggatatttggtacacagattactatgatctaattgaattagcgaaagatatgggtttaggggatcgtactttacctcactggcctgaagaatcaaattcctttaatcgctatctagaactgactacttctgatttggttcaaatatttctgggttttttagaagaagctttgcttgatgagtataaatttggggcagatttagatagctgggttaggtacttattaagagaaacgttaaaatcgagacagcgtttagctcgtgaacaacaaaagcaggacgaagctttgcgcttttctcctacaatcttcaaaacaactcagcagaataaaagcaataacagtaagtaagacatataaacgttaaaaggtcttctggtattgtagtttgttgagagcgatagcgaaacgcgacccaagaatcccatttccggtattgtggtttatgggtgcgataccttcggtaagcttcgctaacgcttttttggtgtttggttatatccgtgctgtgctaacacattcagaatatagtgatccgatttgattcatgaatttttcgtagaggcagggaacagggaacagggaacaggaaagaaggctgtcagtatttatggtgagcgaagccgaaccatgtacggagttctgttcaaaaatcaaatattagtcctatatgatgaaggaaagtggaaagaataatgcaaactttaaaccttgaaaaaaccattaatgcttggtcatccattgccgaaaacgtcttttttactcacacagaagaggaatatgaacacttagttgatatactagattctctgatagatcaagttggtgaagatgaaaatcatcctcttgcatctctgatggaagtcataggagttttaattgaaaactatgaaaatgaacatattcctgaactgcatattcctgaactgtaggaaattattaattgactatccaccattttcaatcatccaaaccaacatccctaaaatttcatctacaggaggtaaaggataatcagctaaatcaatagttacaatatcaccctctaactttaaaaatcgccattgtgtaccgctactaattgcaccataaacaatactaagaggattatgtttagcaagattaaatctctgtgcagctaccatctctgcaatacactgtccaaacccagttcttaaatctgcttttttggcttctacaatcacaattacaggtgcttcaatttccaacacttcaggagaacgacttaacagaaagtcacatattccatttaatcccaccgactcatcaactgtaaaatcttcaccagaaaataaactaatttgccgatttaaaattcttcttacttctaacaaaactggataaataatcccttcagaacgtgctttttcactagcagaagcagcaaggggtaaactttctgctaaatatgctgttaacgtcgtagaaggttcaattttggcaacttcaggaataaaacgcccaccttcctgagtttttaacccaaaagcttctttaaccttacctatagatgtaaattgactataagacatatcttgtaacattcctagttttataaaattatttttgcgcctcagtgtctgtgagtgaggctaatatcttatcttaactcaattttcatcaaactgtgtcccatctgcaatttcaatctttcattctcaattcttaacctctcattttcctgttccaacattattaccatctcttgcaattcttcaactttcgattttttcttaattgcttcctcaattgcaaccttccgattttccaaactaaaccacttctgataaatggatgtgtgcatattcacagaatgacccaaattatcagccgccgctttaataggaatccccattaaatgcgctcgaattgcccaagcgtgacgtaaatcataaggttgaaaattcacaccgacaaatctaaaccatctatctgtaccatgtcgtgctgcattaatttctttactcgttattttatcttgaattttcaatttcaataattcaattgcttctaaatctgtttttaaattaaactctttcacccaacgaggatataatggtaaagcttccctttctccggttttacattcttcattaactcgccatgtattcatggtattatcaacagataaccaccaatctaaatccggtttgacaaaaatttcaatcggtcttaaaccataggtggctaacattccataaacccatctccacaatttccaattatttctatcttccctagttatcaacttactaggacggttaatggcgtaattttcaaacttaaaatattctttttctatttctgcatcagtgggaatatcccgtttacgttttgcagtaggtttaatttttaaattacttaactctgggacttctaaaccagaacatttacacaaaacccgaattactttaattaactcatttttcacactatcggaagaagtacaattttgcacagcttcgataaaattagcatctatcgctagtttatccttgggtaaatgcttgtgagcaagataaaaataactgctaaaagtattttcactttttaaagtgcgtttgcgagtttggaaataacttttctcaaaatctgcaattaaatcaccaatggtttttaaattagctttaatccgagttttccctaaatatttatcagtccattgaaattgttttctagccattaactttcctaattcataagcctcttcttccgcagtattcaacccatcaaaattaaaaggaatacccaaagaaatatcatattgttttgtaccgctaccgtttttatcaatatcccctggtttaataggtaaagtgcatctcaactgtaaagaattgccagatttgcggatataaacaccaacattagccgcttttaatctaccattaattgcttttaattctgtagttaattttgccgttagatgattttcttgttcatttactgcttgcattctacctaaatatcccccatcggtaatagctgtttggtgaaaatcggcaaatgcttcctgtgttctgtccataccctagatttaccctaataaaaaaaccgttcactctagacaatgattaccgcaaacatagtctaaaatgaacattctacagctatttttatgagataaataatctttgccgtgaaggtaaagcacaagaaatctacatcgttacctctggtgaaatgatggcgatgtacgctgcaaacaacatcgctcgtggtattttgaaatatgcacactccggtggtgtacgtttaggtggtttaatctgtaacagccgtaaaactgaccgggaacacgaactcatcgaaaccttggctaaacgtttgaacacccaaatgattcacttcgtacctcgtgacaacatcgttcaacacgcagaattgcgtcgtatgaccgttaacgagtatgctcccgacagcaaccaagctaacgaataccgtgcattagctaagaagatcatcgaaaacaagaacctcaccattcctaccccaatagaaatggatgaattagaagctctgttgatcgaatacggtattcttgacgatgattctaagcacgctgaaatcattggtaagcccgcttctgcaactaagtagtattcagtaattgaggaataggaaaaaggaacactctacatcacttcctttttaccttcctccccaagcgtggggattaacttccccttctctacctaaacaatatctaaaagagctaacagaggccagacatgactcctccagacaacaagaagattgttgaagaaagaaaaggactgattaaagacgttcttaaagcttatcccgaaaaggctgctaagaagcgcgaaaagcacctcaatgtacacgaagaaggtaaaacagattgtggtgttaaatctaacatcaaatccttaccaggtgtaatgaccgctcgtggttgtgcttatgcaggttctaagggtgtggtttggggtcctattaaggacatgatccacatcagccatggtcctgtaggttgcggttactggtcttggtctggtcgtcgtaactactacttaggtacaactggtgttgataccttcggtactatgcacttcacttctgacttccaagaacgcgacatcgtgttcggtggagacaagaagttattgaaactgatcgaagaattagaagaattattccccttaaaccgtggtgtttccgttcaatctgaatgtcccatcggtctaattggggatgacatcgaagcggtttctaagacagctgctaaaaaactcggtaaacccgttattcctgtacgttgcgaaggtttccgtggtgtgtctcagtccttgggtcaccacatcgctaacgaccaaatccgtgactgggtattccccagagcagacaaagctaagaaagacggtactctcaagtttgaaggtactccttacgacgtagcaatcatcggtgactataacatcggtggtgacgcttgggcaagccgtatcctgttagaagaaattggtttgcgtgttgttgctcagtggtctggtgacggtactatcaatgagatgttgttgactcctaatgtgaagatcaacctcatccactgctatcgttctatgaactatatcagccgtcacatggaagaagcttatggtattccctggatggaatataacttcttcggtcctaccaagattgctgaatctttaagagcgatcgctgctaaatttgattctaagatccaagaaaacgctgagaaagttattgctaaatatcagccttctatggatgcgatcgttgctaagtaccgtcctcgtttggaaggtaagacagttgcaatgatggttggtggtttacgtccccgtcacgttgtacccgctttccaagatttgggtatgaagttggtaggtactggttatgagttcgctcataatgacgactataaacgtactactcactacattgaaaacggtactatcgtttatgacgacgtaaccgcttttgaatttgaagagtttgttaaagctctgaagccagacttaattgcttctggtgtgaaagagaagtatgtattccaaaagatgggtcttcctttccgtcaaatgcactcttgggattactccgaacttgatgatgtttgttgaaaggtgcggtaattttaggttttttagttgggtaattatgagattttaatttttagcctaaattgattttattatgttctaatataacattgtttatggataactgcaagtggtaaggatttgatgtttcagggtttgaggcttggcttaaatttggcttaaatcaagaatgtttaatataaaacttttttattgagaattttattagcctaaatatggcgatcgctctcaattcaataatcttcatcactcagataaaataatcacacttaatctttcttcaacttcttgaagatatgcggttaaaccagtattcacacctcttgcacgtaaaatttctaaacttgtttcttcccaacatagtttttctcgttccatatcttttcccgtgagttgttccactacaaatttaatatttctgattctttctgtgtctttctctgaagtagaacgtaatctttcaggttctatgcaaggatcaaaattcaattgagttttgatatcttctaaaattaccttttcatcattagacgcaataaacccatttaaaacccatgcttcacgttttggatcagctaaaccgataataatttctaatttttgctttacactgtcattttcagaactcggttgttcattgtcctttagatattctaagcgtattttttcaagtgcattactacgttcttcactttgttttttttgtatctgtgtcgcgtataaaaattacggctctaatatttcgttttttttgtaaaacactaactattgtgagggttttaatagcgtttgctccatccttatgacctggatgacctctatatcttggaattttataacccaatgattttaattgttctggaatatcctctttgatatttttccagcaagaatattttgtaccttctattaagccactccactgaaaacaatgttgcagaatatcatcatctaaccaactcactttttcttttaaaactcgctcggctaacttagtagcagttctagcatctgcaccactttcaactataacaataaactcatcaatcattgttttctcctcttacccattcctcaccctcagcatcccaaaattcacctgttgtcaaggtttcttttgcccattctacatcaggatgttcatctaagcgtttagtaactgtaaagcctgagttaatattatttaatacatgaacttgagaaggttcaagatcatcaagaatataaggagaatgggtagaaaaaataatttgcaggttagtattttcagtaattatctctttaaaaacattcattaactgacgttgtgcttggggatgtaatccctgttccacatcatctaataacactaaattaggttgagtaggattcatcaatacagttaataatcctaaagttaacattgttccttcgctaattgcatgggcgggaatacgttcacctgtattcatatctaacactacttcttgtccggtcatttcctgagtttgatcataggaaatagagcgaccatcaacttctattaaacgttgacgaatgactggaacttttgcccgtctaataccaattttttggacatttgggacaactttttttaacatttcttctatgatttgaaatttatctggtgcttcatcacggagaaaatctaaggtaggtgctaatcctgatccatcaaattctactctgggggtaatttcatcactgtaagctggtttggcgagattacttgcagataatttgagataaactgtatgtcgtaaagacttacgaattacatctggagaattactgaaagaacttgtccatcctgctaaattttcttttgtttcatttattatatatgatgctgtgggatgccaataatcatgattttcttgtttccaattataggcagcttgccaattttggcgatttttataaccccaaaaaccacttgcagtaacagacatatctttttcaccaattgttgtaataaattggggcaatttatcatactgaaaaatatttttaaagggtgaggcagtaagtctgctgagattatgtaatgcttggaggacactggttttaccagcactattttttcctacaagtccatgtaatcgcgagttgtcgaaactaaactctgttgacttatggcttttgaaattatgaagacttagactttgtaacatattgttggtttaatttgttcattatcatttgctatttggaaaattgcaattactattttggtaaaaacattatactaaagaaagcattgaggatataaagaataatatatcttaccaggtaggatatcatggttttcaacaaaccctcttttagtcaaccaatctatgaaatcttcttttttgcagttgacaggtgcaggataaataataataggaaggctattttcactccacattatattacacaaatatttaagcagatatgaaccataccctttttgcctatactgttcgtcaataacgaaagttcctatataccagtgaatttcaggatcttgttttattttatagattgattcacctatgtctaggttttgataataaatttcgtaacaaaaatatcttattttgttaatttcttcgatcttcttttctttttcatagtttctttttatttgaatcccttgaggtgcttttatttctttcattgatgttatccattctatagattgattgtattgcgatcaaattttctgatctgatgacgtagcctagtggacaagcgcatattagtgagaaatatatttgtataaacaatcaatatttgactctttcctcaaattcacctggtatacgaaaggtttcccaatccttcaaagaataaatatcaaatcggaaaaaacgatcaccataatcagcatagtatgcaatataaccaaattttttcccttgatatgtagtgcgatgtctaccattttcataataacggtctataaatcgagaattaataaagtcttggctaattgcttcaccccaaatacggctaataagttcattaactgcttgatctcgtcttaaattatatccttttttgctcagagattgtccaattgatgagttttcgataaaaactgcttcactgtaattcttttgcatatcagcagagactttttcaccaacaattatcttgacattattaccttggaactgaattatagcttcataatgagctaggacagagttaatataaaatggcttgaaaatcaacccttctccaagctgattcctgttaatatgtttgatggatttttcaatactgtctcctggcaaagaaaaacaaggcttggaaataattaaatttaaataaatgagaatcaaatccacaaaaagtcttgatatttttctcagttctagatgtaatatattaagattaacttcaatcataatttgcatgatgaattgtttatatctaaatattagattaacatagtacaacacagcactaagttatcctattataccttaacaaaaatttacatttaaccaccaatccatgtgaggattagtctgtaacttgggttaagcaacagcgcaacccaacataattttaaaaaataatcaattacatcctgtaaatcctaaaatcctggacatcctgattcagacaaatgctacaattaacaaatcaccacaaggagtaaaaaactatgcccatcatgacaattaaagatgtggaaaaactgcaaagtgctatcaatgatgcaggtttagattatgatctagaattagaaaatgggagcatttctattgtgggtccatcagatatagtttctagtgaaatttctagtcgtttaatagcttttctctttgcttggattaatccccgtcgtttaggaagagtttttgattctgcgggtgggtttattttaccagatagcaatttaaccgctcccgatgtttcttttgtgcgtgctgcaaggttgcgtcaaagtccccgttattttggtgaacttgtgcctgatttagtagtagaaattaaatctcaaagtgatagaattaaaaccttagaaaaaaaagttatcaattttattaatttgggtgcagtggtgggaattttaattgatcctgatgaagaaactgttacagtttatcattctcaaggtgaacctgtcgtttttaacaacaatgatgttttaactattcctgaacttttaccaggttgggaattacctatttctgaattatggcctcctgtttttactgaggaagaaatagaaagttagttttagttgattttcaaattatgtgtaagttggtaaggtgtgtacaacagataagttagtaagaaaatgattaaatttataatctttatcatctgattataatctgacacacctttaggcaaaagttaagaaataaacgaaccacagagaacacagagaaatgaggttttaagagagattttcataattctttcttggtggaaatcttaatttcttttgttttcctttaatcaggaaaagctaaaccagtgcgcggatcacgaatatataaacctagtgttaaactccgcatcacttcatcccaaataggtgttaattgttctgcttgatccgcccaataatcaaaggtaattaaacattgaatattagaacctaaacctacacaaattctagaatatgcttctctaggttctgcttgggtatcaataaatttaatttgtccccacatgatttttgctgtttggcgtttaacttgtatgatttcccctgtttcaatgacatcacgcttatcatcttctatgattttttttaaggtgcgtttgaggggaaataatgtccaatcattggggggtaaatgattataggaaatttctaaacaacaatcatcattaggtggttttttatctgtgaatttaaaggatttttctttgggttcaaatacccaatcttggggaacgttaaaccgcactgcacccctaccagcgacaaatattttataatcttctggtccttcccagtgatggtttggatctagttcgagggtttctttaatccattgcaggttgctttttttacgcttggacataattttcatgttctcctttgtttctaggttgaagattcgagtttaattttctgtttctgtctctaattctacaccttcatataataattcaatgggaaattcaaattcaatgcttgataatgtaattatatctccagtcgtgtagggatagtaaagccacattctcccttctcctcgagaataacgctcaacatatattctttccgaatcaattaaaatatattcttgtagggagggaattgttaaataatatctgaatttttctcctttatctttattggttgtactgggagaaagcacctctacaattaattgcggatgttgaataaatttgcgagcgttgatatcttcatggtgacaactaacaacaagatcaggatagaagtagatgctgttgggattaacttgtactttgacatctgatacgttgactcgacaaccttgaggatggagatgagaatataaaggtctgtaaagattgagagcaatatcattatggggaattgtaccaccagtcatggcgaaaacttcgccgttgatatattcatagcgaatatcttggttaagttcccatctgagatattcctcaaaggtcatttttggcggtttgtggataattgctatcatatcagaattttgagaagtttgttttgattatagctacaaatttaatattttttcttgattcactggctggttatgttgatgattgcatttctttagaaagatttaagatccagcagtattcctgttaatgacaatacaccgtaaaatattaacgaacgtgatttttatgacatttttccaatgaaaaacaaattgacttctaagcatcctcgactgttgcagttggttgtgggtgttttagtgttttttttcgttttcacaactggggtaaaagcagaaactgcgagttctacagcgccagtcacttttgctgcttatggtgatataccttatttggtgaagttggcagatggtaggactgatgagcaggttttaatagaagatattgcgccaaaatttcgtgagaatgatgatataccttttgtgattcatctaggtgatcttggtcgtccacaagaagcttgttctgatgcttggttggagaagagtcagactttttggaaaaatgaaatagttaaaccagtgttttatacaccaggggataatgattggactgattgcgatcgcgaaaacctcaaggtacgacaatcagagttagaaagattgaatgctattcgacgggtattatttagtcagcctaaaagtgtcaatcctgaatggcgatatgaacaacaaagcagtttaccagaaaatgagacttggttttataaaggtgtccggtttgtaacgcaacatattgtgagtacagataatggtcggacagagatatttcttgatgatcctcagacagttgaaaaactgacagatgcacgagataaagaaaatgaaatttggctcgatcatgcttttgatttagccaaaaatagtgatacatctgctatagttgtagcgactcagttagatccttttgctcctgatggtagcaccggagatgtgtacagcagatgtttgaataaccatgcttacaaaggattttgtgaacagttagagacattggcagcaaagttagataaacctgttttattgctgcatggtgatactaatgcttactgttttgatcaaccttttcctgtggctaaaactccaaaattatggcgtttaaatgcacctggtgattttaaggtgattgatgcttctttgatttcttttgatcccacaagttctgcacaaccttttaaagtgactggacttttatcaggtcaagttcctcctcaagtctgcgattacagtagataattaattgatcaggcgatcgctttttttgaattaatacttaattaatttgataatttggcgatcgcataacacaatgcaaatgtcacactttttgagttggcgaagatgctaatttttacctatcctggttgacagttttatagccgtagacagagcagttaggacatcaatgaatcatgaaactctcaacccaatagacatctccagaaaagaaattatagaacctatttatgggggcaggacgaagcatttggaatatctagatgtctgatttttccgttaaattatcgccctgtaagggcgaagcattcggaaaatatcctttggtgaataccgatcattaatcgctcgaatgcttcgcccctacttcgcccctacaacttatgacaaattaatacattctattttggagatgtctaatagggtcttactcctgactcctgctataatagacacctccagaaaagaaattatggaacttatttatgggggcagggcgaagcatttggtatatctagatgtctgatttttccgttaaattatcgccctgtaagggcgaagcattcggaaaatatcctttggtgaataccgatcattaatcgctcgaatgcttcgcccctacttcgcccctagaacttatgacaaattaatacattctattttgaagaggtctaatagacatcataattgcacagaatattacacagaatgtagagaagagagttcttacctatggaacatctctatatctctacagtgatttatgtttagtttcaccaacctgctatttttctgatgaaacaggtgattttaatctttgtagggcagggaggaatggtgtactacaatacgcagtttaccattggtatccttgatgaacttccaggttttgtcaactgtggttactttaccagtcttgtcagtaattaagacattgcccattgttgtagctacattaccaacaatgaagattccagcgttgcgaatttctacctttcgccatccgttgagggcaaagccagtatcattagggaaagaagaattgtcgcccacgaaataagccaatgcaccttggcgtgttgtgcggaaagtctgtggtgcttttgtcaaagttggcttgaacagcactgcacccatctgataaccataggcttgatcaataatcttctcggctaatgccttagctgcggcttttcccttctgatcgtaggtggtggagatggcgactaatgcatctccccaggctttttgggctgccagaacttcagactcagtgatggtcatattgactactgaagttgagggggttgatgagttggaattaatgatgatgttattaacttgagcttgagctattgacggagtagcagctaacaaggccatagcagcagcggtgacggaaagattgattcgcatacttataaaaaaacctatcggttatacttaacgatcacattaaaccacattagacatctggtaaaaattatcttagggacaattcataaattgtccatataatgtctatagatatctattgtttcaataaacgctattaatacttataagataatttaacagttacttcgtgctgcaacaatatcactgaagatattgttaagttctcctattgctgctaattctattgcttcttctggttttcagcaccccctaattattatttttgcaaaaagctcaaagggcagaatttaaagcccaaaaagcagaaatatctgatgaaaaagttcaaggggtagcagcaaatttgcaggaattaaatattgattcagatacaatttaatttaaatcaggacttacgtaaaagggaacgaaagtaggggtaatacccttcgggaagcaagctacatgaattatccctacacaagaataaggttttaagtcacatcttgtgtaagtcttataaatatctaataaatatataataaatatctaacttttccaggaagtcggggatctagtctagttgtaatctagtttgtggtaaaatttcctaatcacaggtgaaatctctaaactcacttctgcatttatttgttgggtagaaagaaggaaacgcctttttagggattgaatactagtaactattggctcataaacctgatgactattttccagttcacttaataaaattgagccattttgactagctataaaatgtagtaattctacttctgatggtggcaaaatatctaaactttgctctaaaaaagcagttagttcaatatctataaaaggttgatctagctgcaaaaatttattggtgtcacctgcaaataattcctgaataagataaccaattatttgtaaatattggggagttccttgataaatattcagcaatttttgataattttcctcatttttcaagccaaattttttaagaatgtttacaccatcatcatctaatcccaataattccaaggtgaaaacatgactatgatcagtttgtggtttagataattcacgaatttcctcactactattgataattagacaacttcgatgtttggttgttaataataatttaaatagattcccatattcttcatacccttgttgatatttacctgatacttgatgctttgaaaaaatacagttaacatcgtcaattatcatcagataagagtatttttctatggcttttttaaattgtgaaagttgatgaggtgagttatctgaaataagctgatcattagggtaaattgtctctgtaattagttgtgttaaactgggtagagattttaaacttttataaataacgaactcaaaattttctttgatattatcaactaattttaaagataaagcagtttttccaatgcctctaatacccagtaaagttattaaattacattttccttggaggattttttgttgtagtaatgataattctaatttgcgtccataaaaatcactgctttcaggtgcatcttttaaatctagatgagaggttatctgttcttttttatggataatttcatcattttctgttgatggtgcagattctttaagattaccactattgatttgtattactttgaaaatattagttgaagagaaagtacatctacctaaaattgacttgacattaaatttattaactttttttccaactgcttgagataaggatttccacagtttactggcgctatccttgatatatttttcgctgtggtgctgttctttggcgatatctgcgtaggatctaccctgtaatgtcccttctaggatagctctttgtaaatcattgagatgctgtccttgatgctcaaagatttggttatctgcaatttcaattatctcttcaatatttaacactactcgatccccttcaagtcaagactttttaaaagtctatcatggttttaatgcatcttctagtgaaactacacagacaaaacccatcttcgcgggtttagtgcaagagataaatttttgactaatggttggtgagaatttttactggtgacaagatattacttttagagactttttaccgcttttacatacttttgaggtcttgacatcctcttttgggcgtattaaatttagtatattttaaaaccattgtaggttattgagtgtcgggtagtaaatttcatatttatctacatttactcccaataagaatttgtacgttatttaaacagggggaattgacatgaataagatcatatcatctgcgatcgctgtttctgccattactgtatctactgtctttggtttaactttagttaatgtcaactcttccaaagctgacctaccgtctaagcgtgagatagcacaaagtttgcgtcaatcgggacaactaccacaaacagtcgtgttgcaactagacacaaagtctctcaacaatttaacttgtgaaattactacaattcctgcaaacccatcttcatcatccagcagatttagatatgaccgacagatttttgagtgtaaaagtaggtagtgaaatacccgtagagtctttccattgtacttctctgcaatagttttggtttttggcgttgctgatttgaggtatgaaagaaagaaaaggggcgttgcataatagagggatgaattggcgtttgaaaccgttgaaaattcgttctaaattgggcgaaatcatcccatgattcagcaacgccagaaaaggtgttgctgattttggggatgaaaacaatattgcatatattcaaaccccttgtagagacgttccatggaacgtctctacacacaaaaaacatcccgcatttatgcaatgccaaagaaaattatggcgttgctactttagcagatgttgtgaataatgtattcaccgacgccgatggagcgtcagtcggaaatcaggctctacgtctaaatagtacagccttagtcaatgttacaactgctggcattgccggaacttacttggtgataaatgatggtattcctgcgtttcaatcccatcgtgatttggtggtcaatttaaccggatacacgagtccattccccggtttgggcgacattgataatgttaatagcttttttgtctagcttcattgttttgttgaagttggttagtagtattcagatccccgacttcttagagaagtcggggatctaagcgaggataaattacatcctgtcaactatcagacaaattcccacagcgatcgctcatcattaattatcctcaaattagcaacctcatcctgtaaatcctgaaatcctggaaatcctgattcagacaaccagagcgatcgccaccaattaaccaccgagtccctcatcctgtaaatcctgaaatcctggaaatcctgattcagacaattaatcagcgtcaaattaacaacatcatctgcaaacaaatccctcatcctgtaaatcctcatatagcttgcgccacgctatcagacaaatgttacaattaattagtaacgacaaaaagtaaaccttatgttacaagtacaaattaaatctgatgatcccgaccttcaaatcgtccaaaacctaattaaaggagctattgaatctgagattaaaaatttacaaagatccttggataaaactaataaattattgcaagaatttgaaacaaaatatcaagtttcatcggaatttttcttgactaattggacagcagaaaacctatcaggaggggacgatgaatatgtaagttgggcaggagaaattaaaattaaggataaattaattaatgctttacaaaagttggatactatagaatatgtcactcaacaattaccaagctgatattcttgtcgttattcaaaaatacctgaaccaagggtggattatatcttttaatttttccttagatgctagatcaaactatgtcgggtttatccaggtaaatttagactttttacgggggagtcgtttatttttcaaagaatacattgatctacaagaatcattagaaaagctctcttattcattccattatcaagacaatgaaaacaacttaatatttcgctatgatggtgaggttattcaatttatttttatccaggagttcttgcatccgttcccccagtttatcggtaaatttgaatagcataaggtttttaatacgcttgatacagattccttctggtaggaattgggagggtttaataagtgtagttgtcattggtaaaatatcttttcttgattttatcattggatatttaggatgaggcgatcgctctttggggtttggagcttggaaagtgcgatcgctttttgggttgaaaaaacccaacattaacttatctattcccaatcttcatatttcaaactttcaatacggctaaattcacgggtattgtgagtaactaaaatgagatcatttgctaatgcgatcgctgcaattaacaaataattaggactaatgggagtacctaaagaatccagacgagcgcgaatttgtccagcaatttttgccgcttgacgatctaggggtaaatcaacaaattcagcaagtaaattttctaagtgagataagtttttattaacatttgcacttttgtaagctccataatatagttcgctgtacaccacagtacaaatataaatttcttgaacaggaattgataaaagtcgtttagtaacaggtgaatttcgagaattgagaatttgaatacaagcatttgtatctaagagataggccattgaatttcctcccgttcttcaaactgaagctgttctggaatttcaatcatttcaccttcccaactacctattacttcttctaaaaatcttcgagaatatcctaactcttctggagatttattttcagattttaatgatgttttggcaatacgttgaaatacaatcaccatttctaattcttcattagcaaactcaggaggaagttcgattttgactatcctatcattaccaatttgtgctttaattttcatgctttccatagacttatctccttaatctataaccgttgataatcagctttttcagcagcaatataaccttcaatttcttctcgattagcatgataataagttaaagctgcatacacctgaacaagagttacatgagtcatgcgttcagtgatttcttccgcatttaatcccattttgtaccaagcagctgaattaccttgagtggcttgcgtttgtaaatatgccataatgatgatagcaaaaggatttttactttgtgctagggtatcatggctataatctaatagtttaacactgggaaattgcaaatgagtggtaaatccccactgactataaccataagatgctggtttccaattggggttatcatctcctaaaactgcgaaactaaagactttaagacgatagcgattaaataaacgatgattataaatagacatctccacaatagaatgtattaatttgtcataagttgtaggggcgaagcatttgggcgataatttaacggaaaaatcagacatctagatatcccaaatgcttcgccctgcccccataaataggttccataatttcttttctgtagatgtctaatatacatcctttccgcaaaatcttcttgttcttgtccttgtatttctatgtgaatcagaactaacgctttttctccattccgcagggtgacttttaccagtttatccgctaaacgtcttcctgtttctgcatctctaattagttcttgtaattcggtgtctagagtttcatatcctttttcccagtcaatatcttgataaacttcaggaaagcagtattctatgaattgttcaagataaactgtaatcgcttctttccacgcgctgtcataatctgagttggtttggtagttcatccctgaaaatatattttttgatatcttgtaattataacatatcacatactaaaaactccctttataaaccatttccatttttattttttctaactctatttttaacctttcattctccatcttcaaaactaaattttcatccttaatcacctcaacctcattccgcttactcaaagcttgatttattgccaatttccgcatatctaaagaaaaccaacgttgataagttttcgtgtgaatctgcacactatgacctaaattatctgctgctgctttaatcggaatccctaaaatatgcgctctaattgcccaaccatgccgtaaatcatagggtttaaaatctaagccaactttcctaaaccaccaactaactctttgaattaaagctgtaatttctgcatgattatttttatcttttttactaattgctgtcaccaacatttctaaatactggggattgcttaaatcaaattcctcaatccattctttatataaaggtaatgcttctctttctccggttttacaatgtttatctactttccaggttaagtctatattttctttacttaaccaccaatcaacatcaggattaataaaaatctcacggggacgtaaaccgaaaactgctaacattccataaacccaacgccaaagtaaccagctatcttttacatcttgattaacttgtttacctctattattttcatattcctcaaatttataaaaacctgcaactatttccttatctgtgggaatattgcgagagttagtttccggtgttttagcatagttagttaaattaatttcaatgttgaaaatttgacaaaatacagaaatagctctcacagcattatatcttgcccattccttatctattttctcaattgcatgaataaaattttccccaattgctaaatcatcagccttagtataacgtttaattctggtataataataaaaaaaggtatgctcacttttagttgtacgtttatgggttttaaaatattcaatttcaaactgttctaataattcgccaatagttggtaaatcattttttctagtttccttccctaaatatttatcattccaaacaaaggtttttctggcaattaactttcctaactcataagcttcttcttctacggtttttaatccctccaagttagcaggaatgtttaaactgatgttgtattgctttttacctgtttttctgatatcagcatctcctggtttcaggggtaaagttgcccgtaattgcagacatccattagattcccgaatggtaactctggcctttgcagacttcaaacgcagatttactagctgtatttcttgtgtgaggttggttttcatgctgggtttgtggcgatcgcatcaaaataaacaaataaaccataaagaattaattcaaaaccccttgttctggatcttgaatttgtgaatcttgcatttttaattgtttattagaataaacttaaacccgaaataaatatgttaactgcaaacatccagaaaacagataccaaacttctacaatcatttcagtatctcgacaatattatacattataaatttgactagctttaatgacatcttcaaccgtaatatttaattcaggaaaagtaggagaaataattttatctgtacctgtaaatgctgtttgttgatatttaccagcaaccaattcataaacaaacaccgttggtaacttaggatttcctaaataactacgagaagctatagctaaataatccactatccaatattccttaattcccaaattttcatattcttctaacttatcaacataatcatcttcccaatttgttgatactacttctactgctaatggaattggttcaattaaagcaccataagctgtaacattagcattccataaagatgcaagaactacgctcacatcaggatttcttcccctctgttctccttcattagtaatagttctaataactatatctttatctacaatataatcaagctcagaagtgttgaatgttaagaaatctgtgataaaaatagcccaaaatatattaaaatttgagcaagctatatcaaaatattgatttgatcatgattataaattcatttcccaagattgtcaaagaca

SEQ ID NO: 17 - DNA, 79741 bp, Sphaerospermopsis sp. LEGE 00249
  LEGE00249_29
cgaatgtctttgatgaaattctctgctgtttttttcttgggtgttctcataatatcaaatttaaggattttgaaaacactctcttagttttgacttaaatcagtacactttttgctgacgatttacaggtatatttttggctttcactcgagctgtttttttctgcttttaaataatattcaatagcttttaaatgtaatttaagtccggataagttatttgcaataatattaaagcagaagtatttaatccttttgtcctcttttgttacattactttttagaagctcaaaagcagttttattacttccaagataatcacaagcatacgattgagttaataagatgtcaagtgtaactctatttgagtaacttcttttttttagagaactgaatatcttttttgctgtaaataaatattcaatagccttctcgttatcagattttgacatatgatacagaccgagacatctgtttgcataacctaatccagatgaatcatttactctttctgatttttttaaaataagttctgctgttttttttaatgatttggtttggttaaacacataatatttatatgaaatggaataaagatttttaatcgtcaaactatcattcctcctcaaatcaataaaagacaatgccttgtcattatactgcacgcgctttttaaaatctaaactgtcattttcagctaacgctaagtatttttggacagagtcattggccggattattttctgaatgtgaagatttttgggtacacccgatgagtgtaatagcgattgctgataaaacaagaaatttattcataaaggcaaggtagtaaaaattgaaaagagatagtacttatcttattctttgggtggaatttgcaattggattttcagcttttgtatggtttgcttcaaaatctcaaggtcagccgtaacagtttcgctagctttttgattattataagagaggccaacttctacttcccgttcgagaattttatcttttttcttcttctttttctccggggtagcgatgccttccaataatttttcgcaatgcgcttccaagtcatgtactaggtcaaaataataggtagttacttctgcctcaatcctgattttgagatagcaagtcgctttggttgttgactcttgaccaaacattgctaacggatataaccataatatatacaaccaaggatgtttcataaacactatacaaagcaaacagccccgctttcagtcgtccaaacagaaaagctaagggctgttttggtttgttttaaaagtctcccgtttaataactaaccttaaaataaacaggacaaatttcagttaatttttaccttcccaaataccactttggatccggcagtcattcccaaaacaagttttgagtttgatttttatcatggtaaaagtataacgggaaaattagattttagtatacaaaaagtgtacatttttttaaactacacaaattatcaaaggattcatataaaaccttgttttcgtgcttcccttaaaatgtcttcatcgtttcctttttcaatatcgaaaaattctttgatgaatgcctttcgtttatcaacggcacttttagataaatgtagatattccggcaggtttttagttttaatcccccgatttaacagtaaaattatttgacgattgtaaaaatccagcaactttaccttttcttccaattgtttgttcaagtgtttaatggtactgctgtgatattgtttcccctgtaacacagtatgaaacgcttctgttaaatcgaaggcatcaaaatcgcttttgaccaaaaagccgtccggattatgattctttaaaatattatacaacaatagtgattccgaatgcgtagtcaacatcataattttgctgtccggtaaatgttttttaataagcggaatcaaatcacttccgttgttaatgcctttttcagcataagcaggcatggtgtaatcaatggtaactaggtcgaagtggtctgtagtgttggtaattatgtcgtaggcactttcacaactcaaagcttgttcagtctttatttcataaccataaggattgaaagataaaatagatttgtagccctcaatgatgagtttgtggtcatcaatcattaatacgtttacttccattttgattatatttttagtaaacgtaatacttttctgctatatttccaaataatttccgccggcgattctgttgataatcaaatcaacattgtctttatacgattttgagaaaggcagtttagtagtagagtttttaatgtagcaaacggtatttccggtgtgaattcgggaaacctgattcacattgataatgtagctattatgaattctcaggaattgtgattccggtaaaacggtttcaaagtgttttaaggttttgaaagctgttatcatttctccgttgttcaaatgaatgtcggtcgagttgttatcggcctcaaaatacaagatgtcttccgagtcgatataacggtaatcaccgtaagatttaatacaaatgattaatgattgtggttgctgaaccgtaattgtattgtctgtcgtagtcggaacagttttgatttccacatcatgttcttcagtttgcagttcttcagtcagggtttcgtctaacacttcaaaagtagcggcaggatttttgacttccatatgcggtaaatccgatttgatggctcggtcaaacttgaggatggcttttctgaaatcgttaatgtctaaaggtttcaacaaataatcaacaacttcgtatttcaacgcctcgtaagcctgatcttttttcgaagtagtaacaataatttttggaaccacgctcaagtagcgatagagttcattaatcagcgctaaggataaattactttttttgtcggaaggatcgatttccagaaaaaccaatcgcggttggtgctccaaaatcaaattcacaccatcgtcataattattggcagaagccacaaacgacaggttgcgaaaacgctcagctatggcttgggttttcacgacatcgtcttgactgtcatcaataatgatataagtatggctcattaacgcttatccgttgattttgggacagcattttctgattaaattaacaggtagttttggggaaactttgttgttaaactaaatatgtatcttaaaatttaaaaacgaaaataaaaccgaccaaaagagccgattttcgttgtaacgaaattataggttcgattttggagaatttcaaattgttgacagaatcgcccaatctgttaatatgtgaattttattcaggtataattcttacaaaaataaaaatcccaaacaggttaatgtttgggattttcggttccgacaaattcggaagtataagataggagttacatcttcatcaaccaatttctcatagaaacttcgttgttgatgatggctcttagttcggcaattttaacgcgatcttgttgcatagtatcacggtgacgaatggttacggtttcgtcttctaaagtttggtgatccactgtaatacagaatggtgttcccaaggcatcttgtcttctgtaacgacgaccaacggcatctttttcgtcataggctacattgaaatcccatttcaaatcgtcgatgatttttttagccacttccggtaagccgtcttttttcaccaaaggtaaaacggctgctttggttggtgctaaaacagaaggcaaacgtaaaaccgtacgagttgaaccgtcttctaaagtttcttcttttagggaagttgcgaaaaccgccaagaacatacggtctaaaccaactgaagtttccactacataagggacgtagttcgaattggtctcgttgtcaaaatattgcagttttttacccgaatattgttcgtgtgctttcaaatcgaaatcggttctcgagtgaataccttctaattctttgaaaccaaaagggaagttgaattcaatatcagccgccgcattcgcatagtgtgctaatttttcgtggtcgtggaaacggtagtttgctgcgcctaatcctaatgataagtgccagtttaaacgggtttgtttccaatactcgtaccatttcatttcttctcccggttttacaaaaaactgcatctccatttgttcaaattcacgcatacggaagataaactgacgggctacaatttcgttacggaacgcttttccggtttgggcaatcccgaaaggaattttcattctaccggttttttgtacgtttaagaaattcacgaaaatcccttgtgcggtttccgggcgcaagtataaatccatggcattttcggctgaagcaccgagttttgtaccaaacattaagttgaattgcttaacatcggtccagtttctcgagccggtttccggatcggcaatttccaactcctcgattaaggcttttacgtcttccaaatctccggcgcctaaagaacgtcccattctttccagaatttcacgctctttggccaaatattccattacacgcggattggtggttttgtattgctcttcatcgaaagcagcgccaaaacgctcgcgggctttttcaatttcttttttcgctttcaggtttaatttttcggcataatcctcaattaaaacgtcggctcggtatctttttttagagtctttgttgtctatgagcggatcgttaaacgcgtccacgtgacctgaagctttccaagtggtaggatgcatcaaaatcgcggcgtctaaaccaacaatgttttcatgcatttgcaccatggctttccaccaatattctctaatgttcttttttaattcgactccgttttgagcgtaatcgtacactgcgctcaaaccatcgtaaatttcgctcgacggaaaaataaatccgtattctttagcgtgcgaaactacattcttaaataaatcttcttgttttgccataatgctgcaaaaatataaaaagcgctgataaaaaaagggtttaaaaccaattagaattgaaaaaatgtataattttatgtaagaaaattacttttttatgtggaatcacctgctcaatttattttttccgaagtcgtgcgccggctgtcacagccttttattacaagatgaaaacgtgatttgtacgcaatgccgccacgaaattccgctgtccaatcatcttacaatgactgaaaacgaagtgtttcaacgattttacggtcgtattccgttagagtttggcgccgcactgttttattttcacaaaaaaggcatcgtacaggaaatgatgcaccaactcaaatacaaaggcaaccaagaagtcggaacggtggttggcgaatggtttgcggccgaattgcagcaagtgccgatactgcaaactgtcgattacattattccggttccgttgcacaaaaagcgatttcgggaacgcggctacaaccaagtaaccactttcgggcaggctttgtcgaatcatttaaacattccgtacaacgaaacattattgcaacgaaacttgtacaccaaaacccaaacgaaaaagtcgcttttaggacgcgccgatttgagtcaaacgttattcgatatcgaattttcagaggaatttaccggaaaacatttcctattgatagatgatgtaatgactaccggcgctaccttggaagcttgcagtaaagcgctgctcaaaatccccgaagctaaaatcagtatagcctgtatggcgctggcacacagttaattgttaagtttcctgcaaaagatttcattcacactaaatataattgttattttgtgctttgaaaaaacgatttatgctcaaaacgcactttaaatattttgctttattgttggtctttttaaccattggttgtgccaaacgcggctccataaccggcggagataaagacacgattgcaccggttttgaaatcgagtttgcctaaaaatttctccactaattttaacggcaagcaaatcaaattagtatttgacgagtacgtgaagttgaaaaatgtcagcaagcaattgattgtttcgccaccaatgaaaaatcagcttgagattttaccgtatacagctagtaaaaccataacgattaacattaaagatactttacaaccaaatactacttacagctttaatttcggtcaaagtatagaagacaataacgaagccaatccgtattctcaattcaaatacgttttttcaaccggcgcttacattgattcattacagttgaaagtcaaagtcaaagatgctttggaactgaaaaccgacaattttgtttcggtgatgttgtatgaggtcaacgaaactttcaacgattccaccatttataaagaaacaccgcgctatgtaacgaacacgttggacagtttggaagtggtgactttggaaaatatcaaagccggaaaatatttgttggttgctttaaaagataatggtaacaacaagtacgacccgaaatcggataaaattggatttcaaaaacaacatatcagcataccgaacgatactgtttttgaagtggaattgttcaaagaagtagtgccgttcaaagctgaaaaaccaactcaaatcacgaacaaaagatgggcaatgggttaccaaggtaaagccaaaggcgccaaagtaaccgtgaaaaacggcaatgatattatcccgactgtggtaacgcaaatgttgaaaaaagattcgcttcaaatttggatgaaaccggtcaaagccgattcgcttcaagtgatggtggaaaaggataattacaaaactgatttttacatcaaaggaaaaagcaacaaagccgattcgctgcaaattagtccggaattcagcggtaatttgccattgcgcgaacgctacgctttgagcagtacgacaccattggtaaaatttgataaaactaaaatcagcatcaaaaacaaagattctttggcggtagattttaccacggaatacgacgaattcaaccaaaagctgtatttagacttcaaaaaagaacctttagaaaactataaaatacaatttttgccgggcgcgatggttgatttttttgacaccgttaatgatacactcaattacaaagccacgactaaaaacttatctgactatgggaatttaaggttggtgttggaaaacgtcaagcgatttccggtcatcattgagctaacggataaagatggaaaagtaaaatactccgaatactccgaaggtaacaacagtatcaattttgacgctatcgaaccggccaaatatgtgctgcgaatcatttacgacgacaataaaaataagctttgggataccggtagttttatggaaaaacgccaaactgaagaagtcatttatttccccaaagaaattgatgtccgcgccaactgggatgtggaacaaccgtttaacctgaaatagttgctgtttacaaaagtctaaattggtctttgtcctctagaaaagccaatttattttttgtttcgagtagtttttccttgtctaattcgactataaaaacaccgtcggtttcttgtgcctccaaaaggtaatttcctaaaaaatcaaccgcttgggaatgcccaacgtattccaattcattttcgtccattccaattcggtttacgccaatggcataactcatgttttccacagctcgggctttgagtaaaatatcccatgcattgatgcgcggtttcggccaattggctacataaagcaacacatcgtaatcttctacatttcgagcaaataccggaaagcgcaagtcatagcaaatgagcggacaaattcggaatcctttgtattctataatcaatttttcttttccggcagtataaactttgtcctctccggccaaggtaaacagatgccttttgtcgtaagttttaagttcaccgttcggatatacaaaaaccaaacgattgtaatactttccgttttcttcaattaccaaactaccggtaatggcgcagtctttggctttggccaaatgttgcagccaagctatggtttcgccgttcatcgtttccgctacggctttaggattcatggtaaagcctgaggaaaacatttcgggcaacacgatcaaatcaacctcttccataaagcccgtgattttttgggccaaatgacttcggttttcgattgggttttcccaaatgaggttggtttggactagagcgattttcaaagacatgatttatgttttagccactgattaaacggattggacagattaacacagattattttatgctgatttcgtcaataaagataaacgcatcgccattgtacggatagcctaaatgccattcgggcagtttgccgtaattgtaggctttcacttttacgaatcgagcattaagcacttttggtaaggtgatgccaaaatctttgatttgattgtcgtcggttttcgggtttatgtcgttgtcaacagtcgctactaaggtaaagttggtgttgtctgaggaaacgtagtattccactttggtcggcatcaaaatccaagaacgttgatcttgtaaaaaggtactgtgaaaatcacttactttttgttctttttgcaaatcgataacggcctcaaaatcctgcgtttggtaaccttgccaatcgcctttgcgccagttggttgtgccattaatgccatccaacaaaccttccggaccgccggcgtggtattgcggattgtaaatcgatttgatgtctatactataattattgggttttttgtaataagtagccgaaatagtgtcgctgccaaccataaaatcaggcgccaaataggcttctattttagctgtttcattgatggtaaaaggtttttcataaagctgaaatgctccattattattgattctgtaataagtcttcagattggtttgactttccgcaaagtcgaatttgttgaatgctatactgatttccatttggtctttaaaagatttgcttttggcttcaattaccggaacaggaattatgggttgccaagcttctttatgcggagtcttttgaaattcttccagcccgaaaatttgtaaataatcgccatttcgattacggttgatgtagtcggttttgttttcgtttaaatggactttaatgctttcaaaataaggttcggttgtactccagcctgctttacccggcgtaactgcataaattcccatcgaactcaaaacataccaggcactcatttgaccacagtcttcgttgccaatcaaaccatcgggtgtgtttttatagaattcgtttaagatataatgcactttttccttggttttctcgggtttgccaatgtaattgtacaaatatgccatatggtgactcggctcattgccgtgcgcatattgaccaattaacccggtgacatccacttgctctcgaccggtagttttgctttcgctgttgaacatctcgtcgagtttggcttcaaattgctccggaccgccgtaagcttcaaccatgccttgtatgtcttgcggtacaaagaatgagtattgccacgagttgccttcggtgaaattattgttgatttctctcgggtcgaaaggtttgtcccagccgccgtttttcttcggacgcataaaaccggttgtccaatcaaagacatttttccaactttgcgagcgtttcataaagtaatcgtagtcagctttcttgttcaatatcttagccatttgggcaatacaccagtcgtcgtaagcatattccaccgttttggaaacgctttcgtgttcgtcatccatcgagataaagccttgtcttttgtaggcttccagacctaaatggtctaacatagccgaatgtttggcagcctgaaacgccaattcgtaatcaaaacctttgatgcctttggccatagcatcagccatcacggaaacggagtggtagccaatcatacaatcggtttcattggacgccaattcccaaacgggtaatctgccgccttgttcgtattgttttaaaaaggtattgataaaatcggctgtgcgtttcttttcgattaaagtgtacaaggggtgcgcgccacggaaggtatcccaaagcgaaaagaccgaatagtaatcaaacccttcggctttatgaattttattgtcgcgaccgcggtattttccgtcgatgtcttgggcgatattcggttgcaccattgtatggtataaagcggtgtagaatatgcttagtttgtctttattcgtttcagtaatttcgattttggctaattgttggttccaaagtctttcggcgtcttctttgactttagtaaaattccagcccggaatttcgctcatgttaagtttagcaccttcgtaaccggttggtgacaaagctactttcacccaaattttatcgcctttgttcacttttttggaaaaactcaacgccaattgcgtgcctgaaaacactttgtctgtaactgaagcttgtgctgcattgttgcttctgattttgttgatttgcatcggttggctgaactcaatgcgggcaaaaacgtattggtccttcgcccaagcttcacttcttcggaggatttcgatagttttagagtttacaatgcgcacttcgccttgcaacaatttatcgcggtggtttaagtctaatatgatattagcattccccgacgaattgaacgtatattgatgaaatcctacgcgagtagatgccgtcaaagctacatcgatatggtgtttgtcgagttttaccgaataaaatccggtactggttttttcattagcatgagagaaagaggaactataatctttcggacttaacaagggttcgcccatcgttggcattaacattatatcgccataatcggtacagccggtgccgttgaggtgcgtgtgtgaaaagccataaatagttttatcatcgtaatgatagcctgaacaaccgtcccaactgccgtcgattctggtgtcgggtgatagttgtaccattccgaaaggcacagtagcaccgggataagtatggccgtgaccgccggtgccaatcatcgggttgacgtattggtgccaattttgtcctaaaacggagagcgaaaacaataaaaataagcttgagaatcgaagtgtcatattgttgttgttggtaatatcaaagatagcaaatgcaattgttaaattttgagttcaatgtaaaccgctaaatgatctgaaggatattttaagtcttttgaatcacttaaaatggcgtatttctctaccgtaaacggattatttttagaaagaaaaatgtaatcgatgcgtttggttaccgcttcttggtgacggaagccattaaaagttccagttgggccgaatggtttggttttggcaatatcttgactatcgttcatttccttttttaagttgatgatacgatcttcgttaggttcggtattgaaatcacccattaaaaataccggatagtttttggtattcaatgctttgatttttgacagaattaaaagaatggaattcgatcttgccagttcacccatatgatccaaatgggtattgaaaacccagaaggtttgtttggttttgcgatctttgaagagtccgtaagtgcaaacgcgattgagcgcagcatcccaacctttggagattttatcgggagtttccgataaccaaaaagtgttttcttgcagtatttggaatcggtcttttaagtaaaagatgttagatgattcgcctttgccttcaccgtcacgaccaataccgatgtacttatagttaggcaacaaagtttgtatatcagttacttgctgtggtaaggcttcttggatgcctaagatatccggttcgtaaaaagttatttgcgaagcccaatacgctttgcgattcggccaagcgttttcgccgtcggaagctaggtctaggcgaatgttgtaggtcattaaacttagtttttgagctgaaacgtgactaaaaagagaagtcagtaacagtaagaaggtgaaataggttttcatgagtatagttgtatgactcaaatatacgtctttttacaactaggtgtgcgttagggattcctttggcagtcgcttcgctcgtgtggagtggaaatccttttttggattgaattgtttttttctgaatgccattcgtgtcacaaaaaagattggagcgtaaagcctgacccgtagggaaacgccataaaaaaacgcatccaaatgaatgaatgcgtttcttgttttttataaagttgaattacttcaaactggcttttaagtactcgcggttcatgcgagcgatgttttccaaagaaatcccttttggacattctacttcacaagcaccggtgttggtacagtttccgaatccttcttcgtccatttggcgtaccatgtttaagacgcgttgggtggcttctacttttccttgcggtaacaaagcgtattgtgatactttggctcctacgaataacatagcagatccgtttttacaagtcgccacacaagcaccgcaaccaatacaagcagcggcttcgaaagcgcgatctgcatcgtgtttaggcaccggaatagcgttagcatcgatggttcttcctgaagtgtttaccgatacgaaacctccggcttgttgaattctgtcgaacgcgctgcggtctactactaaatctttaactaccggaaaagctttacttctccaaggctcgatgtaaatagtatcaccgtcgttgaatttacgcatgtgcaactgacaagtcgtagttccggtatccggaccgtgtgcgcgaccgttgatatataaagaacacataccgcagataccttcacgacaatcgtggtcgaaagctaccggttcttttttctcgttgattaattgctcgttcaattggtctaacatttccaaaaatgaactggcagtagaaacattatctaatttataagtttctatttgacctttggctttagcgtttttttgacgccaaattttaagggttatattgatgttttttgctgcagacataatgtaattatttgtagtttctagcggctattttaataaactcgtatttcaattcttctttgtgaagcatttctttgttgatatcgtagcccatgtattcccaagcgcttacgaaagcaaagttgtcgtcgtcacgaagtgtttctccttctgaatcttggtattcttcacggaagtgaccaccacaagattcgtttcgttgtaaagcgtccatcgccataagctgacctaagtctatgaagtcggccacgcgaagtgctttttccaattcagggtttaactcgtcggcactacccggaacgtaaacatctttatagaattcttcttttagcgcagcgatttcttccacggcttcttttaatcctttttcgttacgcgccattccgactttattccacataatcaaacctagacgtttgtggaaatggtcaactgatttggttccgttattacttaagaacttatcgatagtttctttaacgctattttccgcttcggcgaattcaggagaatcggtggaaattttcccggttctgatttcatcagccaagtagttagaaactgtgtatggcaatacaaaataaccatcggctaaaccttgcatcaaggcagaagctcccaatctgtttgctccgtgatcagagaagttggcttctccggcaacgaaacaacccggaattgtggattgtaaattataatctacccaaacgccacccatagtgtagtgaacagcaggataaattttcattggggtttcgtatggattctcatcggtgattttttcatacatcgcgaaaaggttcccgtatttttcttccaaccattttttacccaatttagtcacttcttccgctgacggattgtggtttccttgagcataagccgcttggcgacctttggtttggatttcggtagagaaatctaagtagacaccttcgttagtatcattggcttcaataccgtgaccttcatcacaacgctctttagctgctctcgaagcaacgtcacgtggtactaaatttccaaaagcaggataacgtctttctaagaaataatctctgtcttcttcttttaattgcgttggttttaattttccggcacgaatcgcttcggcatcttcttttttctttggtacccaaattctaccggagttacgcaacgattctgacatcaaagtcagtttcgattggtttaccccatgaaccggaatacaagttgggtgaatttgcacaaaacaaggattggcaaataatgcgcctcttttgtgaactttccaaccggcagttacgttacttcccatggcattggttgacaggaaatatacatttccataaccgcctgaagctatgattacggcgtgagccgaatgtctttctaatgctccggtaactaggttacgggcaataattccgcgtgcttttccatctacttttaccaagtctagcatttcgtgacggttgaacatttgaacgtttccaaccccaatttgtcttgacaatgccgaataagcacctaataataattgttgtcctgtttgtcctgctgcgtaaaaagtacgttgcacttgtgtaccaccaaacgaacggttgtctaacattccgccgtactcacgagcaaaaggcacaccttgtgctacacattggtcaatgatgttggctgaaacttccgccaaacggtgaacgttggcttcacgagctctgtaatctccacctttgatggtgtcgtagaacaaacggtaagtactgtcgccgtcattttggtaattcttcgcagcattgattcctccttgagcagcaatcgagtgcgctcttcttggagaatcctggaaacaaaatgcttttacattgtagcccatttcacctaaagaagccgcagcagaagcaccggctaaaccagttccaactacgattacatcgattttcggacggttatttggggctactaattttaaatgatttttatggttagtccatttctctgaaatagaaccttctggtattttagaatctaacttcatgatgtatactgatgttgattattttagaaaaaagtgaatgtaaaccggaatggcggcaaaaagtagcggtactactatagcaaatgcttttccgaagcctttgattagcggggtgtatttcggattgttcaacccaagtgattggaatgcactttgaaatccatgtaacaagtggaaagccaatacaagcatagccacaacataagcgatagttgcgattaagccgaatttcgggtctttgaaaaaggccacagtgattttgtgtaaatctttgtacccttcacccattttcacattaacttctttgttgtaaaattcggttttgtttctgatttctaatcccatttgtcccaattgtgccggatcagcagggtagtatttaccatgatcagtagtaacataatactccattttttggcccatttgctctacggttatggtttgtagcggcattttttcatcgaaatgcatcttcgcccaaaagttcaccatgtgcgttacaataaacaccaaaatcaaagttcctaaaaccgccatgtttctggatgagaaactactgtttttggaagggttgtttttggcatagcctattggacgggcttttgcgttttggtaggttaacatgaatccgtcaaccgcgtggaaaagaatagaaacgtaagttaggtaagaaagaatttttactgccggattagtggtcatgaacaacgcatacttgttaaatgctgatgcatcgctaaaaattaattgaagatttcctgctaagtgacccgctaaaaacaagcataaaaataaacctgtaagagccatccaatatttttttacaatggacgactttaaaagtgcagattttgccataatgttgtgtataattgtttaaaaaattcacacaaaaataaggctatttgcatataactacaaccttttcgctgtaatttataatgaatttaaagtgagtttaacagttgttgattttcaactgtttaaaaggctttttgaggctcaaaaacttaaacaaaactagcgaacatagctaggaatcaaccctcgcaatcccatgtccaccacattttccccaatggaaggttcaaattttccatcggcgttaatttcgtgccattcaaaactgttgtttacagaaagtgacaacgttacgattacatcttgggtttcattgccgctaataattaagttgttggcaaattttcctgtcaccacgcaagtgttaaggtttcttggaataggcgaggaggcttctatcggattcggaactgtggttgctcctgccggagcttgtccggaagccgaatacggttggttattcaaagcaaaagcccaataaccttgcgctttattagcattaaccggaaaaagattattaccgatattgaactcggtgatgtaagtgttgaaccctacaaaactagctaaagttccggcgtaatccacattttgatggcggatgttgatttggtaattctgataagacaaagatactcgcaaccattcgtaattaccggcggcaacatctcgcaacggaatttttaaaaacacttcatcttcgcccacaattttagagcgactgaaatcgacagcgttagcgccgcctaaattggtttcaggtgcgtggtaaatgatggttccggcgcccaattgggtgttggcattcggagctaattcaatgtaatgggatgaaatggaattgaaaatcggagattgggccgcattccccggcgcaactgccgatggttggcctaaattattcaatcgaacctgattttcgtcaaatttgaatttgatgatgagcatcggttcttcggtagtatcgctgctacatgaggagaacggtagtccggcgattaggaagagtaaaataacaatgactttgttcatgattttttgattttttccgttacgctccaaacaaatcggaatcgcctcgggtgattttgattgatgatgttaatgtgtttttgttacatcttcatctataacgagaatatagtcggctttattgtgttcttccgccggaattttttctaaatcactttgttcgatagtagcaatggttaaaatttgaacttccggggcgtattttttcaaataccaacagatgccgtcaaagttatcggaatgatacgaaccgttgtaatgaatgaaaatcgaattttcttttagattcttttgaataaaataagccatcgtagcatctttactcgcttgggctttcgacatattcggactcgcatgatcgcccatcattttcatcatgttcacataacccggcaagttttcatcgtagggcatcggcaacggcgccatccaggatttttcttcatcggttaaggtttcgagggcttcaaatccttttttggacaccattgaggcaaatcttctcgggatattagtagcgataaaagcgagtttcttttctttggccaaatcgactaaaggtttataatcggttttatagttgggccaaaggcgtgcagtagaatctaattttttctgattaatgtctccgtttaggtattgatcgagttgtttttgattatctgcttctatcatttcagcacctaaaaccaagggctttttctcagccaaatctttggtcaattctaattgcagccaatgtaccaccgaattattatggtattcgccaaacaaaaccacttgcgctttttcggctgcctttagtaattttccgtagtttacttttttgccatttttatcaaaaagttggtacgcttttttttcttgagccgaaacactaaaacaaaataataatgccagaattaatgaaacctttttcatgagttgaattttgtttaaaattattcattaatcagggaataaaaaaatgtgatacaaaaagaatatttttgtagttcactacatctatgaaaactcaaaacgacaactcggcctttttaaactatctgcatcattttattaatgattctgataaacattctgataaacaattttccgaaatcgcccatcgtttcaaggttttgactttaaagaagaaccaacttttagtcgatgaaaaccagatttgtccttatttctgttttgtagaaagcggcattttgcaacatgccattttagtcgaggccgaagaaaaaactacttatttagccttgcgaaattcggttacttcgtcgctcaatagttttctgaataaaattccgtcgcgaaaaagtatcaaagctttggtggattgccaactttgggtaattgatttggaaaacttcagggatttattggataataatcaagtatttcatcaattttattatcgtttaatcgaaagacaaatcatgctgattgatgactatcggattgatttactcacgttatcgccggaagaacgctataaaaaacttctcgccaccgaacccaaattattgcaagaagttccgctgcattacttggcttcttttctcggcatctccaatcgccacatgagccgcatccgaaaaaacatcggctaataaaaataacgccatttggctactaattgctttggactaatccgtaattttgataaacttctttctagaagtctaaaatatctaataatctaatattgtctaaaaatgaaataccatccaatagaccgcgatttgtttgtaaaaaacagagccaaattcaccgcacaaatgaaacccaacagtgttgcggttttcaattccaacgatatttatccggtttcggccgacagcactttgccttttgcacagcaccgcgacattttttacttatcgggtgtcgaccaagaagagagcattttattgctttttccggatgcgccgtttgagcatttgaaacaaattttattcttaaaagaaactaacgaacatatcgcggtttgggaaggcgagaagctaaccaaagaaagagcgttggaagtttcaggcattaaaacggtcatttggttacaggattttcacaaaacgttgaaagaagtgatggcctatgccgaaacgatgtacatcaataccaatgagcattaccgtgctgttattgaaaccgaaacccgtgaagcgcgttttgtaaaatggtggaaagaaaactatccggcgcataaagtagggaaatcgaatccggttttgcaacgtttgcgttccgtaaaagaaagcgaagaattggatttgattcagaaagcttgtgacatcaccgaaaaaggattccgcagggttttgaattttgtgaaacctaatgtaatggaatacgaagtggaagccgaatttgctcatgaattcttgagaaatcgttccaaaggatttgcttatacgcccattattgcttccggaaataatgccaatgtgttgcattatatcgaaaacaaccaacaatgcaaggccggtgatttattgctgttagacgttggcgccgaatatgcgaactactccagcgatatgactagaacgattccggtttcggggagatttaccgaccgacaaaaagcggtttacaatgccgtattgcgcgtgaaagacgaagctactaaaatgttggttcccggtaattattggaaacaataccacgttgaggtgggtaaaatcatgacttccgaattgttaggtttaggtttaatcgacaaagccgacgttcaaaatgaaaatcccgactggcctgcgtataaaaaatatttcatgcacggaacgtcacaccacatgggcttagacacccacgattatggtttgttatacgaaccaatgcaagccaatatggtgttcacggtagaacctggtatttacataccggcagaaggtttcggtatccgtttggaagatgatgtagtgattcaggaaaaaggtgaaccattcaatttgatgagaaatatcccgattaccgtggaagaaatcgaaagtttgatgaattcttaggtagagaaaagggataagagaaaagtgaaagacggctcgcagttgcgggtcgttttttgtttaccatatatgtcatataagattatttaagttttctctcaggaaacttctatgtcttatagggttaaaaaactatttttgtaacgatgaaaaccattatctacaaaaacaccaaaatttctttcaccgaccaaggcaaaggcacggcagtagtgttattgcacggttttttggaaaaccaaaccatgtgggacaactttgtgcccgaactttctaaaaaacaccgcgtgattaccgttgatttattgggtcacggcgaaaccgaatgtttgggttatgtccacgccatggaagaccaagccgacatgttatttgctttgctgctgtttttaaaaattcgcaaagtggttttggttgggcattctatgggcggttatgtggctttggcttttgccgagctttatcccgattatatgaaaggtttgtttttgttgaattctacttccagagccgacagcgatgagcgaaaagcaaaccgagatcgggcgatagcggcagtgaagcaaaactatacggcttttattcgcatgtcgatagccaatttatttgcagcagaaaaccgcgaacgtttagcagacaccatcgaaaaggtaaaagaacaagccttgaaaacaccattgcaaggcatagttgcggctttagaaggtatgaaaatccgcaaagaccgcgaagtgattttgcattttgcaccttatccgatgcaattggttttaggccaaaaagacggtgtgctcatttacgaagacaacatcgaccaaattgaagaaactaaagtcgaactcactacttttcccgacggtcacatgagtcacattgagaacgaaaaggaattgttgcaagtgatgttggtttttttaaagaaggtgtaattaattgtaaaaagtcaattcattttttcttcaaacgggatttcctgattgaatatgacttgtaataaaaccacaatttctttcagataagcttccattatttcggcattgctaaccgattgggcttctttttccggtttgaaagtaaacggcaaaaagcccgcgtttaggtttttgaaagaaatgattccggcttccatttcaaggcctttggtttctttttcaaacataaaggcataagccaaaatttggatgattttatcgtttttgatgtcttcggttaggcctttccaatcttttaacgtgacatttttttgttcgacttttccggttttgtaatcgataatcctgattttaccgttgcgaagttctatacggtctacatttcctttgatcaatacgggaatcggtaaacgattgtcttctaaaaggcgctcataggtttgttctagggcgataatttgtacttgatcgccattttctaaagccgctttctccaatttcagaaaattgtacacattgcgtttggccacttcaaacgccaagaggtttcggccttttttgatttcaccttctttgtatacttctttaaattggtgcaacacttcggtatctattttttgaaaacaactttcaatatcagccttggttaacaatcgcccgataaatggtttgtacaattcttctaaagtgccgtgaatgatagttcccaacgtattgacagctacgttttcctctacttcatcggtttcggaaatgcgcaaaaccctttgcagataaaactgtatcggattgcgaatataagtcgttaaagaagaaggcgaaaacccattgctcgcaatttcttttaaacgatctatgacgctatctgttttcggtaccagcatcggttggtatgcgattgttggcacatcaggattgaaatattgaaaaatcaggttatgattcggttgtttttcaacttccaattgtgtaatgaatcggcttttttcaccggcgtcaaatccttcgctatccgcgttgtataacaagtagatgttcttggcgcgttgcaataaatgatagaaatggtaagtataaatggcgtctttttctttgtaagtcggtaaaccgtattctcttttaacatcataaggaatgaacgaattggtgcttttaccggcgggaaatttcccttcgttgacggaagtgatgatcacggtttcaaaatcgagcacgcggctttccaatacacccataatttgcaaaccactcagcggctcgccttcaaaggaaacttcggccacgtcgatgatttgtttgtaaatggcttgtagtgttttaatgtcgtcgatgtttgtgtggttttcgaaataggtaatcatcttattgatgactttataaaccgagtacacaaaggcattggtgattttttcatcttcgttgtcgtggcttaaatgtgctttgatttgcagtagaatttgagataaattctccaacactgttacggaagttgtattccattttcggaacaacatctcaaaaagcacattgctttcggcttgtaattctgtgatttttttatgggtgatgaaagtgtaattgtttttattgattttgttcaccagcacattggcgttcgcatagggctcaatgagtggatgcgtcaaaatatctaaaacatctttgtagtacatcacataactttccccgtttctggaaagcgcgttggtgtgcagcttgaataatttagcaatcaatagttgcgccggattgttcttgcttgaaaatcccatggtgatgttgagcgcgttcaccgattcgggtaaagcgtgtaatacgggcaagagcagattttcttcgccaagaacgactgctacattttgaagattggcgttgttttcggcagcatatttttcgataatactccccgtaattttagcttgaccaattgattttgaggtcgcaataacatgaatgtttttggtttcggtaaaatcgttgacaatccattcgtacggatgggttttatagtgaatccactctgatttgaattttctctgaaacaaacctgcatcgtgaaaagtatcgtgaagcaaggtttcgtctatgtcccaaaatattttagctacatctaaagctaaaaggtgttggatgattttctcttcggcttggttaagcgcattgaaaccggcaaatagaaattgctggttattgttttcggaaaagtggtttaaattttgaaccgcttcacggtaaattaagccttggtaacctaaacctttatcaattaaataagtatataaggcatgatagtattccggcagttttttccagaataagaggtaattatcgatgagttcggttcgtttttcaacagaaacagcccaatgttctatttccttgatgttttcaaggtattttaaaatcttgttgggttccagcaggtaccgatcgatctcgttaaagtcttgtaataaggttttggcccagttggcaaaggattcgaaagattcttgttggtctttttctgtcaccgaaaggtaaacgttgtaaaactcgaaaagcagttcaacactgtcaattgaacgtattccggctatgtcttggataaagtcttctatgctgatgatgtttggcgcgaagatgttatcgcaaacagatttttttaattcgtctaataaaaagactttggctcttttgttgggtaaaatcaccactaagtccaatagtgtattggaatgggattttaaaatttcgtgagccagtttatgaagaaaagttggttttgacatagtataaaaataaaaaaacgccccgaatttcggagcgtttttctgagatattttaaggagaaattattttactaatttcacttcaactcttctgttgttagctttaccagctttagttttgttagtatcgattggttttgactcaccgaaaccagctgaagttaatctagaagcagcaattccgttttctactaagtagtttttaacagcagcagctctgtcttcagataatttttggttagtagcatctttaccatcgctgtcagtgtgaccttcgatagagaagttagctgttggatactcttttaagatagctgtgatagcttgtaataccgggaaagtttgttgttggaaagaagctttaccactgtcaaacaagatagtttttgcgtagtcatttaatcttttgatagcttcttcagttacctctggacaaccattgttagcaacagtaccagcaacatcaggacatttgtcatctttgtctaatactttgtcaccatctctatccggccatggacaaccaccattttctttaggacctttaacgtctttacatttgtcttctttatcttgaacaccatcaccgtcagtatcaggacaaccgttaaattcggcaggaccagctacatctggacaagagtctttgctgttttcgattccgtcaccatcagtatcaggacatcctttgaattgtggtaaaccagcttcttcaggacaagcgtcatctttgtcataaattccgtcaccgtctttgtcagatccaccaaatttgaaagtaagacctgcaaagtgttgcatatgagatggcatatcttcacgaacatcttcgaaagaatgtttgtaagtagcacggtatgataaacctacagtttcattgaaccagtaagttaaacctgcacctgcgttaacagtacctgcactagttacatcacctaaccaagtgtaacctccaccaacatgtaatgaaggatcaatagtttttgatttaagtaaattcatcatgctgtagttgataactccgtcaactgcataatagttgatgtctccggggttaactacagtgtaaggaccttcacctactcttggtaatacgtatcttgtaagtttgttgatagatccggtaataccgaatgagaagttaccgccaacatgttttgatacgtttacaaaagatacggcaggtaagatattccaattgtcacgagcattgaaaaactgtgaaaattgatcttccaattttgaagcagcactaactctagtgtctacagcgttaacaccaaaggtaattgcccatgggttgttgctgtcttgagcttgtgagctaaaaccagctaacaaaagcatagcaacgaataatttgttaagatgtttcatacttaatttgattaaattataaaaattataatagggcaaaagtaatacctattaccctaatatcaaaatcttatggttaaaatgtcattatttaatgatattgagtgatttgccaacttcggtaaaagccgctatagctttgtctaaatgctctttgttgtgggctgcggataattgaactcttatcctggctttgtcttttggtactacaggataaaagaaaccgatgacataaatgccttttttcaaaagttcatccgccataatttgtgagagtttagagtcataaagcataacgggaactatggcagaatctccatctatgatatctaatccggcttttttcatgccttttttgaaataattagtgttccactctaatttatccctcaacgtggtgtctttttctaacaattcaaatactttgatagaagccccaacaatagccggagccaatgaattggagaataaatacggacgtgaacgctggcgtaaaatttcgatgatttctttttttgctgttgtatagccgcccatcgcaccgcctagcgcttttccgagcgtcccggtaatgatgtctactcggcccataacacccttggcttccatggttcctttaccggtagcaccgataaaaccggcagcatgacattcgtccaccatcactaaggcgtcatatttatcagctaaatcgcaaattttatctaaaggcgctaccaatccgtccatagagaacacgccgtcggtaacaatcagtttgaaacgatgtccggcttcaaccgctttttttaattggttttccaaatcttccatattggaattttcgtagcggtagcgtgcggctttacacaaacgaacaccgtcaataatagaagcatggttcaaactgtcggagatgatacaatcttcttcacctaataaaggttcgaaaacacctccattagcatcaaaagccgcagcgtataaaatggtgtcttcggtgccgtaaaattcggctatctttttttctaaggttttgtgaatgtcttgcgtaccgcaaatgaaacgcactgatgacattccgaaaccgtgagaattcaacgcgtctttggccgcttgaatcacttcaggatgggatgataatcctaaataattgttggcacaaaagtttaaaaccatttctccgttaaccttaatttcggctccttgcggtgaagtaatgattctttctcttttaaaaataccgttttgttctatggtatctaattcgttttgtaggtattgctgaatttttccgtacatgattggaatttaaatttaatgttgtttgatgttgatgttacaaatttactacttccaaacgttctccaatgtaaaccaaggcttttttagttactttaaaacccattttttctatggcgttttggtaattttccagttgcgtggtgtatttgctttggtgcgcaccggttttgtaatccaataaataaatttctttgttcggattgacaaccattcgatcgggtttgactaaatggccttctttttgaatgatagtttgttcgttcaaaattgtattgccagacgcaaaataaggcaataggtcttgatgcgctactacttcttccaaagtttgcgcgatggtttccttttgcgaaccaatgattaatccgttttcaatagctttcgtcagcgccagttcgatgtcgtccgaagtgttgacaaaagacaggatttcgtgtaaaatagtcccgaattcaattgctttttgctgttgggtattccacatcgaactttctttttgggcaattttgatgtttttcggatgcaacgtagccgttaattgtggaatcacttgtgtagcagaggtcgatgtttcggtttcagacagtttgtcggcttgaccaaaagcgtagtcgagttggttttcatcgaatgattcacctatgaatttgataaagaatgtcgccatattgttcggatattctcccgaagttttgtttcgcgtttgcatgcccgaaataatgtacaactgctcctcagcacgcgttaatgctacatacaacacgttgatattgtccaatagttcttcttgctttttttgttggtaaagagtattcgcttcttcgccgtaactgcttactttactgcttttgtctactaaaactttcggcaaaccaatggtttcggcatcggcattgagccacattttttccctcggccctttgctgtaatcttcttcagcaaacggaaaaatcaccaccggaaattcgagtcctttcgatttgtgaatggtcatgatccgaaccgcatcattgccttcgggtgacggaatgctgagtttctccgaattcgtatcccaataagcgagaaaatccgaaataccggcttgctttttcaagtcgtgttccaatatcaaatcgaggaaaaactggatgtaagcattacgtttgttagtcggaatgactttggcaataataatttcggtggcttcgtaaagcgactttttgcggatgttttcaaacgaaaaatcgagatggaaactttgcagccattgttggaaagccgattcgcctcgttgttccatacctttcgcaatgaaatcgtgaattggcaattgctcttgtagcgaagccaaatagtacaaaaagttggctttagccatcaaatcgctgttgtttttcaagtagcgcaaaatgtgaattacaccttgtacttcggatgaagcgcccaacaacaaactttccgaagacaaaatcgggatcccgttttcggtcaggtaattggcaatttcgataccatgggctttttttcgggttaagatggcaatgtctttgtagcgaaatcctttttgtgtgaccctttctatggttgccaaggtggcagccaaatacatttcgtttttttccaaattttcgtcgtcgtcccaatgctctttgtccactttcggtacaaaggaaatatgtacataaccaccggttttggaattgaattcctgatggctgtggttgaggtataagtttttgtaatcttggtgggtaaactcgcccgataaaaagcgaaaaaaccggttgttgaaatcgatgatttgcgaataactgcggtaattcgttcccaaagagaaaagcgctttatccggattgacaaacggattgttgtttttgctgagttcgataaattgttccgcttttccgccacgccaacggtagatggattgcttaggatcgcctacaatcatcagcgagccacgttcaccgtttaaatcttcgctcgatagggcattgtctatcagagggattaaattgtgccattgcatttcggaagtatcctgaaattcatcgataaagaaatggcggtatttttcgcccaagcgctcgtatataaaaggtgcgggttggttctggatttgttcgtaaatgagtttgttgaattcggctatcgaaaggatattttgttctttctgaattttatccaattcattactcaccgtatttaacaatgaaagcggtgtaatgtttttcagaaaggcttcgtagaaatttttcttttcgaatgtggcataaattgatgacagcatttcgagtagatccggaatgatactttcaatgacagctctgtctgccgccgttttgttgattttgatatcgtcaaattcgtggtaggttttgttgttcgggttgaatttcttttcctgaatcgttaccaaatgtttcgggaaatagccgcctgaaaaagctttgttgtcgatgcctttattgtcaatcaacaacaaagcttctgtagccaattcaacagttttggcttccatagcagcacaaagttccgtcaatttgtttttgatttcgatgaattccgctatggttttattctgaaaatgggtaatctcttgacggttgttctcattcagaattaatttccccgtttccataatctcccgagaaatatcccaggatttatcgtcgtcggttttttccatggtaaaatcgaccaacaaattggtgagcgtttcgtcatttccggcttcggcaatgatggcgtcaacggcttcggttaataaattttcggtgtctaacgatacttcaaaggtaatgggcagattcaaatcgtgggcaaaagcacgaatcactttgtgtgtgaatttgtctatggtcgaaatatcaaaagccgcataattgtggatgaggtttttgatgatgcttttggctttttcggtaatggtagccaacgacaaaccggtttccttttgaatgtcctgcatcaactgcaacgctttgttcgaaggattttctttagcaaactccgaaagactttccaccacacggcttttcatttcgtgtaccgctttgttggtaaacgtaatggccagaatattgcggtaggcatcgggttttttggataggagtatgatttttaaatactctttcaccaaagtataggttttgcctgatccggcggaagcgtcgtatatggagaaagcaggtttttgcatgatggtattttttatatcatttggatggaaatgcttcgcgagttatttcgtagataaagttcaattttgaatcttcgccgtaatattctacttcaaattcatccacttttacggcgccgatttttgctatggctttttgggaacgaatattacccgcaccaatgtgaaaatacactttgtcaacaaacagaaaagcgtattcgagcatcaattttttgagagcattgttgtaatcattgccccaaaattggcgtccgataaaagtgtagccaattaaaaccgatttttctttttcgttgtaatcataaaaacggctgcaaccgacaatttctttagtggctttgtcccgaattaaaaaagcgccttgcgacagcaatgcaccttcgaaaaagttttgaaatacttcgcgttggtagcgcaatttattaggatgttgctcccaaaccaacggatcagaagccacaacatataaatcttcaaaatcttcttccttgagcggaaaaagcgctataagttcgttttgcagatgttgtggttgccagtttaaagtcatggttagcagttggttttatagccccgattgtcccgaattttcgggagaaatcctttttgacttgccgagggtttcggcccttggtaagttaaaaagattgtaatggaaagcgggaaacagctcttgataaaaatatcgattttaattatttgttaattggtaaatagtattttatcttccgaagataaatgtataaatttgaattcattttaatactaacttaaattaaaaatatcatggcttttgaattaccaaaattaccctatgcatacgatgccttagaaccacatatcgacgccagaacgatggaaatccatcattctaaacaccacaatgcttatgtgaccaatttgaatgcggctatcgccggcaccgatatggaaggcaaaaccatcgaaaacatattgattaatttagacatgaccaatatggcggttcgcaataatggtggtggtcactataatcacaatttgttttggaaagtaatgtcgcctgatggtggcggaaaaccaaccggtgaattagcagcagctattgatgcggcttttgggtcgtttgacgaatttaaaacacagtttgccaaagccggagcaactcgtttcgggtcaggctgggcttggttgtgtgtgcataaaggtgggaaggtggaagtgtgttcaacaccaaaccaagacaatccgttgatgccggatacagcttgtggcggtttccctattttaggaatggatgtttgggaacatgcttattacttgcactatcaaaaccgtcgtccggattatattgaagcgttctttaatgtaatcaactggacagaggtagctcgtttgtacgctacagaaaaataaaatcgatttttttcggaaagaatcaagccgatttcgctaatcaagcggaatcggtttttttgtttggtgcagggataaaaaataaacaggcggaattgcttccacctgtttgccccaaatctaccataaacttaacctacactaaatactatggtaacgcaaatctaataacatcttaattaaaattgcgctttttttgttaaaatatattggaatgataggcaaatgagagtgaaaaccgccttttggatgatttttaggtggttgtaaaataaaaaaggtgaagaaaaacttcaccctttttgccccaaatctaccataaacttaacctactaatgctatggtggaacaaatataatgtggttaatgttgtttaagaaaaataatcagatgaactacaagtaaaaccgttgaaatcttttcgggctgtttttcaagaaggtataaaataaaaaaggtgaagaaaaacttcaccctttttgccccaaatctaccataaacttaacctactaatgctatggtggaacaaatataatgtggttggtatagtttaaaaaaaataatcagatgaactacaagtaaaatcgttgaaatcttttcgggctgtttttcaggaaggtataaaataaaaaaggtgaaaatttcttttcaccctttttgccccaaatctaccataaacttaacctactaatgctatggtaaagtcaaatgtaagcggattgctatttttgaaacaaaaaattcagacgaaatgcaacaaaaatcgtttaatgacaaaaaatgttaaaattttagtaagcacgggcgtctttaccctcataaaaattcataaatgctctgttaaccacacggttaccacccggagttggatagtctcccgtaaagtaccaatcgcctaaatttttaggacaagccaagtgtaagttatcaacggtttggaatataatctttacttcggcattaatgtcgcccggatgaagtaactctgctattttgtttgatatttcagtgtcactgaaaggcgcatagatttcgttgacataatttattacatcatcatcttttaatttctcttgcgatttgcattttttgtaaacctcgtctacaattttatacagatttctttcttttaataattctattgccgcttgaaaagcgattaagccttctaatttggccatgtcaataccgtaacaatccggataacgaatttgcggagccgatgaaaccacgactatgcgtttcggattcaaacggtccatcattcgaaggatgctttttttcaaagtagtgccgcgaacgatactatcgtcaataattactaaattatcagaaggttggattactccgtaagttacatcgtaaacgtgtgctaccaaatcgtctctgctgctgtcctcggtaatgaacgttcgtagtttcgcgtctttaatggcgattttttctgttcgaattttaaccgatagtatttcttccagtttttccttagtcagcgttttgcggttgtctaaaatgaattgattttttctgtggttcaggaaatcattagccgcttcaatcatgccgtaaaaggaagtttcggctgtgtttggtatgaaagagaaaacggtattgtcggtatcatcttcgatagcttctaaaacggccggtaagattaacttgcccagttcttttctttcttggtaaatttcagcatcactaccgcgtgagaaatagatgcgctcaaaagaacacgcttttttaatgcttggagtgatgatttcctgttgcgatacggtcccgttttttttgatgataagcgcatttccgggctgtaactcctgtacttcttcaaaaggcacattaaaagaggtttggattaccggtctttctgaagctactactacaatttcttcatcttcataaaagtaagccggtcgaattccggccggatcgcgaaacacaaaactgtcgccgtgacctaacaatccggccatggcatagccgccgtcccaacctttggaggcgcgttttaaaattttggcaatatcgagtttttcggcaattaccggagaggcttctcttttagacaggccgttgtttttacattcttgatacaaatcggttacttcatcgtcgaggaaatgaccaattttttccattacggttacggtgtcggctaattcttttgggtgctgacccaattcgaccaaactattgaatagttcggttacattggtcatgttgaaatttccggctacaattaggtttcggtgcatccaattgttttgacgtaaaaaaggatgtacactttcgatgctgtttttgccgaaagtgccatagcgaacgtgtcctaaaaatagctcacctatataaggtagattttctttttgtaaggcaacgttgtcttggtattccggatgcaactccaattcttcattaatccggtcgttgatttgatcaaagatgtcttgtatgggttgcgctttgttcgagcgtaccctgctgatgtaacgttctcctggttctacatcgaatttaatagaggcaaatccggcgccgtcttgtccgcggttgtgttgcttttccatcagcaaatacattttttgtatgccgtaaaaagccgaaccatatttttctttgtaaaaagctaacggtttctttaatcgtaaaagggcaattccacattcgtgtttaatggcgtcgctcataggttgttgtgttgttgtaagttgtatgttaagggtatttaaaaacaaaaatgccccgaaatttcgaggcataaagttattgtaaatctatttcaaattgtgttaaagctttgaattgtttcaagcgcttgttcacttcttctttggttagttcgagcattctttcggttccgaatttctctacacagaaagacgctaagttagagccttgaatgatagccgttttcatcgtttcaaaagagatgtcaccttgttgcgtgataaaacctgcaaaacctcctgcaaaagtatcaccggcaccggttggatcatacacatcagctaatggtaaagccggagcaaagaaaatgtgttcgttgtggaaaattaacgcaccgtgttctccttttttaatcaccacgtattttggacccatagtgtggattttagccgctgctttcactaacgaatattcacccgacaattgacgtgcttcttcgtcgttaatagtaattacatctacgcgtttgattacgtctaataattccggtaaagcacaatccatccaaaaattcatagtgtctaaaaccactaatttcggcttttgagtcatttggtttaatacgccggtttgtacaatagggtgtaagttgcccaacattactacatcggcatctttaaaatgattcggcacaatcggattgaaatcggccaatacatttaactcggtggtcaatgtatctcttgaattcatatcattgtggtatttaccactccagaaaaacgttttgccttcttttacgatttccaaacctgaaatgtcaatatttctggccgttagtaaatctaaatattcttgaggaaaatcgccgccaactaccgacacgatagccgattgtaagttgaagtgcgatgcagacaatccgataaaagtaccggcgccgcctaaaattttatctgtttttccgaaaggagtttcaatagcatcaaaagctactgttcctactataagtaatttgttcattcttagggtttcaaattaaaggcgcaaagatacagttttagtttaaaagtttaaaatggtttcaagcttaaaaaagctttccttcttctcgctcataaaaagcatccaccgaaagtttttccaaacccgaagcataaaccgctaattcatcacagcgttcgttttgcggatggttgttgtggcctttaatccatttgaagtcgacttggtgttggcgatacacttttaagaatcgcatccacaaatcaggattttttttgcctttaaatccggttttttcccaaccaaaaacccattttttctcaacggcatcaaccacatatttggaatcggaaacgaccaagactttcatgttgggatttttgagtttttcaagtcctacaatcacggctaataattccatacgattgttggtagtatgtcgaaatccttcataaaactctttgcgatagggtgtgccaaccatttccatgactacgccgtaaccgccgtttccgggatttcctttggcagcgccgtcggtgtagatgtggacttggtgtggcattaagattttttagataggttagaccttattagactgtttggattaattatgcttttagaagacttactttttttctaagaagtctaaggtagtctaattatctaacaatctttctattgttttcggaaaatataggtgttccaattcgtgtattttggcagcgatttcctccggagtttcgcatttttcaatgttgatggaagtttggaaaataaattcgccttcgtcgtaatgttcgttcacgtaatgaatggtgatacccgtttctttgtctttattttctaaaacggttttgtgtacgttcataccatacatgcctttaccaccgtatttaggtaataaggccggatgaacattgattattttatgaggaaattcagcaataatgtgttccgggaatttcaataaaaatcccgccaatacaattaaatccggttgtattgattgcagtttttgtaaaaccaagtcgctttccaaatcacttttggtaaaaacaaaagaggcaacgttgtggtttttggctttttccaatactttggcttgcgtattatttgaaaacactccggctacagcaatcagcttactatttttaaaatgctgaatgatattttcaacattagaaccgtttcctgaggcgaacagcacaatttttttcattagtcgggcctgaaattagagtacaaaaaaaagaataattgcgctattttgaggtataaaaaagtaagattttgaaattatttttttactttcgtagttatatttagtaacaaaaaggttgttataaaataaagttttttatttttgccaacaatttaaattaaaaatctagaaattatgtcagacattgcatcaagagttaaagcgattattgtagacaaattaggcgttgacgaaaacgaagttgtaactgaagcaagcttcaccaatgatttaggcgctgattcattagacactgttgagttgatcatggaattcgaaaaagaatttgatattcaaatcccggacgatcaagctgaaaacattgctactgtaggtcaagctatttcttacatcgaagaagctaaaaaataataaataaaacacccgtgaagaatctttatttttcgcgggtttttattatttttactgaaaagattaaacttgattgatattcaatcttaaaaatattgaaatacccctgtctctttaatgatcaatttgaagaaaacatgggtattatttgtttaaatacaattgtaaagaacatattatggcattaaagcgagttgtagtaacaggtttaggggcgttgacacccatagggaattccatcgaagaatattgggatgctttggtaaatgggaaaagcggtgcagcacccatcacctattatgataccgaaaaacacaaaacaaaatttgcctgcgaagtaaaaaatttcaatatcgagaattacattgatagaaaagaagctcgcagaatggataaatttgcccaatatgccattgctgccagcgaagaagctattaaagacgccggaattaccaaagagaacgtaaataaacaccgtgttggggtaatttggggtgccggaattggcggattggagactttccaagaagaggtaatgagttatgcggccggagatggaacgccaagattcaaccctttctttatcccgaaaatgattgccgatattgctcctgctcatatttccatgagaaatggctttatgggacctaattacaccacggtttctgcttgtgcttcatcggccaatgctttaatagatgctttcaactacatccgtttaggaatgtgtgatgtgatcatctcaggtggctcagaagctgcagttaccatcgccggtatgggcggattcaactccatgcaagccttatctaccagaaacgatagtccggaaactgcttcaagaccttttgatgctacgcgtgacggctttgttttaggagaaggcgccggagctttagtattggaagaatatgagcacgcgaaagctcgtggtgctaaaatatattgtgaagtaggcggtggcggaatgtcatcagatgcctatcacttaaccgctccgcatccggaaggcataggggtaattgccgttatggaaaacaccttacgagatgccggaatgacacctgagcaagtagatcacatcaatacacacggaacatcaacaccgttgggtgatgtggccgaattgaaagcgatcagtgctgttttcggtagtcatgctaaaaacatcaacatcaattcgaccaagtctatgaccggacacttgcttggggcagccggtgcgattgaagccattgcttcaattttagccatgaaacacggtattgttccgcctaccattaaccacacagtgatggatgagaatatcgatccttctttgaacttaacattgaacaaagctcaaaaaagagaagttaatgttgccatgagcaatactttcggtttcggaggtcacaatgcttgtgtgttattcaaaaaaatacaagactaagtttaggatgaaaattctaaaaaatatattcaaaaattcccgttcatcatctgaggacgggattttttttactgaaattgaaaaagttatcggattcaaaccgcaatctattcagtactatcaaaaagcctttacccatcggtctaccaaccgcaccgatttaaaaggaaaccctatgaattacgagcgtttggagtttttaggtgatgcgatgttgagcgctgttattgctgcgtatctctacaacgaagcgcccgccggagatgaaggttatctgaccaaaatgcgctctaaaattgtgagtcgagaacacttgaacgagttgggaagagatttaaatttgattcggtttgtggaaagtaaagtgccgacgcaacattttggcgaaaacatacacggtaatatatttgaagccttagttggcgctatttttttagataaaggctacgatttttgtcagaagtttatccaaaaaagtgtcatagctccttatgtagatatagcccgattggaaggcaaagtcatcagttacaaaagtcttttaatcgaatggtgtcaaaaagagaaaaagtcttttcattacgatgtttttgatgataacggtaacgatgggcaaaaattctttggcgttaaattaagcatcgacaataaagttgttgccaaagccagagcaacttctaaaaagaaagcagaagaaaaagcgtctcaaagggcttattttgcatttcaagaaaaaattaacaaaaaataatgcggattcttaaaaagctataacgttttcgttcataaaataacgttaacacaaactttacttgctgaaaatctgtcgcagatgcactatatttacaacttaaattgcaatctttatgtttgttcacaaattgcatattgcagagtttgacaagatagattatcagttaattgctattcattcccctttagaagattatcgattggcttactttatcaacaagcatttgcctatcaatctcaaaaagtgccacaacaacatacagatcagcaataaagaaggcgaaacgcaatttacccgatttatttttgaagaccatcaagacgttgcttggagtttgattcaaaaccaaaacgatgcgatagtttcggctccgtccaacaattttgggttatttgcagaaagcagcactgagtttgcacccaaaatttacttgattccggagtttaagaaggtcgattatttttttaaaattgagaacgatgaggtgtcgatagacctgccgaacatcattaactgtctcaaaaaaatagacaaaataagcaccgtttacaccgtagacgtagccaatataaaatcaaagaacaatttaattttttaagtataatgccaacaaaaaagaaaactaaaattgtagccacattagggcctgcatgcagttcgaaagaagtaattaagaagatgattgatgccggagtgaatgtatttcgtatcaatttttcccatgctgattataccgacgtaaaagaaagaatagatatcatccgagaattgaatgatgaatatggttacaccactgccattttagccgatttgcaaggtcctaaacttcgcgttggtgtgatgaaggaagatgtagtagtgaatccgggcgacatcatcacgtttcaaaccgccgaagatgttccgggtactaaagagcgtgtgtacatgaactatttgtctttcccgcaggatgttaatccgggagagcgcattttgttggacgacggaaagttaattttcgaagccttggaaaccaacggtacgaccgaagtggtttgtaaagttattcaaggcggaccgttaaaatctaaaaaaggagtcaacctgccgcaaaccaaagtatcattacctgcgttgaccaaaaaagacattaaggatgcgcttttcgctattgagcaagaagtggattggattgcactttcttttgtgagaactcccaaagatttagaagaattacaagatttgattgccaaacattcggcctataaaattccgattgtagccaaaattgaaaaaccggaagcagtagaaaacatcgataagattgtagctttctgcgacggattaatggtcgctcgaggtgatcttggtgtagaaattccggcccacgaagtaccgttgattcagaaaaaattaatccaccgcgccaaaaccgctcgtattcctgtaattgtagctacgcaaatgatggaaacgatgattaccagtttaacgccaacgcgagctgaggtaaacgacgtagccaactcggttatggatggagccgatgccgtaatgttgtcgggggaaacttcagtcggaaattatccggtagaagtgattgaaaaaatgacacaaattatcgaagccgttgaagattcgcctttaattgttgtgccgcaaaatccacctcacgttagaaccaagcgatttattaccaaatctatttgttatcacgcggcgactatggccaatgacatcaaagccaaagccatttcaaccttaaccaatagtggttataccgcgtttcaaatttctgcttggcgtcctaaagcacacgttttagtgtatacttcgaacaagcgaattttaacgcagctcaatttactttggggagtgaatgctttttattacgataaatttgtcagcaccgatgataccgtagacgatatcaaccaaatggctaaagacaaagcatatgtgaaaaaaggtgatatgatgattaatcttgccgcaatgccggtggccgataaaggaatggtaaataccttaagggtttcagaaattgaataaatttagtattttagccacagacatctttaaaaagaaataaaatgaattcaaacaatccgtttttcaaaaccaaatcattcaccgaaaacaatgaaacggtgcacgaagccgtagtgattgattacaataacaccatgactgtttcaggaaccatcaacaagagtttcctgatgctaattcttttaatcgccagtgcttccatcacttggatgatgacattgagcgggcaaaacccggtagtgttaaccatcggtggtgctattgttggatttgtgttggtgttaattgccgtatttaaaccgcaatattctacctttttagctcctggttacgccattttcgaaggattgttcattggtggcctttcagccatttttgaagtaatgtatcccggaattgtaatccaagcggtgagttgtactttcgtgactttcatggtttgcttcggtttgtacaaatatggagtagtgaaagttaatgacaaattcagatctgttgttgtagccgctactttagccattgccacttattatttaatctcgtggttgttgtcgatgttcaccagttttactccaattcaccacggcaattctatgatcagtattggtattagtgcgtttgtaattgtaatcgcagctttgaatttgttcttagattttgaccaaattgaaaaaggcgctcaagaaagaatgccgaaatacatggaatggtacggtgctatgggcttaatgattaccttagtttggttgtatgttgaattcttgagactattatccaaattatcaagcagagattaaggcttgtcttataaaaatcaaaaccagctttctggctggtttttttttgcttaaaactcaaacttcaactgcaccacaaccgtctttttaatttcggtatttaagttattcaacgaaatgcccaacaatcgcaccgattccttcatccgttcttgaaataaaagctctttagcggtttcgagaagcaatcctttatcggcaataaagtaaggcaaggtcttactgcgagtttgggtcgtaaaatcgctgtatttgatttttagggttacggtttttccggaaatgttgtatttcttcaatcggttttccagttcggccgctatgcgttccaacttttctaccataaaaatttccgaagtcaggttctcgttaaaagtatgttccgcggccaccgattttgcaatccgattgggttttacggcactgttgtgaataccgcgaacaatatggtaaaaatgcaaaccgcttttgctgaaatgctcctccaaaaattctttcgatttcgacttcaaatctttaccggtaaaaatccccaaatggtacattctttcggtggtgactttgccgataccatagaattttttgatgtcgaggttttccaaaaaagattccacttcttccggattcacagttttttgcccgttgggtttgttgtaatcgctggcaattttggccacaaatttattcaccgaaattccggcagaagctgtcaaaccgacttcttcaaaaatgcgttgtctgatttcctgagcgattaaagaggcgctcggattgccttttttattctgagtaacatccaaataggcttcgtccaacgatagcggttcgactaaatcggtgtattcgtgaaagattttgcgaatctttttggagatttctttgtagcggtcgaatcgagggcgaacaaaaatcaaatccggacaattgcgcttggcttgaatgccactcatggccgaacgaacaccaaattttcgtgcttcataacttgccgccgaaaccacaccacgaacttcgctgccgccaacggctaaaggtttgcctttgagctcgggattgtccatttgttccaccgaagcgtaaaaagcatccatatcgatgtgtatgatttttcgataagttacctcggcttccattttacttgtcttttaccggaaagaaaaaagcggtcggacgcgttttgaaatacgcccaagtagcgctgaataacagttttaactccgaaagcggaatattacgggaacggaaagccaatcctaacgacaacgaaaaactaacgatgaagttcacaaagccaatcaacccgattccgataattccccaaataattgttggccaatccacaaaaaaatcagcaccgtacaagcccaaagcaaagtttccggcggcaaaggtaatgtggcgaatatcgagattcagtccgagaaaaatgcccaacgaagccgtactgcccaaaaacacgccaaaccaaccgttggaaactacacctggccagtgattttcaaaccatttggcaatagcattggttttgacaatccctaaattttgttttaaaaccggatgttctttgattcgatagtaaacttgattgtgtttgttcctattcgatacattccccgaaataatgccggagagaaacaaaaacacaccggcaatagcggcatgaaataaagctgccgaatgcaccggagacaaatcgtataacagtttcgacgatttttcaaaggcaatattgtagtccaataaataatcaatgagccaaatgcctaacatggctaggggaaaggccataaaaacattgcccacaaaggcgataaattgcgaacgaaacaaacgggcaaatagttgggcaaacgaaccgtgtttgttttccgaatgactttgttttttcatcccgctttctaaagcttttatcaaggttgcagctgtcatagccggttgtttcgtagccaaagtgtaacccattaaatagatagctataaaacccaatgaataattcaaactataataaaaggcatgaccaaaagcgctggtttctatcttggaaaacaatattttaaggatacacaaaatcccaacaatgaatccaccgccaaccgctgctttgaacatggaaaaatattcggagcgactttcagtaatgtaatgttctccggttttggctgtatgttgagtgatttcataggaaatcaattgggtgctttcgttgattaactggcggacattgttcttttgacagttgtatttaatcagtcttagcaacagtaaaatggaattattttttttgtctgaaggtttgttaacgactaaagtagaaatcaagactttcattcggtgcaactgttgtcggatgcggagcaaactctgatttactttcaatgaaatgccgaatttcgagctgttaccgaaagctttatcgacatattcctcgcattgtttgtgcaggataatcagttgcttgtagtttaaatcttctgaaacaatataatgtggttcgctatttctgattttggccaaaatactgttcaattcgttttcaaacgctacaaacggactttccaaatcatcgtattcgggcaccattttaatcacatcggtttccatggctcgcccgctcattctttgcgaaattaaacccatagcgttcatgacttcggccaaaaccgattgttcggccaccgattcgtaaatggactcaacagcaatacagtcaaacagttgttgcaattcttcaaacggaatacgggctatccaaatcggatcagaacttttaaaaaacacttgattcaacacaaattccaaagtgtctttttccggttggaaaggcaaaattttggcaaagattcgttttttgacttcataagtaaagtcggaatcccttaaaattccggtgtcggaaagcattctgccgaattttctttgcgaaagcgcttcacccaaatacagtttgaattgcgccgccatatccggatttgtttctaaatactctaacagtggcttaatactaaccacattctcatttttgggataatcaggacgaaaaaaacgaactaaatccaccaaaaaaagcaaacggtcattagattgataaccgttttggtcgaagtacaacctaaataaatcggttaaagttgtaattggtgttttattgcggtacaatttcatcccaagaaggttaggcggttaagattcttgtaaaaatacaattttcaaggtatatatttcttaacttgctcctaaatatgactcaaaaaatgatagaaatagagcgtaaatttttagtcctttcgaacgattttatcaacgagtccttctcgcaaaagcgcattgtacaaggctatttgagttctaatccggaaagaactgtacgagtgagaattaaaggcgataaagggtatttgaccatcaaaggcaaaagcagcgctaacggtacaacgcgtttggaatgggaaagggaaatcagtctgatggatgccgaaaccttgctcaccatatgcgaaagcggtattattgataaagttagatatgaagtcaaagtcggacatcacgtgtatgaagtcgatattttctcaggcgaaaacgacggattggtaatggccgagattgaattggaatcggaaacggaaacttttgaaaaacccaaatggttgggcgaagaagtaaccaacgatgaacgctattacaacgcctacttgagtaaaaatccttttacctgctggtagttatttaggttcttctactacttcaatttttacaattaccgaacctgaatttttattggaaacgatatccataaaagctcttttggtcaaatcgatttcacggactttagaaaacggaccgcgatcggtaatttctacgataacgaattttccgttggcttcgttggtgacttttaccaaagtaccaaatggtaattttttgtgagcagcagtgtatttgttattgtcaaaacgtttgccactggcggttcttctaccgttgaatttatggtgataataggaagcgtgagcgttttttttgtagattttcagctttgaattgggatcaatttgaagcgtatcagtttctttcaccattggaatttctttcactactactgtgtcggttttagccgttgctacagtttttattttgtcctttgggtctttgatttccttaggatctttactgtctttggccggagtagttttctctttgttcttgtcttttggcttttccttttgctgcggatttcccgaagaaaatgccagcaaagcaaaagtcatcaagactaataaaaatgagtttattttggtattcatacagaatcttttagttgataaatcggttttacaaaaaccgtacctgataaaaaaagtccttttcaggactttagttatttttttagaaccataatttccatggaattcgacttaaaataagcagtaatcctatgccatagaaaatggcaatcgatttgaattttgccgttccggtttccccttttttgtgtttcgaccaaccaatggtgattaatacaatagcgataatgttaattaacggatgttctaaagaggttaatctggcatcggcatctttcatttcccccaataaggcgtgacctagcggagaaacaaaatataaaatcaagccaaccaataattgtatatgcgctccgattaatccaaacaaagcaatttttcggtctttagccgtaaattcttttttagaagacatgcccaaaaaggaattaacaacagcgaaaaccaacaataataaagctaaataagcccaacctgagtggaatttttgaatgaaattgtccatagtttttgttttagaaaaacaaatatagacaaaaggcataaaaaaacctcacgaattagtgaggttttaggttctgtttaccctatttgtttttcaaaaaatgctttagtaagaattcggttgaattgtcgtggtttttaacggttcccgaatggatttcgtctaagatagagttggccaattgtttccctaactcaacaccccattggtcgtaactgaaaatattccagattacgccttgtacaaaaatcttatgttcgtataaagcaattaatgatcctaatgattttggcgttagcttgtcgattaaaatggtgttggtgggtttattaccggtaaacactttaaacggtagaagatattctgctttagcacctgtgatgttttgtttttcaaattcggctctaacctgactttcggttttgccgttgagtaaagcttcggtttgggcgaagaagttcgacatcaatttattgtgatggtcttcgttgccgtacaacggttttacaaatccgataaaatcagtcggaattaatttggtgccttggtgaattaattggaaaaaggcatgttgtgagttggttcccggttcgccccaaataatggttccggtttggtaattgaccggtttaccattgcgacctacactttttccgttgctttccatgatgccttgttgtaagtagggcgctaatttttgaaggtattgagtgtacggaatcaaggcttcgctttcggcaccgaaaaagttgttgtaccaaatggttaaaagcgctaaaataaccggtatgtttttgtcgaaagactcctttttgaaatgattgtccatttcgtgagcgccggctaacagttcgtcaaaatgctcgaatccaacggctaagctgatggataatccaacggcactccaaagcgaaaaacgtccgccaacccaatcccacatagggaaaatattgtcgggattaatgccaaattctgttactttttgaatgttagtggaaaccgctacgaagtgtttagctacatcttcttgtttggctgattgtaaaaaccaagcacgaatagtttccgcatttgacaaggtttcttgcgtggtaaacgttttggaagcgatgacgaaaagggtcgtttccggattcagttttttgatgatttcgttcacgtgatcgccgtcaacattggaaacaaaatgaacgttcaaatggtttttgtagaattgcaacgcttccaccaccatagccggaccaaggtcggaaccaccaataccgatattcactacatcggtaaacggttttccggtgaatccttttcgttctcccgaaattacttcgttggagaacgctttgattttatgtttaacagcaaaaacttcaggtattacgttttctccgtctaccaaaacaacttggttttcaggcgaacgcaaagcggtgtgaagtacggctctgttttcggtttgattgatggcatcgcccttaaaatattggctaatggcttcttgaagttgtacttccttagccaaatccaatagtaagttgatggtctcttggttgagtatgtttttagaataatcgactaaaaaatcctgccattggatatgaaatttttccgctctttgcgaatcgttggaaaacatttccttcaaggaattgttgctgatttgtgcatgatgttgggtgagtttttcccaagctcccgtaactgtcggattgatttgtgctaatgccatttttttacatttgaagcacaaatttacaaatatagattgtaaaaaaatacgaggccttttacgctaacgttgtagtaagcaaaaaaatataaattatcttctgaatttgagttcggcggtgctgtccaatacctttttgagcggtttaatttgctccaaaaattgttgtttgtatttggcttccattggagtagaggtaggcaattttaaacgcaaagcatctacttgtaagccgtttttccaaaagcgataacacacatgtggtccggtagctaaaccggtactgcccacttttccgataatttgtccttgggtaactctttggccgcgttttaccaaaattttagacatgtgtaagtattgtgtcgaataggttcgatcgtgttttactttaacaaaattcccgtttccggtcgtataaccggcttgttctacaaccccggctgcggtagtcatgataggcgttccggttggcgccgcataatctgttccgttgtgggctttccatcttttttgaaccggatggaatcggcttttggaataacgcgaagtaatgttgacaaactttaaaggcgctttcaagaaaaagtttttaagcgttttcccttcttcgtcgaagtattgttgctttttggaactgccgtcgggagagaaaggaaaggcgtatatttttttgcctttgtattcaaagaaggaagcctttaaactgtcgacaccatcataaactgtgtcgttgatgtagcgttcagtgaaggtcaatccgaatttatcgcctttttggagtttgaagaagtcgatggaccaagcatagattttggcaattttagccgctaatgcaggatctactttttcgttggccaaggtttcggacaaggaaccgtttaaagcgcctgcaatagttcgggttttgaacgttaaaggtcgcgttttttggtaggctgtaaccgaatctctcaaatcaatcacatagtagtttattttatccggttggtagatgaaatactgaattttgtgggttctgtttttgcttctcaagatggtgtaaggcttcccaattcggatggatcttacatcaaaagtatcttttacttgggcaacaatatcataaacttgtttaccgttaaggttttgtttttggagtaggcttccgaaagtatcacctgattttacagtatcgtttactacgttaaaatcgtgcaggttaaaaccaaaatcaattaacttaggttttggcttttcttccacaaagtcttcttcttttgattggtcacaagaaaccacaaaagaagtgagcataagcactgcaaagacaattcgaaagatatttaacttcatattacaatccttctccccagttttttaattcttcttcagaccataattccggaaaaaagatgcggcgttggtatttcggatgcatgtattttttccaatcgcttccgccggtggcttctccggaaccttgtccgctttcgatgtattttttggcggcattcaaatgacccattacccaagtgatattcacagtgtaatcgtaatggcgcatggctttaaccaattcaggattttgttggtcttctcccggaagttgtttgaatttttgccagatgttgatggtattgtactcttccatgtatcgaaggaattcctcgcggtattttctttcgaattctaaaatcagatacgacttttcgccggtttggtaatcttttccggccgcttgccaatacaagtgttcgaacgcgtgagagtaaggcgtgtttctgtcgatggtagctcggaagcgataatcgattaagttgattaaatcggtcgaagagaattcaattaagcggtattgtgcactttgaaaaccgctggccggcgtaagtgtgttgcggaatttcatgtattgtgctacttccattccgtctcccatgatgtcaaacgaagtggtcaacatgtcgaaatagcggctgattcttcgtagtttttccgtaaaaaatgcagtttccggtttttcagtatgacacaattgtttgatttcccatagtatcattttgaacaacaactcattaacttgatggtatatgataaataccatttcgtcgggtaataccgttctttgtgtttgcaaattcagcaaggcatcagtttggatgtagtcccaataagtaatgggtttggcccaaagtaagccttcgagatgggtttcggttttttgatttatggcctcaaacttttcttctaaatcggagagaacttcgtggtagtttgttgttttgttgttcattattttttcaatttcaccataaacggatttttgagtcctttgaatccttctaaatcggctttaagagaaccaacagccaaactggctttaatgcgcaatggtattttgttttcatcatcggatatccagacggttagactttcttcttctttaaaaacccttccggattgaaccaaaggtctgaatatcatggtttgtgcggtaccaaatttagtttttaattcttctctgcccaagaactttaatttgaatttataaatttcatcatcaaaaaacatatctactacaatggattctcccggtttgagtttgtcgatattcggatggtttctaaggaaatagaacgttgaaacgatatcttgtacattctcggtaaccggaaatgttttctcggtattgttcttatagtttttaactaagattttgttgctcgcctgattgaagaatccttcctgatttttggtgtaaccgccttcgtcaatttttctaacaaattggtaaggtttgttggtggctttatcaaagtagctttcataattgtcgtctactttaaagaaaaaacgcgacattccgacagtatatcctttgccaacggcgtggtacacttttttgttgtcgcgaacggcttcttttagctccagagttgcgtatccggcattgataaagccatagtggattcggaatttgaaccattcaccagtatcataagcttccggtttttgggtattgaaactcacagtaataaaaagcaataacaggaataagtattttttcatttcgaattgaattttatactgcgattacaatatctgttccaaaagtattaaaacaaaaaaacccagtcaaattaatgactgagtttttatgctattaaccaaccaaaaaactataaattatgaaaatttatccaaaatgcgagggaaccacccctctatttttgttctgcaaagataacccaaggcgttgcgacattacaagcaaaaagttaactttaacaataatttaataaaatatagtattttttcggtcttatttttaaattatttttaacaaaatgaaagatttataatgttcctcgtaacatttgctctctttcaatagattcaaataaagctttgaagtttccggcgccaaaacctctggcacccattctttggatgatttcaaaaaataaagttggtcggtcttctaccggacgggtaaagatttgcaataagtaaccttcctcgtctgcatcaatcatgattcctaatttttgtaattcgttgatgtcttctttgaatttattcatgtgatcttttaatcgttccgggatagcatcatagtaggcttgtggcggcgtagttaaaaactctataccacgcgctctcatttcggctacggttttgataatatcatcagtggccacagcaatgtgttgcactccggcgccttcgtaaaaatctaagtattcttcaatttgcgattttttcttgccttcggccggttcgttgatagggaatttgattcttccgttgccgttgctcattactttcgacatcaaagcagaatattctgtggtgatttgtttgtcgtcgaatgaaaggaagtttacaaatcccattacatcttcgtaccattttacccaagtgttcatctcgttccaacctacattgcccaccatatggtctacatatttcaaaccaacaggcgtcggattgtagtcggatttccattcttggtaacccggtaggaaagtcccattgtagtttttgcgttctacaaacatgtgtacggtttcgccgtaagtgtaaattccggcacgaactacttcaccgtgttcgtctttttcaacggtcggttccatgtatactttggcgcctcttttggtagtttcttcaaaggccgcacgagcatcttcaacccatagggcaatgacttttacaccatcaccgtgtttttttacatgttctccgataggggaatcactgtttaaggcagtggttaaaaccaagcgaattttgtcctgctttaatacataagaagctctgtctctcatccctgtttccaatccggcataggcatgagattggaatccgaaagctgttttgtagaaatgggccgcttgtttagcatttccaacataaaattctacataatctgtacccaatagcggaaggaagtcttgtgctccttcaaatattttttctaaaccgtattcaacggatttgatatcttgtgacatagtattgtgtttttaataaggtaatatagttttacctaaagttgtgtttgtttttattctaaccaggattggtaatatttatcatcagcgattttcatggcttcttctgttaccattaaaggtttgaaggtgtctaccataacggctaattcctgagtttcttttttaccgatacttctttcgacagctccaggatgcggaccatgcgggattccggccgggtgaagcgaaatgtgtccggcttcaatatcatttcggctcatgaaatctccgtcaacatagtacaatacttcatcagaatcgatattgctgtggttgtaaggtgctggaatagcttccggatggtaatcgtacaaacgcggtacaaacgagcaaactacgaaagcatcggtttcaaaagtttggtgcaccggaggcggttggtggattcttccggttagtggttcaaaatcgtgaatagaaaaagcgtacggatagttgtagccgtcgtatccgatgacatcgaaaggatgtgtggcataaaccatgtcgaaaatttcgtcttttttcttcactttgatgacaaactcgcctttttcgtcataggtttccagttcgtatgggcgacgaatatcgcgttcacaaaaaggagaatgttctaacaattgtccgaaccagtttctataacgtttcggagtgtaaatagggcgatgtgattctacgatgaacaagcggttgtcttcggtatcaaaatccattttgtaaatgataccacgaggaatgatcaaataatcgccgtatttgaaatcgatattccccaacatggttctcaattttccggaacctttgtggatgaaaatcatctcatctgaatcggtgtttttataaaaataatcagtagtcgattgttttggtgcggccaaaacgatatgacaatccgagttggttaagacgattttacggctttccaaaaagtcgttttcaggatttacttgaaatccgcgaaggcgataggattggatgttgttggccttggcaattttgggtgccacgctgtattggtttctgatttcttttacttgcgtcggacggtgctcgtgataggagttggtcgacattccgtcaaagcctactgtaccgaacaactgctcgtaatacaaatcgccattaggtttgcgaaaaatggtatgtcttttaggaggaatatttcctaatttatgatataatggcatattattttatggtttaattaaacaatgtgaaaatgtagcaatgggtctattgttacactgaataattgatgcattttcctgactcattcaggatttctcttgatgaggaattttaaatacgctaataaaccttgccacgtcacagtcatagttcaaaaactaattgttttttaaatttttaccgacaatgattcccatgccgaaagcggcaataatggctaaaattatgatcataaaatgattttttactacacaaatatctgaaaaaaaaatccaaattctttttctgaatttggatttcttttattaaagttggttgaggtttgattttctcttactgtagaggaagtaaacggtgattccgatgattccccaaacgatgaatgcaatccaagtttcttttcgtacaaagtacatcaaaaacaaattgaaagctactcctaaagttcctactaagtaaactgccggagttttataaggtctttccaattccggttttttcactcttaaaatcattaccgctacacaaaccatggcaaaagctagtaaagttcccatagaacacatttcgcttaccttgttaattggtgtcaaagccgccacaatggaaatgataccacctactaatattgtgcttttgtgtggagttttaaaagtaggatgtaaggttttgaagaagttaggcaacaaaccgtctttggccattcctaagaagattctggtttgtcccaacatcattaccaacattacgctggtcaatccggcagtagctgcaagggtaatgatgaacacggcccaagtaattccgttttcactgaaagcagaagctaccggagctgatttgtccaattgctcataaggtaccataccggttaatactaatgaaaccaaaatgtacaatacagtacagatgattagtgaagctacaattgcaaacggcacatcttttttagggttaatggcttcaccggcttgggtagaaacggcatcaaatccgatatatgcaaagaacactatagttgcggctgttaaaacgcctccaaaaccaaagcttactttttcaacgccgtcaatgattacagttttttcagtcgggataaatggttgccagttggcagtgtctatgtaaaaggcaccggcaataatcacaaacaaaaccacagcgactttaatgattacaatgatattgttcgtttttgccgcttctttaatgcctttcaccaaaatataagttaccaaccaagtaattaaaaaagcgggtaaattaaaggcaaagctcggtgcgccttgtcctaattcggcgtatttttcggtggcggttgtaatgtcgttgcacaaccaaatcgggaaatcaatcccaaacaaatggagcagtttgacaaagtagccgctccatgctactgctacagtggtagcgcccatcatgtattccaggatcaagttccaaccgatgaaccaagcaaaaagctctcccacagtaccataggcatatgcataagcagaaccttccacaggaagtaccgaagcgaattcggcgtaacaaagggaagcaaataaacagccgatacctgcgattacaaaggacaaagccaaggccggtccggcataatcatgagctgcaataccggttagcgtgaaaataccaccaccaatgatggctccgatacccaatgaggttaatccccattttgtcaatactctttttaaatcgttttttttcatgtctgcttcaaaagcagccacaggttttactctccaaattgacataaatagtttggtttagttaatagattccaaatatagttttttctgtttcaaaaatcacaaaaatataatttttgatgttttattgggcatcagaaccaaaatccgacactgataaaggtaaagccacggttcaattccggcgaccaagtgtattttacttctaccggaccgataaccgattccaaggcatagccaaccgcataaccattgtaagttggtttagaaagccaatttccggttctgaataaatcgtcggaaatgttggcatagttggcggcaaaattgaagtgattttttttgtagaattcgtagtcaacggtaaagcaggatttgatgtaactgtcggctgataaactcaaaaagtcatacccataaaaatgcttgaaattattgatggtgttaaagccgtatccgcctaaaacgaaatcaaaaaagtgaacactttcattgccaatagtaaatcctagttcggattgtacttttaaagttatttttttgtgaaacgatttgacaaagccgacttctcctttggcgattgaaaagcgattgaactcgcgggtgtaatctgaggaatacaaaaacgattgaatgtcaccagacaaaaaccaaccttttttaggaaacaatttgttgtcgaaggagtcgaatttcatatacccaaaaatactggtgtaaagactattttcaaaaaccggattcacggtgcctaagttttccgatttgattttaatattttttagttctaccccgccgccaatgaggaatttttgcataaaaacggtttgcatgtaggcttgattggtaaaatccgaaaagtcgatgttgatactgttcaagcccaattggcctaaaatgacaccgtctcgaaagtcggttgacacatttctgttgaatttgttgtatctcgatttcaaaccgaaactccagtaaaatccgttgtcaatgtaataatctaagttgtagcgaatattgtcgcccaatcctaaatctaatgaaaccacatcatttttgaagagcgattttttctgcgtaatgttggttaacaacgcacttttgtacaaaccgtcgtagtgcaatccgaattttaaaaacgttttagtatggttttcggtgagatttaatttcaactcgtctgcgccttgatacggttctatagtataacttatgcgattgaagttttgggtagcattgatgttgttcacgccggtttttaaatcgtcatagctgatttttttaccgtttttaaatcgcaattttcccaaaatgtacgcacgagtgtaattctccaaacgattaagactaatgcttttgatgaacagtgagtcgcttttaaccggatgttggttcaacacatatttttctaccggattggccaactttttaattttatcaatctctaacatggcggcaatttctcctttttggatgattgcttttccttcattgaaagagattacgccataattggaaatgtccggtttgatgtaaatatcggtgattttctttttctcgttcatgcttttaatcatgtccaagttggtaatttgcaccaaaattcgggtagcatcttttaaagcgtctcggtttttcaaatcatcttgtacgtcaacgccaattatgatgtcggcgcccatttttctgacttcttccgcaggataattattaacaacaccaccgtcaatcaatactcttccgtctatttcaaccggtgaaaacaaggatggaaacgcagaactggctaataatgcttgcgctaaatagccttcttttaaaagaattccttccccggtttctatatcagtggctacacacaaaaacggaatcggcaatttgtcgaattctcggatgtggcgaaccctgtgggttaatttagacaacaaattgtagttgtacatgcctttggaaagcgcgatgggaattccgattttgaatttatgaaaaggcaaagtcagtgcatacatttcgtcatttcgcttttcgtaaaagcttttggaagaacgcggaatgtaatcttgtagtaattcgtcgaaatccgtatggtaaaaaatagagtcgatttgcgtagcgctataaccggaagcatacaatccgccaactactgcgcccatactggttccgccaatataatcgattttaacgccggcttcttccagtactttcaaaacaccgatatgggcaaatcctttagcaccgccgccactcaaaaccaaaccgattttcggtcttttggtttgggttgaatcttgcgccaaacttacttgaagacaaaaaagtccaagcagcagcagtgtaatttttttcataaaaagaggttaggatttcccgatgttgtaaaattcggaaatttttttggcttttgacgcaccaataacctcagaaatttctttttctgtggccaattgcaatcttttaacacttttgaaatgttttagtaaagccaacatggttttttcacctatgcccgggatggtttccatagaggtttgcaaagccgatttgctgcgtttgtcacgatggtgcgtaatcccgaaacggtgtgcttcgttgcgtaaatgttgaatgattttcagggtttccgactttttgtccaaatacaacggcaccgaatcgccgggataaaacaattcttccaatcttttggcaatgccgataatggcaatttttccgcgtaaacccaattcgtctaagcttttgagtgccgatgacaattggcctttgccgccgtcgatgataatgagttgcggcaacggttggttttcgtctagtaagcgtttgtatcggcgatacactacttcttccatcgaagcaaagtcgttcggaccttccacggttttgatgttgaagtgacggtaatctttcttgctcggcttcccgtctttaaaaaccacgcaagccgaaaccggattggttccttgaatattcgagttgtcaaaacattcaatgtggcgcggttctgtgggcaatcgcaggtctttttgcatttgcgccataatacggttggtatggcgttcgggatctacaatttgcatctgctttaattgctccaaacgttggtatttggcgttgcgttgcgagagttcgaggatttgttttttgtcaccgagttgcggtacggtgacttttattttatcgccgaaatcgagctcgaacggtaggataatttctttagaagttaagtgaaaacgctctcgcaattcaaccacagccaattccaataattcttcatcggtttcatcgagtttctttttgatttccatcgtatgcgagcggataatggcgccgtgtgcaatttgaaggaaattcacatacgccatcgattcatctgaaacaatagagaagacatctacatttgaaattttcggatttaatatggtcgaacgcgattgatagttttctaaaacctcaattttttctttgattttttgagcggcttcaaacttcatgtcagtcgccaattccaacatcaattttttaaaatcgcgcaaactgtctttaaaattgcctttcagaatttcgcgaatagcatctacttgtttttgataatgttccaacgattcatagtcttcacacggtcctttgcaattgccgatgtggtattctaaacaaaccttgtatttgccggattggatattggtgttggacaaatcataattgcaagtccgcaacggatacaattctttgattaaatccaaaatcgtattgacggttttaaaattggtatatggaccaaaatattccgaaccgtcttttaccattcttcgcgtgggaaatattctggagaaaggttcttttttgatgcaaatccacggataggttttatcgtccttaagcagcacattatagcgcggttgcagttttttgatgaggttgttttccaacaacagcgcatcggcttcggaggccacaacgatgtgcttgatttccacaatttttcgaaccaacacattggtctttgcgttgtcgtggactttatgaaaataggaagaaaccctttttttgaggtttttggctttgccgacatataaaatttttccggccgcatcgtaatactgataaacacccggactgtcgggcaaggtttgcaattgtagttctatagacgggagaggcatttttgatttttgaatgatttcaaagttataaaaattaaagtatttttggattatgaataaaaaggacttacgcaaaaagtacaaagcattaagacaacagttttccgaagcacaaatggaagatcaaagtttagcgattgccaaccgcttgttacagttagatgtttgggacaacacttattttcatttgttcctgaccattgaagagcaaaaggaagtggacactgaatttgtattgcaaattttagccggaaaagacaaagagattgtagtagctaagagcgattttgacactttggaaatgaggcattttttgttgacggacaataccaaattccaaaaaaacgaatacaatatttacgaacctgttgacggtattgaagtgccgccgatgaaattagacgtagtgtttgtgcccttattggcctatgatactaacggcaatcgggtaggttacggcaagggtttttacgataactttttgtcgcaatgcaaagaagatgtcgtcaaaataggattatcgttttttgagcctgaggaaaatataaccgatgtttcgccaaccgatattcgattagattattgcgtaacgcccgaaactattcataagttcccaacgacgtcttcttagcaaaagcttttttattgaagacaatcaatatcccgacaccagtagaaatggccatatcggctatgttgaaaatggcattgaaaaacttaaaaggttctccgccccaaatgggtagccattccgggaaagtgccttcgtaaatcgggaaatacaacatgtcgactactttaccgtgaaaccaagtcccgtaaggttggtcgggtgaaaaagcagcaacgttgtagcgagtgctttcgtcaaaaataaccccgtaaaatactgagtcgatgatattcccggcagcaccggcaaagataagcgcgatggccaccatcaagtatcttgaactgtgtttggtgctggcgtcatacaaccaatatccgattccacagatggctaaaattcggaaactggtcagaattaatttcccgtattcgccaggaattttagttccccaagccattccttcgttttcgatgagcaatattttaaaccaaccggtaacgtcaatttggctggcatctccgtaaaagaaattggttttgatgtatatcttaacaaattgatcaaccaataaaacgatggcaatgattagaatagagtttcttaacgacattcttagggttttaatggcgcaaaaatagcaatattattacacaaaaagcagaatattttatttgttagtgaactcattcaatacattttagcatagtcagaagaagattgtttatttttaccctaaaaagcaacctaaacactattttttcatcccaaaaaatgaaaaccaatacaataaaccttatgagaaagttttatgcagccttgttttttacattggcactattcacaatgtcttgtgatcaagatgacgacaatggaggtttggccaaatttgccgtacctaccgtaaaatcattagccgaaatcagaagtaatgtttcggtaaccactgcccgagctacccaatccaacggaaaaatttatgtagccgaaaactatttgttttacattgcaaaagaatccggtgtgcatgtttttgacaataccaatccgagtgcgccgcagaacattgccttcattaatttggccggtgtgcacgatatagcggtaaaagggaattacctgtttgccgacaattttgtggatttgttggtgttcgatatcagcaacatccaaaacataactttggttcgtactgtgccaaattcgattgctttttttccggaatatcctgaagatgccgagtattatgattacacgtcagaaccgggacaagatgaaattattaccggatttactgtcgaaatgagaaacagaccacaaggacaggaaattgttttggccaacgatgctttagctggttttgaaagtgctaatggcgggaatattggaattggcggttcttatgctcgttttcaaattaacaataatgctttgtataccattgattcttataaattgaatgtgtttaatattgccgatccggctgctgcttttttcgataaagaagtttacatgacacaatggtttggtggcggtgaatttgagacgctgtttatccaaaaagacattttgtttgtaggttcaacgaccggaatgtatactgttgatgctgaagacgagttcaatccgtattttgtgtccggttttgcccatgctaccgcttgtgatccggtagtggtttttggtaatacagcttacattacggtgcgcggtggttccacttgtggcgcgattgaagaccaaattaatgtaatcgacgtaaccgatattgccaatccgactttattatcaacttatttattaaacgagccttacggattaggcattaaaaacgggattttgtatgtaggatgcggtgccgatggtttaaagatttttaacgctgccaacagtgccggtttggttttggaaaatagttatgccaataatgtaaaagatgtgattcccctcgacagtcatctgattacagtaggcgataacaccattacacaatacagttacggtccgaattttacactcattcagctcagtcagattgccttataaaaaaagccccgaatttcggggcttttttatgatactatggtttgatttatcgttgtaaatttttggcttcgatactcatggtcgcatgaggtacaattttcaagcgctctttggaaatcaattttccggtcactttacaaacaccatacgttttgttttcaacacggaacaaagcatttttcaaatcgcggatgaatttttcctgacgaatggccaattgcgagttggcttctttcgacatggtttcgctgccttcttcaaacgctttgaacgttggcgatgtatcatcggtaccgttattcaaatcgttcatataagcactttttatcaagtctaaatcggcttttgctttttcaatctttgctaaaataatttccttgaactctgccaaatcagcatctgagtatcttaatttttcttctaccataatcgttacgtaattatttagaaattaatattcttgtttttatctcatcaaattctatttcagaaccttcggtaatctcattttctaaaaccaaactctcggttaatgtctccgatttgatatagttttcattttctttaatggcttgcgctaaaaccggatggtgttgcaattgcactttaatcttatcggtcacttcaaagccgctgtcctttctaatgttttggatgcggttaaccaattctctcgcaataccttcgtttttcaacgcttcggttagggtaatgtctaaagcaacagtgatgccgtttgcattggctaccaaccaacccggaatatcttgagaggaaatctcaacatcttctaatgataaagttatactttttcctgaaattacaagcgttagttcgcctttagcatctaattcgttgatttgctcttgggtaaaactttgtatctctttggaaatcaatcccatgtcttttccgaaacgcggtcctaaagccttgaaattaggtttaatttgctttaccaatacgcctgaagcatcgtctaaaagttcgatttctttaacgtttacttcggcttttatcaggtcggaaaccgcttcaatttcagcacgctgagtctcgtcaagtattggaatcattaccttttgcaacggttggcgcactttaatcatttcctttttgcggagcgataaaaccaaggacgaaaccgtttgggctttcaacattttactctctaacgatttatcaacaaagttttcaaccattaccgggaattttgccaaatgtaccgattcaaattcctctgtatgtgttgcctgcgttaagtctctgtaaagttgatccataaaaaacggagcaatcggagccgataatttggccacagttaccaaacaagtatacaaggtttgataagcggcaattttatctgttccgtattcgcctttccagaatctgcgacggcatagacgtacataccaattgctcaaattttcttgtacaaaatcagagatagctctggcggcttttgtaggttcgtaatcggcgtacgcttcgtcaacggttttgattaaggtgtgtaattccgataaaatccaacggtcaatttccggtctttcgttcaacggtacttcggcttcggcataattaaatccgtcgatattggcatacaagctgaagaaagagtatgtattgtaaagtgttccgaagaacttacggcgtacttccgccacaccttcgatgtcaaatttcaagttgtcccacggattggcattcgatatcatataccaacgcgtagcatccggaccatattcttttaaggtttcaaacggatccacagcattgcccaaacgtttcgacattttttggccgtttttgtccaataccaatccgttcgacactacatttttataagcgattttatcaaaaaccaaagttccgatggcgtgaagcgtatagaaccaaccgcgggtttggtcgacaccttctgcgataaaatcggccgggaaggctttgttatcgtcgattagatcacggttttcaaacggataatgccattgggcataaggcatagcgcccgagtcgaaccaaacgtcaatcaaatcagattcgcgtttcatcggttggccggatggcgataccagtataatgttgtctaccacatttttatgcagatctactaagtcgtaattggcttcgctcatgttgccgatttggaatcctttatacggattttcagtttggaaaccggctgcgattgctttttcaatttcagtatacaattcttccaccgaaccgatcagcatttcctcggtgccgtcttcgcttctccaaattggcaacggaataccccaatatctggagcgtgataagttccaatcgttggcatttttcaaccagtttccaaaacggccttcaccggttgctttaggcttccagttgatggtgtcgttgaggtcgaacatacggtctttgatttcggttactttaatgaaccaagaatctaaaggataatacaaaatcggtttgtcggttctccaacaatgcggataactgtgtacatatttctctactttgaaggctttgttttgctctttcagcaagatggcaatttccacatctactgatttttcaggtgcttcgccttcattgtagtattcgtttttgacatattttccggcgaaatcacccatttgggctacaaatttcccttgcaaatctactaaaggaacaggattaccgttttcgtctaacaccaacataggcggtacttccggagtagcttctttggctactttggcgtcatcggcaccgaaagtcggcgcggtgtgtacaattccggttccgtcttcggtagtgacaaaatcgcctgaaatcactcggaaagcattttcaggattttgatacggcaaggtgtacggcaataattgttcgtaactgatgcctaccaaatcagcgcctttggcttcagttaagacttggtatggaatttttttgtcttcggctttgtaattagtaaaatcggcttcactttcggctgcaaaatatttaccaccgaattgttttccgactaagttcttggccaaaatcacattgacctgttcaaaagtatattggttgaaggttttgactaaaacatagtcgatttttggtccgactgtcaaggcggtgttgcttggtaaagtccatggcgtggtcgtccaagccaaaatattaacatcgccaaagccttgtaaaaagttcggtaaagtttctggtttggttttgaattgcgctactatcgtcgtatcggttacatcacgataagaacccggctgattcacttcgtgtgaagacaacccggtacccgctttaggcgaatacggctgaatggtgtaacctttataaagtaagtctttgttgtaaatttgcttaagcaaccaccaaaccgtttccatgtatttggatttgtaggtcacatacggatcttccatatctacccaatatcccattttttcggtgaggtcgttccaaacatcggtgtagcgcatcacggttcttttacacgcttcgttgtattcggttaccgagatggttttgccaatatcttctttggtgatgcctaattctttttcggtacctaattctaccggtaaaccgtgcgtatcccagccggctttgcgtttgacttggaaacctttctgagttttgtaacgacaaaaaatatccttgatggcgcgcgccattacgtggtgaatgcccggcaagccattggccgacggcggaccttcaaaaaacacataaggagtagcaccttcacgggaagtgacactctgttcaaagacgttattttttttccaaaatgcaagaacttctgaggctacagttggcaggtcaagtcctttgtattcagtaaacttagtactcatttttatcgttttcttaaatcagtttgcgaaagtaataaatagttgtgagttatgggttatgagacgggagtttttgcgttagcggttggagcgaaaatcctttttttgcccaaagttccttgaattgccataatatgattaaaaaagattgcagcggaagacgcggcccaaagggaaacgcccataaaaatttaagcaaaaacctcttttaaaacgtccagcgatttgggttttttgaagccaactaagtgaaaagtgtagtaatccaagaggattttgagtaagagttggcgttcggtgccgttgaacactttttgcggactgtcgaatttcaaatcgattagttttttgaacaaacgggtttcgttttcgggcaggcaacctatgcctaaagtgggcgaaaagtagccttctttcacttcaaaaaagggataatccatctcggaagtatcgggatagaaacccaagaatttggtgatttccaacagtagtatcaagtgaaaattagacgtttcttcatgcgtatcgagccaaagtagggctgtttccaaaaaagtgaacaagcgctcgtttttttcttcttcgtgtatgctgtggtggagcatttcggagagaaaaataacgatggtgcttttgatgatgtcggtgttgatggtttggaaggcgtgcgccagtttgatttctttgaaatgctctaaagtgcctttgtttttgtgattggcttcgatttcgagtatggtcagcggttggaaataggcgattttttggttcgattttttagctgaaaaggcattcggcacaaaatagctttttaagccatcgcttagggttaagcattttacaatcaggcttttttcctgatactttagtgaagaaatgacaatggctttggttttgacgagcatctaaaaagtacgatttacgaagttatcgaattatcatcacttttttaaccgtggtttctgaagcatcttcggcggcgataaaaatcatgtaaacgccggaggccactttgtatttaccgaaagctgtagtgtcccattcgatggtaccgccggttgaagtagtttcgtatactaagcttccttcgatgtcggtaattttaatattagctccggaggttaaaccggcaattttaacggttcctacaaattccggtcgtacaggattagggtaaacataaacatcctttaagttatcggccggtttggtggctgttccttggaatgataccatacctctgtcggtagcaaagaaaacctcaccggtttcggcattgatgtcgatatcgttgacaacattgcttggcagtggcgaattgtctgtggtaaaatggtaaatggtttcttggccgttcggagaaaagagaaaaacaccggaatcggctgtgcctatccatttttcgttcgaaccgttaactactatatcagtaatgaattgttcgtataaaagttcttgcgccaaatcgttctccaaaataatgatggcgttggctcgcatttgttccgtaccattgtaacttcctgtgctgggcaaaacgcgtaatcctttgttggtgccgatccaaacttggtttcggttgtcgatggcaatagcccttacgtctctggagggtaaatttccggcttcggggccttcggtaatttttttgaattcgttcaccgtttcgttaaaagcgataaccccatcgagataggttgccatccatttggttccggttctgtcgatgactattttattcatgttggccgacccaaaattatctaatataccttctaaattatatgattgccattgtccgccacttcgcagtactttcaattggtttttgatgttgttgttggttacccaaagattcccttggcggtcgaaagcagtgccgttgattcggacactgatgttggaaccgtctaccaaagactccaagccactgttggtttgatcgtacaacatggtaggaatgtcactttcaattttcagtaaacctctgtggtaagagctcatgaagacctgattttcattggtaggattgacggtgattttggtaagtgcttgggcgcctaataaatccgtgtaagggatgtgtagccaaccattagttgtattgtatttagagatcccaaattgcggcggactaaagccaaaataattgtacgggttgtaaaaaatatcgtaaccaccataagccgcccataggtttgacgatgaggcgtcaatggcgaaaagtttatttttggttggtcctgtaggcatgataaattcgaaattagcaggagcgctgacaggagcagataatacgccgttttcgttggtgcctatgtaaatggtattgttgattacggtagccgcagtaaaagtcaccgttggcgaagtcacctgaccgctttgaatgtgagccacagtatttgatccagtattgataacataaacgtgattgacagaagctgcaataaggtagtcattagttgctctgaagtcgatgcaagcttcaccaatgtttgcgacttcaataaaaccaccgttgtgtttgtagattttgttgttggtactgtagaggaataattggttgttgaaggttgttataccaaaccaatagccaccgtcgaaagatgtccattgcgcaaagtcaattaggttcggactagataaattggctttcagaattccgttaagttgtgtaacggcataaatttctccgttgagaacagcggtttggaaaactttgatttcttgtccgtttggtccgataaaataggtgtcgccaaattcgagcgttgctaatttgtattgcacaattccaaaatcacaggacaggtataaaatgccttcgtgttcggtaaagtggttgatttttttgatgttggccggaaggtttttgttgattatatccactacattcaacatactgccgtctacatcattaataacaatcatcaatccgctttcgtagcccactacggttttttgaaaggcatcgctatggtgtattgctgaaatagtttgtccggataagccatcgatggtattgatggtttggatgttattggatacaatattcttggtaaacaaagcgttttcagaggctgcataaactttggctgccgattcagaaaggtctttgatttgattgtatgaaaaataccctttccaattttggttttgttgtgaccaactccattggaatgtaaagagcaatacgtaaaaaaggcattttttcattgagcagcaatttgacacaaatatagtataaacgagaaaaatatcggtttggtattttgtatcaaaaaaaatgccttcggaaacgaaggcatttttaggtctttattccgctgccgatccatagagttcggcagcggattttgtggttggttttattcggtttatacaataccttgagccagcatggcatcggcaacttttacaaagccggcaacgttagcaccttttacgtaatctacataaccggtttcgtctttaccatattttacacaagctgcgtggatgtttgccatgatgtctttcaatctttggtcaacttcttcagcggtccagctcaaacgcaaagagttttgcgacatttctaaaccagaagtggcaacacctccggcgttagaggcttttcccggagcgaataaaattttcgcatgcaagaacacttcaatagcttcaggtgttgacggcatgttagcaccttcagctacacagatacagccattagctactaatacttttgcttcttcaccgtttaattcgttttgagtggcacatggtaaagcaatatcacattttacttcccaagggcgttttcccgctacgaaagaagcattcgggtatttcttcacgtaatctgaaattcttccgtagtttacgtttttgatttccatgatgtacgctaatttttcagcgtcaattccttctgcatcatagatgtatcctgatgaatcagaagcagtcactactttaccgcctaattgggtggctttttggatggcatattgtgccacgtttccggagcctgaaaccactacggtttttccggagaaactatcacctttagtcgccaacatgttttgagcaaagtatacatcgccataacctgtagcttcaggacggattaatgaacccccgaaagtaattccttttccggtaagtactccggtaaattcgtttctcaatcttttgtattgtccgaacatgtagcctacttctcttccgcctacaccgatatctcctgcaggaacgtcggtatcagcgccgatatgtttggccaattcagtcataaatgcttgacagaatttcatgatttcgttatctgattttcctttaggatcgaaatcagaaccaccttttccaccgcccattggcaaggtagttaagctgtttttgaaagtttgttcgaaagctaagaatttcaagatgcttaagtttacagaagggtggaaacggattcctcctttgtaaggtccgatggcagagttcatttggattctgtaaccgcggtttacttgcgtattcccggcatcatcaatccaacaaacacggaacatgattactctttccggttctaccattctttccaaaagcattttgttttggtattttttattttgttcgataaagggaattacggtttcggcaacttccttaacggcttgcatgaattcgggttcgtggccatttctttgggcaactaaatcgataaaatcattgatactttgtgacataaaatatacttttaatttttttaagaaaacgttttcgtaaattccgacaaatatacattttattaaaaatacgggggcaaattttttaaaattctcagaacttttgtgtttatgttaaggaagtttaaagaaatttatattaaatgttgtgttttaaaacttttattgcttttttttgtatataaatcaacaaatttttattttattttagaactgaatgatgtttttatatatttgtcgagaattgaacttattagtatgcaaatgcccaaaaaatttatcattactatagtcttgttatttgcattttcgaataacgctttagcccaatttggtttttcacatgaagttggtgtcattgttgggccggttgcttttcaatcggattacggggaacgatacaactttgctaccaatgccggaaatacaggttacggaatagggttgatacactatttgaatttttcttaccgagcagactgtaattgttacacgccggaaacctattttaacgaccacttcaagttaagaagtgagttgtcatacaacaaaacagatttgcaacatttcgggcgttgggtggatcctgacagaacttctttattcgctaatcaattaagaggaatgcgcggtagtacgtcggtgactaatatcggaatgcaattggaatattttcctttaagcatcagagatttttcttctaccataggggcttgggcgcctttcatcagtttaggaggccaatttagtttttatgatcctgaggcttattcaactttagggccattgaatacaccagtttctacacctattaaatattacaatgctaccacaaaccaaggtggaactgtttggtctattgtcggtagtgttgggacaagatataagttaaccgagttgtctgacttaatggttgatttaagaatgcaatactatttttccaattgggttgacgggttaaatccggatccggcggtttatgttgaaaacagagctaacgattggaatgtatggttgaactttggttacatctattacttgcaataggtcgcacttttattcttcagaagcgtccttataatccggataaagaaacttattgtacgggaatcttgtgatatgaatttctctcactgcctcgtatactttctctctgaattcttcaaaattttctttgtttgtggccgagatgaaaagcgcgtttttttcacccacattgtgcatccatgtcgttttccattcctctaaggtgtaatgcttcgttgttttttcggtgattaaatcatctgcttctattaccaaatgtttgtaggcgtcaattttattaaacaccattatagttggcttgtcattgcttttgatatcttgtaaaatctgatttacagagtcgatgtgttcctcaaaatcaggatgtgagatgtctacaacatgcagtaacaaatccgcttctcttacctcgtccaaagtgcttttgaaagattcgattagctgagttggtaattttcgtataaatcccacagtatcggatagtaaaaaaggcaagtttttaataaccactttacgaacggtggtgtctaaagtcgcgaacagcttattttctacaaaaacctcacttttactaatgacattcattaaggtagatttgccaacattggtataacctactaaagcaactcttaccattgcgccacggttgcttctttgtacggccatttgtctgtcgatggttttgattttgtcttttaacaatgcgattctgtcgcgcacaattcggcggtcggtttctatttctgtttcaccgggaccacgcaatccgatacctcctttttggcgctctaagtgcgtccacattccggataatcttggcaataaatattggcattgcgctaattctacttgggttcgcgcataggatgtttccgctctttgggcaaaaatatctaaaatgaggttggtgcgatctaaaattttacaatctaaaattttagacaggtttttttgttgtgaaggagacagttcgtcgtcaaaaataacggtagaaatagtattttccttgatgtaaagattgatttcgtcaatttttccggttcctaagaaagtctttggattgggtctttccagcttttgagaaaatcgtttaacaacttctcctccagctgtgaaagttaagaattcaagttcatcaaggtattcttttaatttttcttcactttggttttgggtaactataccaaccaacaccgtgcgttcaaaatttataacttctttttctaacattttcttcaattgaattacaaaagtaaggattagaagccaaattttaggtagaattgttttactaaaacataacattaatttgaattattgttccaaaaaaaatttaaaaggtatttttttcatattttttactaaatttggaactcaaattccaaaaaaactcaattaaacaactaaaattttcatttcatgaaaaaaactacattactaattttgttgatgttcttttctgtctttggctactcacaaatggctctggaaggattcgaatcaacaacgggtccgactgcacttccttctacgacctggaatttaggaacaggtaactgggccgtttttgacaacggagtaggaaccgttcagcgatggggaatcaactcaactgtggttacacctccaacacctccgattgtttatcaaggcactaacgcggcctatgtaaatcgtgaaaacatcggacagaacaatacttccgaggattacttggcaaccccattggtgaccattcctacgaatggtcaacttcgtttttacacccgaagttttaccaccggaaatcaaggaacactttatcaaattaaggtcgctcccgctactgcttcacaaaccaatcctgcagcgtatactttagtacagcaatgggatgaaacaactttaacggctacctataatatttacgaagaaaaagtagtgagtcttgctgcttatgccggacaacaagtgtatgtgtcgtttgtaaaagtttatacacaaccactaggtgttttagacggtgaccgttggttggttgacaatgttagtatagtagaacaatgtttagatccgacaaacttagcggcaggcgcaataacgcaaacttctgctaccttaacgtggggtaatcctagtggcgcaacttcatgggaaattgaagtattgccttttgctagtgctcctacaggagtgggagtaattcataatggaactccatcttatgtggcgactgctacagcaaccggaacgccatttacaccaaccaccaactataaatactatgttcgtgctttgtgtgccaacggagccagtagtcaatgggtaggcccatttgcattttctacttcttcaccggggttgacttgtgcttcaccaatcgttgttacaacgcttccttatagtactacagataataccggaaactatggtgatactactgatgtggctcagccggtagcttgtgccggaacggcaaccaattatatgaccggtaatgatgtgttttattcgtttactccaacaacttccggtgctatcagtgttacaatgactcctacaggaaattggtctggtatttttgtttaccagggatgtgctaacgtaggtgttaactgtgttgccggtgtggcaaatactgggggaggagtaagatctattccaagtattcctgttgttgcgggacaacagtatattattgtaatttcaactaatgcggcaccacaagccattggatatactctagttattcaaacggttaactgtgctatgccaacaactttatctgcttctggaattagtcaaacttctgctaacttgagttgggctaacccaggtggagctacttcatgggaagttgctgtacaaacggccggatctccaattcctgctggatcaggagtgcaaacgaatgtgaatactaattatcctgcagcaggtttaaccgttaatactgcataccaatattatgtaagagccgattgtggtaatggtactttcagtgcttgggcagggccattcttgtttaatactttgtgtgctcctttcaatgtacctttccaagaaggattcaacagtacttctactactgaaaactgttggactgttcttaatgttaacggagatacggatttatggaacatgaataacactaccaatccatttgaaggaaatcaatgtgctgctattaataccgactttaacaacggtgctaataatgattggctaatttctcctcaaatcattttaacaggtaaccaaaggttgaaattccactacagggttaattccacctttgaaccaaatgattttagagtaatgttgtcaaccaacggaaccagtccagctgattttacgacaacattacttccgctagcttcctatagtaatacaacgtatgttcaaagtatagtgagtttagcgggctatacgggtcctgtaaatattgcatggcatgtaccgcaaggtggattagacggatggatattgtttatagataacgtaattattgaagacttaccatcttgtccggagccaacagctttaacatcaagtaatgtgctttctacatctgctacagtttcatgggttaacggaaatactgaaactgcttgggaagtaattgctttaccatgtggttctcctgctcctacagctgcctctgtcggaacaagtgtattaactccgggaacacatacgttaaccggtttaaccccaactacatgttatgatgtttatgttagagcggtatgtgcaactaacgatattagtccttggaccggtccaactacctttactactcaagtggctcctccggtttgtggtggtccgtacgtagatgccggtggtgctaatgcaaattatccaaacagttcagattcaacagtaactatttgtcctacaccgggcaatgttgttaccgtaacatttacctctttcaatacagaggctaactgggatgctttatatgtttttgacggaaactctatcaatgcgcctcaaattgccagtacaaatccagcagccaacgttcccggaggtttagccggaggtttctggggtaccactattcccggaccgttcacttcatcaagtactgatggatgtttaactttcagatttagaagtgatacctctatcaacaatcctggatgggttgctaatgtgacttgtgatcctgcaccaaattgtgctaaaccaactgtattaacagctactcaaattacaacaacttccgctcttttaggttggacagaagctagtgctgatgtaacccaatgggaagtgattattttgcctgcaggttctcctgtgccgttaccaagtgcaaccggaactatagtttcaaccaatggtgccctatttagcggattaaaccctgggacacaatatactttctatgttagatcaatttgtcctacttccggaactagtttgtggtctaatggatttaattttaatacgttgttagcaaacgatgagtgtcaaaccgcaatttttgctcccgtaaattcttcttccgtttgtcaacaagttactccgggatcattagccggtgcaacagcttctggtgcgcctgcaatagccccatgtattggtactcctgatgatgatgtttggtatcaatttatagcttcaaatccatttttaacagtatcgttacaaaatatagtcggatcaactaccaatttaaattttgccgtttactcaggaagctgtggaacattagctcagttgttttgtagtgctgcaaatactacaagtggagttgttaatggtttaactattggacaaacttactttgttcgtgtgtattcaaatgctaacactccacaaacgacaaccttcaatttatgtatttcaaccccagctagttgtatatctggtcaagcggcgtgtcaaaacttgagctatcaaaacactaccggcgttgccaaccaaggaactattggttgtttgggaagctcaccaaatcctgcttattacacaattaatgtagctgcgtctggtcctataaatttattattaacgcagtcaaccactcaaggtggaacacctaatttagatgtggattatgctgcttgggggccttttacaaatcaagctgctgcttgtgctgctattggaaatcctccaactttggctccgggaattggagttccggtaacactacaaactggttgtagtttttctgctgctccaactgaaaatttaaatattgccaatgcagttgcaggacaagtatatgttattttaattactaatttttccaatcaaccaggttttatcagtttaacacaaaccaatgctggctctcaaggagcaggtgtttatgattgttgtccggacgcattttttacctataccccggcttcttattgtaagtcaccgggagcgcctaacccagttcctacaatcaatccgggttcgcttgcaggcgtgttttccttatcgccggcttcaccgacaggtttagtatttgccaatactgctaccggagagattgatttagcggcaagtgctccaggaaactatttggttttaaatactgttgctgcaacggcatcatgtattgaaagacaaagaacttataacatcagtattgtggcaccaagttcggctacaatttcttatggagctccatcatattgtaaaaacattaacactcctcaagcagttactgtaaacggaacaacaggcggtactttctctgctactcctaatggaggtttaaatatcaatgccaacacaggagccattgatccaagtaccagtgcaccgggcgtttacaatgtagcttattcgttaccaggctctacggtttgtgccaatgcaaatccaactacccaagtagagattttacctttaccgaatgtggttcaaccggcttcagttcaggcttgtgattcttacactttaccaacattagctgttggaaattactttacacagtctcagttaggggggtcaactactccaattgatattactgcaccgcttacttcatcgcaaacagtatatgtttatgctattgatgctaacggttgttacaacgaaaagtcttttaatgtaactattaattcagttcctacaccaactttcacggcaacacagtctgactgtgcaacagcaacaggaacaattacggttaattcaccaacttctcaagcgggatcaaccccgacagatctatttatatctgaagtaacagatgagagtaccggttcattaacatacatagaaatctttaacggaacaggagctcctaaaaacttagccaactataagttaagaatttacactactgtaaccggaaatccttcttgcgatttaacgttgtcaggaacgctaaataacaatgcaacccatgttgtagctgttggtagtaatgtgaatcaaggcggggtaactcctaatcaggtttttgcttcttgtggtggggttaatgataacgataatatcagattaactacttcagcaaatgcattagttgatatttggggaagaaccgatggtatttcttttacaccaggtaatcaggctggttacacttacagaagaattactaatgctgtagcccctagtactacttggaattctgcagattggactgccattgatccgcaagattatactaacgtaggctcttatgttaattttgtgaataactacgagtatagtattgatggtggtacaacttatcaatcatctcctgctttcactgctgttgcccctggcacacatgttttagtagttagagatattgccacaggatgtacttcacaacctatagatgtatttgtagcacctactaacccaattccggcagtaaccacttttgattacggaacaggtactttctgtcaagacgcagcaaaccctgcaccaaacacaagtgcaaccggatttacaacaggtggaactttctctgaagttaacactacaggattggttatcgatcctgtaacgggtcagttaaatttagcggcttctacagttggttcacatacggttagatatgaagtggcctttaatccggtaacttgtcaaagtgcaggttcaactgatgttaccattcaaattattcaagtaattaatccgatagttggattcagttataatacaacatctatttgtcaaaatgcacaaccatctacgttaacaccaacgttagatgcaggattcagcacttttgctcaattctctgtaacgccttcaacgggattgtcaatcaacactacaacaggagttattaacttggcagcttcaacggcaggtacttatcaaattgttgttaatgtaactgctgacgcagcaacttgtagagttccagcaacatcagctacctttactttagaaatcaaaccagtgattacaccggtagtttctttcagttacaactcgccggtttgtgcattcaatgctgataatttacagttaccaattttagctacaggttttacaaccggaggcgttttctcttcatcaaccggtttgtcaataaatgctgctgatggagtgattacggtttcaggtagtcagccggatacttacacgatattctatcacattgatgctgttgcttcaacgtgtcaattagttggagatagccaagctactattaccattacaccgccggtagctattgaagtaaccggaggatgtgaaggtgtaagttatgtattaacagccacacctgtagacggttcatttaatcctcaaacggttacttattcttggcagaatgatttaggtattgaggttggtactacgcaaagtattacagtgaccgaacttggatcttatttcgttactattaatgataacggatgtagcagtgagtctgctccattcccggttgatgccataacttgtgttatccaaaaaggtatctctgttaataatgatggtttaaatgatactttcgacttgagaggtttcaacgttagaaagttaactatcttcaacagaaacggaatgaaagtatacagtcgtgctaattatactaatcaatggggaggacaatctgatgatggtgacgatcttcctgatggtacgtattactttgttattgacagagataatgcagaaaccaaaacaggttggatttacatcaacagagcacaataggacattataaattggcatacaaaataaaacaaaacaaaatgaagaaaatatatttcattgcactactagcttttggtttaacagagttaaacgcacagcaagatcctcattacactcagtacatgtacaacatgagtgtaatgaatccggc

SEQ ID NO: 18 - DNA, 79395 bp, Sphaerospermopsis sp. LEGE 00249
  LEGE00249_30
cgaatgtctttgatgaaattctctgctgtttttttcttgggtgttctcataatatcaaatttaaggattttgaaaacactctcttagttttgacttaaatcagtacactttttgctgacgatttacagaaagaaatttattgatgggtaataaaataatcattagacaatgctatactttgagtatgtctataagctactaaaattccttttttagcaatgctatagtccacacaacacacattagaactcattagagcaacattgttagagtccatccaataatgcccaaaaaatactggtttctgattattatcataataaaaaacataatcgtgaccaaaatcggaaatatctttattattcatgtgttcaggtaatgaggcaaaatcaactccaaataagtttcgttttctaggttgccaccattttatgcgagcttctgttcgaaccattccatgatcttcataatgaagactttcaggtaactttaattcttttccttttaaaagaacttcaattgatttatacaaggtcacatctgcatgagaatttctcaaaccattttcatctaatttttcaattttggaatcttttaaaattttaatagcatcttcctcccattgagcatgtactgctctaaaatgttccgagtcgatggcaattggtaattttgacatccaatccaaatacatttctttatctttttctgttaaagcttcatccgttgctgcgacttgatttctttttaattgagacctaaatgtgtttccgtcaacatttttgaaatgcaattgcaaataattcaattcatgatttcccatcaaagcaatagcatttcctgtttcctgcattttttttactaactctatggtttcaaaaatctttgggccacggtcaatataatctccaataaaaacaggaaaacgatcaggatgtttataaacaccattttcataagtgtatcccattttttcaaataattggattaactcatcatagtatccgtgaatatctccgataaaatcgggctcttttgtaagattgtaatcgataattaatttactcatgctttcgttcttctctgatgtttcttaaaattttaatagtctgtttttctgattctgcatctttatccgagtttaagtaattggttataaacattgaaaaaaccaacacaattgccgaattaataaaaaatcgtacttcattacctgttttatgatagaaatataaattaacaaccattgaaaaacctaatacgaacattctataaaaatttctagaaaaaagaaaatataaaattttcgaaattctaatattaattagtaactcatcattagaagcatttttgaactgaaatcttatatccacattttcttctttaaaattcataatttcaagttattagttaaacttttttatcaaaaataaataatcaaaatccacttgtcaaatatatactagtgcaaataagtgcatattaatgattatctttattccaattaatattgaatcttataatttgaatggcaagaataaagagtaaacctaaagaggagcatttggcatttttaagaaaagaactagccaagaaacaaggaaataatatattgacatcatccgattgtaaaatcctaagcgagaatatgagtgggaatgtgagtggagatactatccgacgactttttaatattgttatcaattccaatacaatttcgataaaatcactaaatcattgtgctgtacattgcggtcatagcgattggtctagttttattgattactacaatcaaactaaagtcagcaatcataaaaaaatattgttcaagtgtctacaaggaaaaattaaaaacgaggtgattattcaaactattaatgaccttgaacctattaaagatacctttgatttattcgttcaaattattttgataaaagtgattgagaaagacaaagatttttttcagaatatatttgaatttgagccactttttatcaatccacataaaaatagatatgagacatattacctaattcatttgttatctagtttatgtcaaaaacataaatggatgcaaaaaatagctattgaaaaatactataatttaaatgaggattttggctttgatagtgatttatttgttgagtggctagtaactcctcaatttgaattttacagagctttactccaaaattaccataaaaagaaaaaaaacattacaagttgtaacgcattttatcatcttgtactagcagattattatgctaatatagaagactgggaaaattttaatttgcattatggagaaataaaaaaaatagattttaatgatattaagcataacatcttgtcaatgagactaaaaggtattgagttgatttatgcattaaagttcaatcctaattactttgatacgttatgttctgaaataaatagaataaacttttggtatgtgtatgatgataaaggagatagaataaccagtttattattcatttgtattccgttacataaatgcgaacaatactcaattataacaaatatcatagagaagtcatatagtaagtatacattaattgcaacacaatggatggagcaaaattggaatcatttaaaaattttatatgcggatagtttggtaaatataggtcaaattgaaaaatcaaaagaaatttataaatctatatctgacgagctttttgatctaaatttttcattttatactgataagatatatgaaaaattaagactggaaatgtagtaacttcttattatcatattcaaaggaagtgtttttcaattgaatattataaagaagccattatagtgaaggttatttgtttttacaaaccactctaaccaagttgaaaagacaatctctcttatgaaatacaaaaaccaatctggttggaataacaaatctaaaatgcagttaatgttttgaattgatgaaaagagaatagaaagtatttggaaatcctttctttaccagcaaaaaactaattatgttaatctattgaaaaacagacattaaaacagctactaatcgatagtttccaattatcaccaactaacactattgacaactaattttaatcagtgaaaatcggttctcagtgattttcactgattttttttgtgatgtactaatctagctcctttcttttatttccttggtgatgctgataaattccataggttataataccaatggtaatcgtagctaaaacacctattataacataagtcgcaattcttctgttttctattttttctggtgttggaatctgtcctaattcataggctaaaacatcaggcgacaacattaattgtcttggggtaagggtatcgcttttcatttttttactgagtatattaatacatggttggtgttaggatctaaacaaaaaactacatcttttataatgtaataagacatattaggactaaaccttttatcaatgtttttctgcggtagatattttgggttaaatccaaatttcagtagtttatctaaatcttctttaagaatacctgcgtctatatacatttttagtattctataattattgactaacccttttttctgaatatcaaattctttattgctttctaatcttcttaaatacccatgatggtttctacaagagtcattacaatacttcttttttgaagatttgtaatccggaatatcgtcaccacaatcaggattttgacaaatttttattggctttttcatattttgtatttttatacaaatatattattttatttttattacatttgacagatatattaaatttaacatggaactaaatcaattcttcccttttctcttagaaaaaaaaatactactctccgagattgaattacatccaaggactcacatagcttggaaagaagaaggtattacattttatgacgaaagaaaagattcttttcaagataaagctgaaaaaagaaaatgggtctatttagatgtatttgaagcattatggctgttaattgttgtagaacttagaaaatttaatctggatttaaaaaccataaaaaaacttagggagttcataaaagagcaaccggattttaaaaaagcgcttgaaaaaatatctgaggatgaatttcaaaatagaatattaagcaatttaccaaaagaaatgctggaaagtattggcggcaatacatctagagagaacattataaaatctttagaaggcaatatttatcaagatacattttgtacaaatcttggagtaatgattaatggcgctctaattacaaaaacttcaccttcaattgttattaaaagaaacccagaaactgaagaattcgaattcataattgccctcaataatagcacagaagataatttaaaagaagagttatacgaattctacactcgcacatgttctgaatcaacttttatcaatttgccgatagttccaattattggcaaattattcgaaaatgagaaagtttttaaccattgctttgattatggattttttaatactcaagagaaacaattgttagaagctgtccgaaataaagaatgtgaagaaatcaaaattatcaaacataaaagtggagattacacagttaacttctctgatgctaaagaaataactggtgaagaagctaaaaagctcagaagaacattaggattaaaaatgtacgatcgagttgaagtaatctacagaaatgaaaaccatttggtgataaaaaacacaaataaaacaatagtgaaaaaagaacaataatgtcctaagaatcccttagcacttaactacctaaaagcataaaacaagtacatcttacttcttttggctgattgaggtaacaatggaacttgaaaaagccaaacaaattttaaaagaagcaaaagcaaaacaatactccgatgatgaaattaaggaaatactgaaatttttaaccgttttagccaaaatttcaatcgataatctattaaaaacaaataaagatggataatgtaattctgtatgtaagagtttcgacagatgaacaagctggacgaggttactctcttcgtgaccaagaacaaaaattattggcgtattgccaaactaataatttaaatgttttggccatctatagagaagactattcagctaaaacattcaaaagaccggaattcaaaaagcttttagagttttgcaaaaagaacaaaaaaagtgttaaccaagtcatctttatcaaatgggataggttctctcgtaatacagcagaatcttatcaaatgattgctactttcaactcacttgcaattcgggtgaatgccatagaacaaccgcttgatttaactattcctgaacaaggattaatgcttgctgtgtatctttctataccagaagttgaaaatcaccgtcgttctttaaatgttacttccgggatgcgaagagccctgaaagaaggacgatatgtgggaaatgctcctctcgggtatgataacgggagagatagtgctaaaaaacctttattaattccaaacaaagatgccgttttaatccaagaagcctttgaacttatggcaaccggtatttacaatcaaaaagaagtgctaacaaaacttaaagcaaagggattaaaaagcagcaaaaccccattttctaacttattaaagaatccgatttattatggaggtatttttataaaagcatacaaagatgaaaaagaaactattattagcggattacatgagccacttattacaaaagcattatttgataaagttcaagatgtattaaacaacaagagacaaaagcaccataccaaacataaaaaactaaatgaaaaatttccgctaaaaggttttttactttgtccggtttgcaataacccattaaccgctagtacatcaaaaggcagaacaaaacattactcctattaccactgtataagcccttgtaatggaagatatgctcttgaagaggttagtaattggtttaatgattatctggatagtatttcacttaatggtcctataaaaaagctatttgaagaagtagtgaaagagcaactggcaaattctgctgaatcaactaaaattggaccaaagcattttgaaaacataaaaaaaatagaacagaaattagaacgcctacaggatatgtttgtggatggtgaaatagataaaagtgattatcaaaccaccaaaataagatatgaaaatataatagctgaattgaaagagaaagaaaataaagtaattgatgaaaaaagtgttattgaattgtatcaaaaggccataaataaaatggaaactattggaaaacaatacaataacactgacatagaaggtaaaagattattacttggttcgatatttccaaataaaatccactttgaaaataaaaaagttcgaaccgctgatgtaaatcctattttgaatgaaattgccagtattaataaggcttaccgagggataaaaaaatgggacaaatctaaaaaattagagttgtcccacatggtgatctcagaaggattcgaaccttcgacctactgcttagaaggcagttgctctatccagctgagctatgagaccctgcaaagaaaatgtcttgaaaattgtcggggtggcaggattcgaacctgcgacctcctggtcccaaaccaggcgcgatgaccgggctacgctacaccccgagagcggagagacagggactcgaaccctggcgacggttacccgtcgacagattagcaatctgctccgttaccactccggcacctctcctataattttcaatattgtaaaagaacattttctttaagcggttgcaaatgtaatttatcattctataatttacaactatttcatttctttttttagcatttcaagtaaattattccaaaataacttcactatcaatacactacaaaataaagaattcttgcaaagcgttactcacaaagatttattgggcttacaattcattattttgcaataaaagtttagatttgcaaggcaaacactttaggtaaagttcacacttgccgagagacaaacaactaaacatcatgagtaaaaaagtagttatcgtatcagctgtgagaactcctatcggaagttttatgggaagtttatccactgtaactgccacacaattaggtgccgctgccatcaaaggcgccttaaataaaatcaatttagatccaactttagtagatgaagtattaatgggtaatgtagtacaagccggcgttggccaggctcctgctactcaagccgctattttcgcaggtatgcccaatactgttcctactactactgtaaataaagtatgtgcttccggtatgaaagccgtaatgcaaggggcgcaagccattatgaccggtgatgctgaaattgtagtagccggcgggatggaaaacatgagtttgattccacattatgtgcatttgagaaacggtgtgaaattcggtccaaccactatggttgacggtatgcagaaagacggtttaaccgatgcttacgacaacaatgctatgggcgtttgtgccgatttgtgtgcttcagaatatggtattacaagagaagatcaagatgctttcgctattcaatcctacgagcgttcagctaaggcttgggcggaaggtaagtttgacaacgaagtcgtaccggtagaaattccgcaacgtcgtggcgagccgattgtatttgctaaagacgaagaattctccaacgtgaaattagataaaatcccatccttaaatcctgtgtttactaaagacggaacggtaacggcggccaatgcttctactattaatgacggtgctgcagctttagttctaatgagcgaagaaaaagcacttgctttaggtttaaaaccattggcttatatcaaatcctacgctgatgccgctcaggaaccaaaatggtttaccaccgcaccggccaaagccttaccaaaagccttagacaaagccggaatttcggtagccgatgtagactatttcgagttcaacgaagcttttgcagtggttggtttggctaatgctaaaatcttaggcttagacaacaataaaatcaatgtgaacggtggtgctgtctctttaggccatccgttgggatgttccggagccagaatcatagtgactttaattaatgtgttagaacaaaataacgcaaaaatcggtgctgcagccatctgtaacggtggcggtggcgcttctgctattgtaatcgaaagagcttaaaaaaattacgaattacgaattatgaattacgaaacaattcataattcgtaatttataattcataattgattgagatgtttgccatttgtaaccttgccataattcctttacgagccgagcctagtgaccgaagcgaaattgtttcgcaggtgttgtttggtgagcattttgaaatcttggaaagacaaaaccaatgggctaaaatcaagttgcagttcgacggctatgaaggctgggttgattccaaacaataccaaattatttcagagaagaatttcaacgatttatccaaagaagccatcattttaaatgctgatttggtggaatacgtcaccaatgccaaaaacatgctcttgccgattccgcttggcgcttcgctatcgtttttaaaccacagcgaaatcaatacagaagggtttcattttgaaggattaagaaccagtggcatcaaacccaaatccgatttgatcaccacagcttaccaatatttgaatgcaccttatctttggggcggcaaaacgccattcggaattgattgttccggttttacgcaaatggtatacaaactcaacggctatcatttgcttcgcgatgcttcacaacaagccggtcaaggcgatgcgctgagttttattgaagaaagtgaaccgggagatttagccttttttgacaacgacgaaggcaaaatcatccacgtgggcatcatgatggaaaacaactacatcatccacgccagcgggaaagtcagaatagatcgtttagaccatttaggaatttacaatgcagaacaaaaccgacacacccatcgattgcgcgtcattaagaaaattatataaaccaaaacaaagttttggttttttttattacattagtttcttaatcccttataaatgaaacctttttacaaaatttcaatccttgctctttgcctagttctcgtgagttgttttaaagaaaaaaacagtgataatcccgaagatcgttaccaacctaaagaattcgttgaagttaaacatcctgaatggagcaaaaatgctaccatttacgaagtgaatgtacgacaatttaccccggaaggtacttttaaagcttttgaagcgcatttacccagaataaaaaaaatgggaatcgatatcatttggctcatgccgattcatccgataggcattgaaaaaagaaaaggtactttaggcagttattattcggtgaaagattattacggtatcaatcctgaatttggcactaaagccgacttcaagcatctggtagataaaatccacagtatgggtatgtatgttattgtagattgggtagccaatcactcttcctgggacaatccgctagccaaagaacatccggattggtacaccaaaaccgaagaaggaaattttcaacccacaccatggtatgattgggatgatgtaatcgactttgattacgacaagcccggcattagaaaatacatgaccgaagccttggtgtattgggtaaaagatttcaatatagacggatatcgttgtgatacagctggatttattccgaccgatttttggaacaatgcccgagccgaaatggacgctgttaaacccgtttttatgttggccgaatgggaatcaagagatttgcatcaaaaagctttcgatatgacttactcctggacattctgggacaaaatggcggcggtcacccgagataaaaaaagcattggcggcttggtagaatatatggcgcacgatgtaagcacttttccgcgagatggttaccgcatgctatttaccgacaaccacgatatgaattcatggaacaaaaacatgatttataatttcggaaacggcttggaagcttctatcgttttaaccggaactgttaacggaatgcccttggtttatggcggacaagaagccggtttagatcgttcgcttgcctttttcgaaaaagatttaatcgattggagtcaaatgccatacgaaggcttgttcaaaacactatttgatttaaaacaccgcaatcatgcgttgtggaatggtaaagaaggcggtgtaatggttagggtttacaacgataaaatggaacaagtgatttccttttcacgaaccaaagacaaagatagggtcattccggttattaattacagtgacaaaccggtaaccgtaaaactcaacgctaaacacctaaaaggcgattataccgaggttttttcagggaaaaaaatcaccttgaatggcgatgatgtgtttacccttaaaccttgggaatatttggttttagaaaaataaatgctccgtttcaaccatcataaaaaattcactttatcattttgagagagtggttttttttatgggtataagtagtcattatcagtataattcgctatatttgataaggacttttacttaatttcaatctatggaaaacgattccaaagtggtaacctcatttaaaaattttttaattgaaattggtgaactctcctattttacgggtcgtttcttcaaagaactattcaatcctcctttcgaattcaaagaattttggcgacaatgttacaacatgggtaatcgctcgttactgttggtgagcgtaaccggttttatcatcggattggtttttacacttcaatcccgaccaaccttggaagaatttggcgccgtatcttggattccttctatggtcagtatttctattattagagaaatcgggccgattatcaccgctttaatttgtgcggggagaattggttcgggtatcggagccgaattaggttctatgcgcgttaccgaacaaattgacgccatggaagtttccggaactaatccgtataaatatttagtagttacccgaattttagccaccacagttatgttacctattttggttttctttggggatgctattgccattttcggttcggctttggtagaaaacatgaaagggaatgtctctttcctactctattttaatcaggttttcaatagtttgcaattcagcgatatcattcccactactttcaaaaccttctttttcggctttgccatcggtttggttggctgttacaaaggatacaattgtaaaaaaggaaccgccggcgttggtttagcggccaattctgccgtggtatacacttcaatgttgttgtttatcattgattttattgctgtatttgtcactaatattttttacagttaaaccatggagaaaaaaccgatcatcactattgaaaatcttcacaaaagttttggcgacaattgtgttctcgatggtttcaacatgcaattatacgaaggtgaaaacctagtgattatgggcaaatcaggctcgggaaaatcggtcatgatcaaatgtttgattggcttagaagaacccgatagcggtaccataaccgtaatggggaaaaacatcaaccaattagagcaagccgaattggacgaactccgaactgaaatcggatttttgttccaaggcagtgctttatacgattccatgtcggtgagagaaaatttagagttcccgcttcgacgtcataccaaaaaattcggcatcatcaaagatactactcctatggtcatggaagctctggagaatgtaggtttggcgcacgccatcgatttaatgcccagcgaattatccggaggaatgaaacgaagaattgctttggctcggaccttaatcttacagccgaaaatcatcttatatgatgaaccaactaccggattagatccgataacctccaaagaaattattttattaatgatgtcgattcagaaaaaatacaacacctcttccatcattattacccatgatgttgattgtgcgcgggttattgccaaccgtatgatattattaatagacagtattaattatgccgaaggtacttttgaaacactatccgcttcagaagatccgaaaattaaagccttttttaagtaaattagccctatggaaaaaacagcatctcaaaaaatccgccttggtctgttcgttattattggtctgtctttatttgtattgaccatctattttattggcagcaagcaacaaatgtttggtaaaaccgaacccttaactgctgtttttgacaatgtatccggtttgcaattgggtaataatgttcggtattcaggtattaatgtcggtacggtacgaggtattgaaattgtcaacgattctaccatcaatgttgcgatggaaattgacagaagtgtttttccgcacctcaaaaaaaatgcggtggccactattggttccgatggattggtaggcagtgtcattattaacatcatccccggtaaaggtgaagcacttccagtgcaacccggagactttatcaaatccaataaccgaatccgcactgacgatatgttgagcaccttaaacgtcaccaacgaaaatgccgcgcaactgacagccgacttgctcaaaataaccaacgacatcaataacggaaaaggaacgattggtgtattacttcgcgactcggctatggcaaacgatttaaaagctaccattcacaacctgaaaattaccagcgaaaaaacaagtaaaaccatggacaatttgaaccgacaaatagccggtttagatcataaagacaatgtaattggtgttttaaaagataccgtagtgggcaataaaataagacatatagtgaccaatttagattcttcaagccaagaaatcaataaagtggtggcgaatttaaatgctaccatttccaatgtcaaagacggcaaaggtgccatcaattatttatcaaacaaccctaaattggtaaagcaaatcgactcaacgatgaccaacatcaaccaagccagtcaaaaactaaatgaaaatttagaagcactgaaaagcaatttcttattccgcggttattttaaaaaacaagccaaggctaaaaagaaagcggctgccggaaaatcctaaataaaaaaatctgctcgaaagcagattttttgtttaatatataatgcggattacttcagtaaaaagttaagtccaacattcaaactcgagcggctattagtaactctcgaaaactcattgactttaaaaatatcactaacaccgccttgaccttcgtattcaaaaaacaatttaagtttgtcggaaaccggaatttttacacctattcctaaagccaaaccaaaatcggttgaactgaaaccatcggttacatcagttccaaaacgaacatcttcggcatttaacaagaatcccatatacggaccaaactctaaaaaccaattcctcttgcttccgaaatgccaattggccattacaggtaccgttaagtaattaacgttaaaatcggttacataactaaatccatcgctgtcttcaataaaaccgttgtcccaacctttttgatcgtaaatcaatttgcctttaatactccaaccatctgaaaaataataatccacagaaccgccaacgttaaatccaatagctgaatcggcagaaacatccgaattggaaatcgttgaattgttgtaaccaacattaaaaccaaattctacatcgcctttcttttgggcaaccactgcagcagtaaaacctaaagccaacgctgctgataagaatatctttctcatagttaattgtttaagtgactcaaatatagtaaatcaaaccaaaatttaaacttcttgcaaagctttaatcaaataatcgatgtctgccgtagtgttataatgactgaaagaaatgcgcagactcggtttagccaaatcggcctccgaaagcatttcagccaaaacgtgagacggtttgatactgccactctgacaagcactaccgcgagaaaccgcaatccctttcatatccaaattgaataaaatcatcgctgttttttcaggcgaaaaaggcaaagctacgtttaagatgttgtaaaaagtattactgccgttgggctttacatcgggaaaagccgtttgcaattgacccaaacaataggtttttaaatcattgatatagcgggtttcttcttctaaatgttcatacgccaattccaacgctttggccattccggctatttgatgtaccgcttcggtaccggcgcgccagcctttttcttgttcaccgccaaaaagtaatggttgtaacaccaaactctttcgtacaaaagcaaagccaatccctttcggtccgtggaacttgtgcgcactcgacactaaaaagtcaatcggcacttgctgcaaatcgatcactgttttccctatagattgtactgtatcacaatgaaataaagcatgatgctgttggcaaagcaaggctattctaaccatatcgctcataacacctgtttcattattcacatgcaacagcgacaccaaagttttaacatcaacttgcaataaatcttccaattgcgcatagtttaaactgccgtcgggattaacattgaggtagtcgactgcaatgccaaactcttcttgcaaggctttcaccgtgtacaatgtggcgtgatgctctaccttggaagtgatgattctttttacgccgaaatctttcacggcacttctcaaaatccaattagtagcttcggtagcactcgaagtaaatacaatttccgaggcagcactatgcaacagcttggctatcgttttgcgggaagtttctataacagctttagcacttcggccggcactgtgtgtggaagacggattaccaaaatcggtttgcattacgcgtaccatttcatctatcacttcctgacgaatgggcgtagtagcggcgttgtcgagatatactttttgcatggtgcaaatatataaaacgactatcctaattaaatgataaaagatacattttgtagggtaaaaaagttatttttgctaaaaattttctatccatgaaacgactcttagggatattgacagccttacttttaatcaccgcttgcgatgatggcgatttaaccgtagacacgattgattttagcgaagttaacgcgcaaaagtgtagcagcaaagacgttatttataaagtaaaagacagcgaaatgctgattttagccataccggccagtaattttgacaacgatgaaaccccggaaggcgaccctattgaagttaacatcagttcttctgtagaagtcatttaccgccaatacaatggtgacgccagtgccgacaacatctgccctaccgtaccttctgcaacccctaatttattagaagaatggaatgccgttgccggaacggtccaaattacgactacagctgtaaaaaccgtaaattctacaaccggaattacacaaattaccggttacaaacactttgtcgtatttaaagacattacgttccaaaaaccaaacggtacgcaagtatacgaaacttacacttttggaaattatactactacagtttctccgttggcttttggctttaatgaagaagctgaaaaaagcacctgtgacaaccgtatttttaattttagtggaggcgaatcttttatcctagatttagccgattacagtacgttattacaaaacgaacaaaccactacgccaagaacagcattaattagtgcgaccaataaagcaacttaccgtttgtttagcggtccggttaacgacgcttatttttgtgccgctactactccaaccacacctactctttctcaagaatggacagccaatgatggtgtagccgatgtaagcggtattattgaagtcagcactactactttcggtagcggatttcagcataccattcgtttgaaaaaggtcaccatgagcagaggaaattcaagcttttacttgggcgatgactacatttacggttcggtaatcactccttaactgaacgttaaacctttttatgtcaaaaacggatttctgtacttttaccaaaaaataacacatgccaaccgactgtatcagctatcaaaaatcaggttacttctctaaactcatcgtcgattatttagagcaaaagcccgaattgaaagcgttatacagcaggtttccgacactggaaaactttcggttacaattagcggaaaaagagctggaatacaatatcaatgataacagaaatactttagttcattctttagaacaacagtaccaaggttttgtaatttcagaagttacccaaaataacctcaaacttttatccgatactaaaacctttacggtcactaccggacaccaactgaatttgttcagcggacctttgtactttttgtacaaaattgtgtccaccatcaacctttgcaaggaactgaaacaagcttatcctgattataattttgtaccgatttactggatggcaacggaagatcacgattttgctgagattaattatttttatttcaaacaggccaaaatgcaatggctacgagaaagtaacggtccggttggccgtttgtccacagctggtttagaggaagtttacgaagtttttgcccaagagcttggcttaggtgataatgcaaactatttgaaattgttgtttgaggaaagctatttaaagcattccaatttagccgatgccacccgatatttagccaatgaattgttcggcaaccaaggcttggtcatcattgatggtgatgatgtggctttaaaacaacttttcacgccatttatcaaacaagaactgttgcaacaaacggcttttgaaaaagtcaaccaaaccaacgaaattctgaaagattacaccatacaagttaatccgcgtgagattaatttgttttacatagaagacaacatccgtgagcgtattgttttagaagacggactttacaaagtaaatcaaaccaacttggtttttacacaagaggagatcttggctttagccgattcaaatccggaaaaattcagcccgaacgttatattacgaccgctataccaagaagtcattttacccaatttgtgttatataggcggcggcggtgaaattgcctattggttacaattaaaatcaaacttcgaagctaacaaaatcagcttccccatacttttagtgcgcaactctgccctattggctacagagaaacaatcgcaacaagccgataagttaggattgtcatggactgatttatttagtaatcagcaagaattattcaatcgaaaaacccaagaattctcgcagtttaacttagattttaccgcgcaaaaggaacatttaaaacaacaattcgccggtttacaccaaatggcattgcaaaccgacagctcttttggtaaagctgtaaaagctcaggaagtaaaacaactcaaaggattggaaaacttagaaaaacgtttgctcaaagcggagaaacgccaacatgctgatgccttggagcgtatcatacaactacaaaacgagctcttccccaatcaatctttacaggaaagacgcaataatttctcggagttttaccttgaattcggtcatgaattcatccagaaactgcatgacaacctaaaaccattagcgtcaaacttcacaattttagttttataaaatgtttacttgcaaatagcctaaaaaacgttacttttgcacgcaaaaaaaaggcatagcgcccaacacagaagtaaatttaaattcatttatatcaaaatggcaacaaacagaacttttaccatgattaaaccggatgctgttgaaaaaggacacatcggtggtattttaaatatgattactgaaggtggtttcagaattgtagcaatgaaattaacacaattgactgtagctgatgctcaaaaattctatgcagtacactcggaaagacctttctttggtgagttagtagagtttatgactcgcggaccaattgtagcagctatcttagaaaaagacaatgctgttgaagatttcagaactttaatcggtgctactaacccggctgaagctgcagaaggcaccatccgtaaaaaatatgctacttctatcggtgaaaacgctgttcacggttcagactctgatgagaatgccgctatcgaaggtgctttccactttgcaggaagagagcaattttaataagtcatcagaatacaaagtttgtattcaaaatagtaaaatcccgcttcgttttgagcgggatttttttttgcattagatttaaaagattgattgttatgcgagaatattataaatcaagtgttaaaaataaaaaagtattaatttcaaatattacttttaaggtatgatatcatgtcaacaactaattcaatattatagctgtaaatgattcctataattatttaaagtacgtgcatattctcaagtggtaaaatccttatattcgtttatctaaatccttgcttatgccttttacctttgccatttctcccaatcgaacaccattcaaacaaaaccctttgttgtggctttttttgtcgagtttcttagtattatggataagtacacttttgggaaccaacgacctcaacaattggctgttagaaaataccttaactgtacttttctttttgtttttaattgtaagttataagaaataccaattcagtgacctatcttacctcctaatcacagtatatttatgtctgcacgtttacggtgctaaatatacttatgccgaaaacccttttggctattggcttaaagactatatgagttgggaacgcaatcattatgacagaatagtccactttagctttggctttttactggcttaccctatgagggaattgtttttaaaatgggttaaatacccaaacttggtggcttgggtgttacctatagaaattactttatcagtaagcggcttttacgagttgatagaatgggctgtggccgacatctttttcccatctcaaggcgatgcttatttgggaactcaaggcgatatttgggatgcgcaaaaagatatatttctggcttttttgggtgccatattggccaccactatagttagcctcatcaaaaaaatattcaaattaaatgaggttaagtaagacaatagcgtgtgtaacactgataacacaactcgttttcggacagaataataccacctccattcgcaacttggatccggtttcagaagaatacacctttcctgaaatacaaacagctcccaaaacaaaaattggtgaaaaaataaacacctttttgcaattacactacttacagcacttaccgggcatttttaaaaaaactccttttgagaaagtcacctacgacagcccggaaaatcaaggtggctcctatctgttttatggatggactaaagaagatacacctcctaacgtattaagtctaaccatgagtaccgagtttagtggtgcttatcttgaaggctatgagagccacgaaaattttgacctccgtaccggaaattatcttttagtaaccgatatcattcggcccgaaaagcatactttactggcccagcaagtgaatactatcgtaaaaaaagaaatcactgcttttctttcagagacaaaaaagaacttaactgaaattgatagtatatcccaacgcgaattgttcgatcgctaccaagaacaaattgaattatacgaaaactgcttgtccgactataccgaataccaattgggtgattttgattactatttctccaaaaaccaactacacctgttaagaggtcgctgttcaagtcatgtgaatcgagctgttgatgatctatacctatttgatctaccgttttcttacgccgatttgcttcctttactttctgattacggcaagaacgtgctatacgatactcatctcaaaaattacaacagtgctcagcctatcgggaaaatgtttaaaggaaaaattggcaacaatgccgtcacgtttgtgttgccaaacatcaattacgacaattccttaaccattgcctattggtacgacaaatacaaaaaaccaattgaatgtcacggtacttttaaagacaatcacttttatttcagggaacaaagtgctgatgacttttcaggattgataggtgttattgaggccaaatgggaaaacggaaccataaaaggcgtttggattaatcacaaaaccaagaaagagtatccgttgatactaacaacctattaagattttttttgaagtattgataacttttgacttcagaaattatactactttcaaaaaaataaaaaaaatagctttaatttgtagtaaacaaacaacaccatgctatttgaccctaacctgcttgagccatcagcagtgtataaattaatgacaggcgctatcattcccagacctatcggatggatagccaccgtgagcgaagacggcatcaacaacctcgcaccattttcctatttcaatgctgccggagaagatccgccgcacatcatgttttctgtaaacagagccaatcactccaataaagacaccttaaacaacatactcgctaacggtcaatttgtggtaaacatggtcaccgaaaacacggtggaacaaatgaacaccacagcgcaatcggttccggctgaagtagacgagtttgtcttagccggtgtcactcctattccatccgtaaaaataaaaccgatgcgcgtagccgaaagtccggtgcaattggaatgcgaactggtccatcattactttctcgaagatcataaaaacggtggttcctgtatcgtcatcgggcgcattgtgatgatgcattttgacgatgccgttttgttagacaattacaaaatcaatttagaaacctataagccgatagcgcgattagcaggctccaattatgccaaattaggagaattgttctccatcaaacgaggctaaataaaaggactcagcaacttagttactcagtcactcagaaactttaaaatatgaaaatagcaataataggcggcggtccgggcggactctacttctccatcctaaccaaaaaagcaatgccgcattgccaaattgatgtttacgaacgcaacaaacccgacgacagtttcggatttggcgtagttttctccgatgaaactttgggagaattccttaaacgcgatatgcagtcgtatgaattaattcgaagtcaatttgcctattgggacgacatcatcgtggctcgagacggtcaagaagtcagcatagccggtaacggtttttgtggttgttcccgaaaaacattgcttaaattattgcaccaacgttgtcgagaagaaggtgttaacctgcatttcgaacaaaatatagatgacatcagtaaataccaagacgccgatatcatattggcttccgatggcatcagcagcggtatccgaacacaatatgaatcagcattcggcaccaaaatcacactaaagaaaaaccgctttgtatggttaggctcgaccaaacccttggatgcttttacttatttcttccgaagtacacctcacggcaccatcgtagcacacacataccaatacgaagccggcatgagcacctggatttttgaatgcagtgatgaaacctggcaaaagcacggttttgaagtcaccaacgaagccgataccataaccaaaatctcagaaatatttaaagaagaactcgacggtcatccactcatttccaacaaatcgcattggcgtcaatttccgcacgtaacgaataaaaaatggtaccacaacaacatcgtgttacttggtgatgccaaagccactgcgcactactcaatcggctcaggaaccaaactggccatggattgcgccatcggtttatccgacgccgttattgccaatccgaataacgtgcaagccgctttcgaacaatacgataaaacccgtcgcaatacagtagaaatgatacaatatgctgccttggtttcgctcgattggtttgaaaacatggaccgacacatgcagcacccgttttaccaatttgctttcggttgcatgacgcgttccaaaaaagtcacttatgaaaacttaagactccgcgacaaatcgtttacagataaagtattggcagaatttcatcaaaacgcagtcatcccgagcacagtcgagggaccggctgctttcacccaattcaaactacgtgatttagaattgcaaaaccgcatcgtcatgtcggctatgggacaatatgctgctacagaaggtaaagtatccgattggcatttggtgcattacggcagcagagccaccggtggtgttggactaattattaccgaaatgacatcggtctccaaaaccggatgcatcactttaggttgtgccggaatttacaatcaggaacaaatagttgactggaaaaaaataaccgaatttatccatcaaaatacccaaaccaaaatcggaatccaactaggccattccggacgcaaaggcgctactaaaaaaccttgggaaggcgttaatgaaccgatagatttaccttgggatttaatttcagcctcggctatcgcgttcaatgaaaagatgccgattcccaaagcaatgactttggaagatatggatttgataaccgaacaatttgtgcaagctgctcataatgctgacaaagctggtttcgatctaatcgaattgcaagcgcatcacggattcttattggcttcgttcctatcgcctttaaccaacatacgcaccgatgaatttggcggcagtatcgaaaaccgattaaaattcccaattagagttttctcagaaatgcgaaaagtattcccgacacacaaacccatgtcggtgagaatctccgcttccgattgggcggaaaacggaatcactgaagaagaagtgatcaccatatcaacagccttcaaaaatgccggagccgatatcataaacgtttccaccggcaataccgtagcgcatcaaaaaccacaagtcggcagaatgtggcaaacaccgttctccgacgccgttaaaaatactgttcacatcccaaccatcacagcaggttatatccaagatatagatcaaatcaacaccatattactcaacggtagagctgatttagtggcgctgggccgaccattattagccgacgccaattttatgagaaatgcgcaagcctacgaacaattcgaagccacagacattcacaattcctataaagccggaagttctcatctctatccgctaaaagccgccgagagaaaacaaaccgaaagcatgaagaaagccttaaaaccaaagagtaataaaaaacaataatactcagcaaatcagttactcagtcactttacaatgaaacactacgaagataattttgcacacaaccatctcccaagcgccgacttacaaccggactatgtgttcttagacttaccacaattccatcaacctgaaatgctgaattgtgtcgatttgcttttggacaaacacattcgtaatggtcatggtaacgctccttgtcttcgcacctttgaatacacttggacctacaatgacttgtacgaaaaagcgaaccaaatagcacatgttttggtggacgatttgggactgaaatcgggcaatcgcgttttgattcgttctgccaacaacccgatgatggtcgctgtttggtttgcggttttaaaagcgggcggtattgttgtggctacgatgcctttgttacgtgccaaagaactaaccactataatcgactgtgccgaaatctcacacgccatctgcgatcacagtttggccgatgaaatgcacttggccaaatccgagtttctacaatcggtttgcttttacggtaattcgcagttggaggaattgatggccaacaaacccaaaacgttttcaaattaccatactaaatcagacagcatcgctttgatcggatttacttcgggaaccacaggtttgcctaaaatgacttcgcactttcacaaagacattgtcaacatctgcgaaacctttccgcaatattccttacaaccaacagctgatgatatttttaccggcagtccgccactcggatttacttttggtttgggcggattggtcttatttccgctgtattttggggcttcctctttcttgttggaaaaaccatcgccggatatgctgttgcaagccatacaagattttaaaatcaccatttgctttaccgcaccaacggcctggcgcatcatcacgaccaaagtcggggatttcaatatttcaagcttgcgtaaatgtgtatcagccggagaaactttaccgctcaaagtttggcaagattggtacgacgctaccggtttaaaaatcatcgacggcatcggtgctaccgaaatgttgcatatctttatctcatcgaatactaacaatatgaaacccggcgctaccggcgtagccatcaccggttacgaagccaaagtggtagatgaaaacggtaataaagtaccaaccaacgaacccggcaaactcatggtgcgcggcattaccggctgtaaatatttgaaccgagaagacaaacaacgcgaatacgtgcaaaacggttggaactttaccggcgatattttccgccaggatgaagacggctatttttggtttgtggcacgcggtgatgatatgattatttcttcgggctataatattgcggctatcgaagtggaaagtgttttgttaacccacgaagaaatactcgaatgcgccgtagtaggattgcccgatgaggaacgaggcatgctggtttgtgcacacattgtattgaaagacgcaactaaagctaccgataatatgaaaaaccatattcaacattggttcaaagaagtagccgcgccctataaatatccgagagtaatttattttaccgatacgctgcccaaaacagagaccggaaaaatacaacgatttaaattgaaatagtagtaagatttgaatattaagactgaaatgtttcaccgtttttaaatccgtttaatccgtggctaaaaacttttaaaaaaattatctaattcgtggcaaaaattaaaactatgaaccaaacctttaacaaaccggaaaaaatacgtttcaaacacgtcgattacgccggtatcgttttctatccgcgctttttagaaatgctcaacgacttggtcgaagattggtttgaagaagccctcgaccgaccgttctccaaaattcacgagaccaacggcattccaaccgtggatttaaaagtccaattcaaaaaagccgcgcgaattggagaactgttaaccaaaaaactttgggtcatcaaacttggcggtgcttccgtaacttgcggtttccgttttgaagacgaacaaggcaatacttgtttggaaggcgaagttacattggttaacgttagcatcagcaatggcagagacgccattaaagccgagccgttttcggaagaaatgaaagcaaagattattgaatatcaaattggctaaaatgggagatttaaaaacctttatgagcttgaccgatgctgaggtagcaagagaaattactgctattttggaaactaataaagttccgttttttctgcaagacacttctaaggatttcgatgttacctttgccaataacgaagctaaaaacgctttcttaattatgcttcacccaagcgattttgaaaaggcatctatagttttagaacaacaaacgcaattagatttcaataacattaacccacaacatcccttactttccttttctattgaggaattgaaagaggtagtaaaaaactttgacgaatggcatcctgttgatgtaaagttggcgaaacatttattaagccaacaaaatattgtggttgaaactaccgaaatcaaaaaacaacaaacattaaaagaattagaatcttttaagcctgaaaagtcaagcaccataaccctattattgggctataccttttgtttgatgggaggatttgcaggtattggaattgccttatttctaatgactgctaaaagaagtctccccgacgggacaagaaaatacatttactcaaatgccgatagaaaacatggcttttacatgctattggccggtgtaatactttttataattaccttactttattttgaattcgaatcatatggactttaaaaaattcaaagccgccaccgtacaaacggcacccgtatttctcaatgtagaaaaaacgatagccaaagtgattgcttttgtcaaagaagctgccgataacggagctcaactaattgcctttcccgaagtattcgtagccggttatccgtattggaattggattatgacgcccgtacaaggcagtaaatggtacgagcaattgtataaaaactcagtagccgttgatgatgaaagtatgcaaccgcttttccaagcggccaaagaccacaacatgcatattgttatcggcatcaacgaacgtggtagcagctacggcgaaatttacaacaccaacctaatcatcgacaatcacggtaagctaatcggcaaacaccgtaaattagtgccgacttgggctgaaaagctcacgtggacttccggcgatggttcttcgctaaaagtttatgatactgaagttggtccgttaggcactttagcttgtggggaaaacaccaatactttagcgcgttttactttgttgtcgcaaggcgaattggtacacatagccaattacatttcccttccggtagcgccacccgattacgacatggcggaagcgattaagattcgtgccgcagcgcattcgtttgaaggcaaattatttaccatcgtttcttgttctaccatttcccaagaaattaaagacgctttgcgagaagatgtgcctaatgtagacgaattgttatcccgaaaaagctccgccttttccggatttatcggaccaaatggcgctgttattggtacacctttgattgacgatgaaggcattgtttatgccgatatcgacttagagaaatgcatccaaccgaagcaaatgcacgacattctcggacattacaaccgatttgacatttttgatttaagagtcaataccgctccaaccagaaagattacctttgtagataaccacgaggagtttaatcaaaataaactaagaaccacagattaaaatgattttcacagattttttgaaatcctttaaatcttgttaaatctgtggcaaaaaaataaaataatggaaacaaataacttttcagacgacgttatcgggcgtgcccgtgtacaagacacacctgaactcgaagcctattataaagaattagaaaccttaggagccggagcactttggacagtagccaacgatattgaaccttgggaaccccgagcgaattcggcacctatgttgtggaaatacgacgacttgcgcagtttagttttaaaatcttccgaactcgtaacgccggaacaagccggaagacgcgtggtgtatttggtaaacgataaaaggaaagacgtttctgccgccgtaggttggttgtacaccggaatccaagttacccgcccgggtgaaagtacttcggcgcatcgccaccgtgcctctgccctacgctttatcatggaaggttctaaaggctataccgtagtagacgggaataaaatcatgctggaagtcaacgattttgtcatcacacccaattcggcttggcatgaacacggtgtggaagccgacggacaaacctgcatttggcaagacggtttggatattccgctcgtcaatgctttggaagctaatgattatgccgtgtatgatggaaaacaacctttaacagcgccaattaatcaatcgcctttaacttatggaggtgcgggtttaattccggccgatcaaacttgggacaaaccctattcgccattgttcaaatattcttggagtaaagtatatccaacactgttagaagtcgccaaagtcaacgaaatcaatccgtttgacggattcttaatgcaatattccaatccgttaactggtggacatgtgatgcaaaccatgggtgcagcgatgcagttgttaccggccggtttcaagggcaaagcgcacaaacataccggttcttttgtgtaccaatgcgccaaaggaagcggttataccatcatcaacggccaacgttttgattggaaagaacgcgatattttttgtgtgccgagttgggcttggcacgaacaccataatgcatcggacactgaagatgcttgcttgtttaacttcaacgatttgccggtcattgaaagtctcggattatttcaaggaagaacatatgaggaaaacaacggacatcaattaataacaaaataaaaaactcaggaaatcagttccttagcaacataaaacaaatgaaactacttacctaccaaactgccgacaccgaaccccgtttaggattccttcacaacaaccaagtcatcgatatggaagactttggtgagatttctaatttcccattaccttctgacatgttggacttgattgacatgggcattgaaattatagatgaattgaacgaaatggtagccgatacaccaagtgattactttaaagaaatcgcttatagcttagaagaagtaacgcttttggctccgattcagaaaccgagaaaaaacatcatcggtattggcttaaactataccgaacacgtggcggaaagtgcccgaactctagacactaccggaaagttaccgcaaaaaccaatcattttttcgaaaccacccacaacggttaccggaaccaataccgagattattaagaacactaaactgacttcgcaattggattgggaagtggaattggccgtcgtaatcggtaaacacgggaaatatgtgtcgaaagcagatgccttggattatgtttttggttatacggttatcaacgatatttccgcacgtgattgccgccgtgagggccaatggattgtttccaaaggacaagatacttttgcgcctatgggacctattttagtgaccaaagatgaaattgaaaacccgcacaacctaaacttgtctttaaaagtaaacggtatcgaaaaacaaaattccaatacaaaattcatgcttttcaacattaacgatttgattgaagatttgagtatcgtatttactttagaaccgggagacattattgcaacaggaactccggccggtgttggtgcaggacgcgatcctcaagaatggttgcaccacggtgatgtggtagaagctacggtggaaggcattggaacgatagtgaatacggtgaaggagatttagagaaaagaaaagagacgaagagaaaatagatgtttatgcgttagggattacagtggaaatccttttgttttgatacactgtcccgaagtttcggaagtagaagtgcaaaacaaaagattgtaacggaaagcccgaccccgtccccaagacgaggaaacgcgcacccatcgacaagctcagggtgacaaaaacaaaatcagagatatgaaaaaatatagaataggacaaatagttccctcgtcaaacgtgacaatggaaaccgaaataccggccattttcagggccagagaaagcatactaccggaacgttttacgtttcacagcagtcgcatgcgaatgaaaaaagtaaccaaagaagaactcgaagccatggatgccatgagtttgaaatgtgcccaagaattgtcggacgcccatgtggatgtaatgggttacgcttgtttggtagccattatgagtatgggacgcggttatcattgtgtttcggaagtaaatttacatcaggaaacggtggcgaacgacttccctacgcctattgtaacttcggccggagctttaattaatggtctgaaagtattgggtgctaaacaaatttcaatcatcacgccttatatgcgcccgctgaccgacaaagtggtcgattatatagaacaccaaggcatcaaagtaaaagaaagtatagctttggaaattcccgataatttggaagtggccgcgcaaaacccgctcaacttattggaaatttacaaacaactcgacttaacggatgtaaatgtattggtagcttcagcttgtgtacaaatgccttctttggaagccatcgatttaatccaagccgaatgcggcataccggtaacttcagctgccgtgtgtaccacgtatgaaatgatgaaaaagctcggtattgaagccaaatcaaccataggcggcgaattgctcaacgggaagtattaatgaattggctttttatcatagtaaccctattaccgttccttggctatggtattgatggttataatgaaaaaaatatccctaaggccatttataccgttggattatttttcgttttggctacagttgcagtgtcttgtactatgcttttcagattgtattttgtttttatcgttccatttctattaatagggttagtcctaaccagtaaaagcttagtcaaaaaaaagcaaactacaactgtacagaattttgtaccttacagtcactaaaaatcacaaaaaaattaggtatgaaaagaagagcaactgccgtttggaacggctcaggtaaagacggtaaaggtcatttgaccacccaaagcaccgttttaaatcagacacagtattcctttggttctcgttttgaagaaggcatcggaaccaatcccgaagagttagtcggtgccgcacatgccggctgtttctccatgaaactagctttcaatttacaagcagcaggatttactgctacgaagttgaaaaccgatgcggagattgtttttgaagacggaagtatagtagcttctaatctaaccttggccgccaaggtagaaggaattgacaacgctaaatttgacgaattggtcaaagatgcggaagccaattgtccgatttcgaagttattgaatacaaaaataagcgtgacttataccctaaactaaaaaagaaaggaggctaaaaacctcctttttttatcctgctaccgaaatgccaatcagttttccgataccgaaagtgatggtcgctgctgctaatccgaaaatcacctgacgcatacccgaataccaaacactttttccggtaaacaaggtaatggctgctccgattaaaaataaaccggcggcactcaacactgtactaataattacggcttgcatcccgctccaaaagaaaaacggaaataccggtataatggctccaatggcaaacaaaaagaaggatgtcagcgctgcttccatagctgagcctttcaaatcttcagggttaatgcctaattcttctttaatcaacagctcgtgagcctgacttttattttgcatcaactcagccgccatggttttggcttgcgcctcgggtatgcctttagccatataaatcaaagccaattcttgttgttcgccttccggattggtttctaactcctccatttccaattgcatctgattttcgtataattcttgagaactttttaccgaaatccattcgcccaaagccatcgatagcgctccggctaacaaccctgccattccggccaatagcacttcatcctgaccaccggtggcgccagctattcccatcaccaaactgaaattagaaaccaaaccgtcattaccacctaaaacagcagctcttagagcattaccgccaacagagcgatggcgcttttcaaatcgggctaaattggctcccgatacattggagctattgttgaggatatttttcaatatggcaacatgcgcggtatctgatattgactcttgggtttgactttgctttctggctttaagtatggaagaggaaacgcttttttctgtatccaataaaacacctaaaatataatcgtaaccaaagcatttgccaatccaatgcagtgtcttcgctcttccggaaggatttggtaaatgactttcatccaaattgtttttggctaaaaaagccaaggcgtgactgtgttctatagcactcatttgcttgaaaacaatagccacgttggggtcgttttcgttttccgctaaaatttgatagaggtagcaaacatctacttcggtttggatacttttaagactaatcataatcaaactatttgtacattaaagttacgaagaaagtgagtaccgaaatcataggtgcctcagaaacaattaacaaaaaaacaggtaagaaaatcgcactaaaaatcgatggtgaagatttgtttggtatatttggtttctgcaaatgatatttcggtatgaagatggacaaactcaccaaacaactcgaactgacgcacgaacaaacttcgcctttgttccgaattatgtttacccaaaatctggaagaggctcaacgccgccattttgagaataatatttgcgctttccatattggacaagggtattttttgaccgtagcgcacaatttgaaaaccgaggctaaaatattcaagtctatcgatacgagtctttttgaacgcgatatacttccttttttaaaccaaccccagcgacaattatttgacaactgttttcatctcaatcccgaacagcaaagctattattggaacagcaataatcctaatgattttaatgcgatgatagatgctttgcgacaaatcaatttcgatacgcgttgggtaacttttttagagaaaaaaatctgccaagcccatttgattgtacaattcaaagaaccgctgttttaccaaaacgccaacttgacaaaccatttcaatgccaatacaaattttgccgaaccggccattaaccgacatacttttttgatagaagtagcgctggttgaagccttctatgctgatgacatcgctttgtataaaattgtaaacacacctcaagaaattattgatgctatgccggcagtaaaagtcaatttcgatattttacccgatagccaagaccatttttacggcttgcaaagttcgcccaccagtgaagttggtaaactattgaacaaagcccaaattgaaggttttaccgagcacttttccattttcccggaacgcattggtggtaattatgtcttggaaggattgcgctatttaatcaaaggctatttccgatttggttcatcgggtgcaccttatttagtgtataattcggagctcaatgaatttgaagccaatgccattcaaagtgaagcctgcccaattcaattgtccatcagcaataaacgagacggcaattttcagtatgtgaatgccatcgctacacctttaagtaatatcaaagatcatttggaaaagttacaaaaataaacaaatccgctggtaatggcgtaccaacggatctttacaactaaattataataaaatcagaaaacgttcaatgttgtcatgcactgtctcatcatttggtaagtgcgttcaatatcgttgtctaaaccaatagagaaacgaatcaagccatcggttaagcccatagctttttgttcttccatcggaatttcgctcgaagtagaactgccgggcgcactgaacagtgttttataaaatcctaaactcacggccaaataacccaagttacggttttgcattaattccatcaactcattagccttgtctaaactgcccacatccatagtcatcataccgccgaaaccgtattcgggattgatcattttggcgtacaattcgtgactcgggtgactggctaatccgggataaacgacttttaatccatcggcttcgaatttttgagccagatacatcgcattgtggctatgctgtttcatgcgaatatgcaaagtgcgtaagtttttcaaaatactggctgcacgcaaactgtccatcgttggtcccaaaagcatactcgcgccatcgttcacatttttcaagtcattgataaaatcttgcgaagcacaaactacgccaccaacggtatcgctactgccattgataaacttagtcaaactgtgtataacgatatcggctcctaatttagcaggtgctactgacaaaggtgaaaacgtgttatctactaccaatttaaggttgtgcgtttttgcaataaccgcaagtgcttcaatatcggccacttccaaaagtggattgctgaccgtttcacaatacaaaaccttggtgtttttattgatagccgctactacttggtctaatttggtaatgtcaacaaactgagttttgatgttccatttcggtaacatattcttcataaaggcgtaggtaccaccatagatggtgcggctggaaacgatttcgtctccggcagcacacaattggagcaaaacaggtgtaatcgcacccataccggaagccgcaacattagcactttcagtaccttccatagcggccaaagcttgccccaaatacaagttcataggcgaagagtgacgcgaatacaaataacaaccttcggcattgccttcaaaggtgtcaaacatggttttagccgaaagaaaggtataagtagaactatcggatatagaaggattcacaccaccaaattcgccaaagtattgcaaatcctgaattttatcggcaggatggaaagatttcgggttgtaggttgtaggttctatgttgtgggtcataaagttgatgtttaattttatcctttacaaatttgaatcaatacagttaaattatcaatacaaataaaaaaatacagtttttaaaactaaaaaaataaatatttatagaaaataattttagatttacatctataaataggcttcattagtttttaaaactattaaaacctataactcataacctagaacctacaacctatggacagcaccgacaaaaaactcctcgccctactccaacaagacaccaaaaaaaccaccaaagagctttcggtaaaactcaatctttcggtcacagcggtgtatgaacggataaaaaagttggagcgagaagggattatcgacaagtatgtagccttgttgaatcggactaaaatcgacaaaagctttgtggtgttttgtcacatcaaactcatccaacacaccaaagaattcctgaccacttttgaacatcaggtggtaaagctcgacgaagtattagagtgttttcacgtaagcggtgactacgattacattctcaaaatctgtgtcaaagatatggaagcgtaccgagaatttatggtgaccaaactcaccactttacaacatataggcagtacccacagcagttttatgataggcgaagttaaaaatactaccgcgtttaccttgtaaaataagctatagcttttaagcaaattatttcgctttttagtaaaataaaaactgtaattttgtgacacaaaaattaaaacatactaatttctatactatcatgagtgcatttgacgttgtcatcataggttcaggtccgggcggttacgtttcggctattcgttgtgcccaattgggtttcaaaaccgctatcattgaaaaatacaatactttaggaggtacttgtttaaatgtaggttgtattccatccaaagcgcttttagcatcttcgcatcattatgaagaattgcaacactttgccgatcacggtatcgaagtatccggaaaagtaaaagtgaacttggaaaaaatgattgcccgcaaacaagcggtagttgatcaaacttctggcggcgtgaagttcttaatggacaaaaacaaagtaaccgtttttgaaggattgggttcttttgaagacgctactcacgtaaaaattaccaaagccgacggttcctcagaagtaatcgaaggtaaaaatattatcatagctaccggttctaaaccatcgactttgccttttatcaaaatagacaaagaaagaatcatcacttcaaccgaagccttaaaattacctgaagttcctaaacacttaatcatcattggtggtggtgttatcgggattgaattaggacaagtgtatttgcgtttgggtgctcaagtatcggttatcgaatacttagaccgaatcattccgggtatggatggcggtttatcgaaagagttaacgaaggtcttgaaaaaacaaggcatgaaattctacacttctcacaaagtcaaagaagtcactcgcaaagggaaaaatgtaaccgttttagccgatgacgctaaaggcaacaccatcacttttgacggtgattactgtttggtagctgtgggtcgtcgaccttacacagacggattgaatgccgacaaagccggtgttaaagtaaccgaaagaggtatggtggaagtgaatgaccacttgcaaactaacgtaccgaacatttatgcgattggcgatgtagtgcgcggtgccatgttagcccacaaagccgaagaagaaggggtaatggtagccgaaattttagcgggtcaaaaaccacatatagattacaacttgattccgggtgtagtatatacttggcctgaagtcgcggctgtagggaaaaccgaagaacaattaaaagccgacggtgtaaactacaaagccggaagtttcccattcaaagccttgggaagagctcgtgccggtggcgatattgacggtttcgttaaaattttagccgatgccaaaaccgatgaagtattaggcgttcacatgattggcgcccgttgtgccgatttgattgccgaagcagtaacagctatggaattccgtgcttctgcagaagatatttcaagaatgtctcacgcgcatcctacttttgccgaagcagtaaaagaagccgctttagccgctacggataatagagcgttgcacgtttaaataaattgagccactgattaaaaggattaaaaaagatttcttttgattaaaaaatgaaatctgtggtaatctgtctaatccgtggttgaaaataacttaaaagaaaagtcctgattactcaggactttttttataatttatatgctgaaacaaaatctttgcaatagtctttaatcattcctcgaacctttctgaattcttcaatcacttcagcagttgaacctttaactttgctgggatcgggaaaattatggtgcaactttacggcttgtgtcgggaagaacggacagcgctcgttggcattatcacaaacggttattacataatcaaaaggaatgtcgaaatactcttctacattattcgaagtatgtttggaaatatcaataccatcttcctgcataatagctacagctaaggcattaacaccgtgcgtttccacaccggccgagtaaaccgtaacttgctcaggattggtaaagtgcgacaaataaccgtgtgccatctgactgcgacagctgtttccggtacaaaggactaaaatgtttttcatggttcaattcgtataaatctgtaaaaataaaatctggtttagtttaaaaattcagggatttggagtgaaatatttcttcctcaaccaaaaggctacattcaccaatataattaatgcgggtacttccactaaagggccaatgacaccggcaaaagcttgtccgctgttaatcccgaaaacacctatggaaaccgcaatggctaactcgaaattattccccgaagccgtaaatgataaggctgttgcatcacgataattcgccccaatctttttcgatacaaaaaacatcaggaagaacataatggcaaagaatatcactaatggaatagcgattcgaactacatccatcggtaaatcgactatcatttcgccttttaaactgaacatgattatgatagtgaataataatgctaccaacgtaatcggtgaaacgaaaggaaggaacttttggttaaaccatttgtcaccgataaactttttaatcgcataccgacttacaaccgccaaagcaaaaggaatacctaaataaatcccaactgtcttagcgatttcggttactgtgatgtttaattctaatcctttgataccaaataacggtaacattatttctaaataaaaataggcatacaaactgaagaaaaacacttgcagcaaactattgattcctatcaaaccggcggttaattcgcggttgccttcagccaattcgttccacactatcaccatagctatacagggtgcaatgcctatgatgattaaaccggtcatgtattcgggataatctctcagaaaaaaagtcgccagtaaaaacatcaaaaacggaccaattatccaagttatgataaaggatgcggttagtaatttaggctgtttgaacatctgcggcactttcgaaaaatcgattttcgtcagtggcggatacatcatcaaaatcaaacctatcgccaaaggcacattggtagtccccgaggaaaaggagttgataaaatcggcggaactcggtataaaatacccaataccaactccaaccaacatggctaaaaatatccacaaggttaaaaattggtctaaaaaccctaatctttttttcatttttaaaatttaattaccattaacaacaacccgaatcgggcgaacaaggagcagcggctttaggcttccactcgcctattttaactttcaatttgtcagtcggtataccacaattgtctttggccaaacaatcggtcaattttgagattaattgaaaatgggagccgtcaaaatctaaagtgaatttaccaatagtgtccttcatttggtattctacttcaatttcggcatcgggcaaacccaataccttttcagaaagctctataatatgaaccaacttctcaggatgcagtcgatggtcgtaatcattggcctcccacaattgaaaattcaccacttcctcttggcgaaccttaccgccgcaatcaataaagtgtttggttactttacctacttcggtcacatgaaaatgactcggcaccaattcaccattcggcaattggaaagctatagtgtttagcttttgtaattcgtttttaatttcggataatttcatattagattactagactttttagattgttagactgcttagattactagaaaaaatacttttcccttttcccttttccctcaaactcaaactcaacaacatttatttttaagcttatgtcgaatcgccccaaaatgactttcgattttctccatcgtatcaggattaatacaatagcaaatcgcagtcccttcaatagtgcctttgataatgttggcgtttttcaactccttcaaatgctgtgaaatggtaggttgcgccaatggcaattcgtttactatatcaccgcaaatacaactatctacctttaaaagataatccacaatggcaattcgcgccggatgtgacaaggctttgaataagcttgccatttcgttttgttccggagaaaaggattctgtttttgatgcacccatgattcctgttaattattatattgcaatattacgataaaacaataatacaaaccaaaatatttctattatttttaaacctccattcacaattgacaatttacaattcacaatttgccactcgaaattcccaatattttcattacttttggcgttcaaaaaattatatagcaatggcagcaattactttgggtggaaacccaacaaacacgaatggtgagttaccaaaagtaggaacaaaagcacctgattttcaattggtaaatcaagatctaagcattatttctttggccgattttgccggatcccaattggttttaaacatttttccaagtattgataccagcacttgtgcgacttcagtaagaacttttaatgctaaagcaagtgctttagaaaatactaaagtattgtgcgtttcccgtgatttaccctttgcccaaaaacgtttttgtggagcagaaggtttggaaaacgtaatcaacctatccgatttcaataccggaagctttggtaaaacctatggtttagaaattacagaaggtgttttaagtggattacacgcaagagctgtagtggtaattgacaaaaacggaacagtgatttatactgaattggtttccgaaattgcagacgaacccaactatgaaaacgccttagcaacattataaataagaatattatggaattcgaaaaagacaattcctttatcaccggaagactaaaaagtgttggctttgcctttaaaggcgcaataaaactaattactaccgaacacagtgtaatggtgcagttttctttggtcatcatcatgattattgcaggcttttactttgacatagaccgttacgaatggatgatgcagatactggcttttggtttggttttaggcatagaaagtatgaataccggtattgaaaaaatagccgactttatacatcctgaatttcacaacagaataggttttatcaaagatattgccgctggtggtgtactatttgctgcgatagccgcaattgccatcggtttgcttatttatgtccctaaatttttataaatagtcgatttaatttctatttttatagcgttatacatcaccaatggcaaaaacagtaaagaaagaaactaaagaaaaggagaaagatcccaatctggagctcaaaatactaaagactaaaaaacaataccgaatgctgtttggttttgtattggtcttgctatctatagcctttttggtttcttttatttcattctttttgcatggtcgtgttgaccaaagtgcagtagatgccattaccgacagaaacgaagacgtgcaaaactggttgggtaaatttggcgcctatatagccgatttatttgtttaccgcggtttcggggtagccgcttttttactggtcaagttactctttttaagcggtgccttcctcattttagacttgccgatgcgcaagttaaaaaacacttggttttgggatttattcgccttgattatagtgtcgattttgtttggcttttttgccgacaacctgccggaattaggcggaacggttggctatgaaatgaatttgttcctgcaagactacatcgggaaaacaggaacaatcttagttttagtgttttcgattatcgtgtatatgatttttaaaatcaaagtatcgcccgatgctatcaaatcgttcttcgagaaaaaacacaaagaaatcaaagaagacatcagcagtatcatccctgacaataaaagtaccgactacaacttagaggaatacgccgtaactgataacaacgaacatgaagttatgcctatcgaagaagaaccgataccggaaccggtgttaaaaacctcttcgtttgaaatcaataaagaagcgctaaaacctaccatcgaaaatgcttcggaaattagtttagaacctaccatcaaaccggttacgccaactttacaaacaactcctatcatttcggaaccgataaaagaaatcatcgaaaccaacgacgaggcttttgtaattgaaaaggctactgatgaagatgttgtagaagaaaacctagcggctaaattagtggccgattttggattgtttgacccaaccttagaattatcaaactacaaattcccaacgattgatttgctgaaagaatacacttcggtaggcatcaccatcaatcaggaggaattggaagaaaataaaaaccgtattgtagaaaccctacgcaactacaaaatcgacatcgcccaaatcaaagcgaccgtcggaccatcggtgactttatacgaaattgtacccgaagccggtattcgtatctctaaaatcaaaagtttagaggacgatatagcactatcgctttccgctctcggaattcgtatcatcgcgcctattccgggcaaaggaaccatcggtattgaggtgccgaacaaaaacccgacgatggtgccgatgaaaacggtaatcgcttcagccaaattccaagaagccgaaatggaattgccgattgccttaggaaaaaccatctccaacgaaacctttgtagtcgatttggctaaaatgcctcacttgctcatggccggtgctaccggacaaggaaaatcagtcggattgaatgcagtattgacttcgttattatacaaaaaacacccggcagaagtcaaatttgtattggttgacccgaagaaagtagagctgactttattcaataaaatagagcgtcactacttggccaaattgcctgatgtagaagatgccatcattaccgacaacaccaaagtaatcaataccctgaactcactttgtgtggaaatggacaaccgttattcgttgttgaaagacgccatggtgcgcaacatcaaagaatacaacgaaaaattcaaatcgcgtaaattaaatccggaaaacggccaccgtttcttaccgtatattgttttagtggttgacgagtttgccgatttgatcatgaccgccggtaaagaagtggaaaccccaattgcccgtttggcgcagttggcccgtgctattggtattcacttgattattgctacgcaacgtccgtcggtaaacgtaatcacggggattatcaaagcgaatttcccggcgcgtattgccttcagagtaacgtctaaaatcgactccagaaccatcttagattcgcaaggtgccgaccagttgattggacgcggtgacttattatattctaacggaaacgacttggtgcgggtgcaatgtgcctttgtcgatacaccggaagtagaaaaaattgtggattatatcggctcgcaaaaagcctatgccagcgcctatctcctacccgaatacgtgggcgaagaaggcagcagcgtgaatttggaattcgacatttcggaacgcgacagtatgtttagagaagccgcagaaattattgtaacagcacagcaaggttcggcatcattattgcaaaggaagctcaaactgggctacaaccgcgccggacgattgattgaccaattggaagccgccggaattgtaggaccgtttgaaggaagcaaagcgcgtagtgtgaacataaccgacttggcttcgcttgaacaattttttatcaatgaacaaaacaattcttaaaatgaacaagttcctatctatggcattattgctatttacagttgtaacagccaatgcacaggataaaaaagccaaagatttgctggatcaagtcacggctaaggtaaaaacctaccaaaacattgccatcgattttaaatacacgctgaccaacgccaaggaaaacatcaacaaagaaagcaaaggcaatttgttgttggagggcaataaatatgtgttgaactttttgggcgtaaccaaaatattcgacggtaaaaaaagctacaccatagtaccggaagatgaagaaatcaccatttcaagcgtgaatgaaaaagacgaaaacacggtaacaccggccaaaatgttgacgttcttcaacaacggatacaaatactactgggacattttacaagacgttaaaggccgcaaaatccaatacatcaaattggtacccaccaacccgaaagacccgcgcaaagaggtatttttagggatagattcgcaaaccaaaaacatctacaacgtgattgaaataggcaaaaacggttcaaaaactactttgactgttaattcttttaaaaccaatcagcctttatcgaaaaatcagtttacctttgtggcgagtaaatatccaaattactacatcaataaaatagactaagctcgggtgaaaatacttgaccgctacttattaaaatctttcctgattacatttaccacggtatttgtaatcttgttttttatattcgttttacaagtagtttggctcttcatttcggaattggccggaaaggacttggatatcgtaatgattttaaagttcttactgttcaaaatgccgagtatcattccactggtgttaccgctttcggtattgttagcttctatcatgacctttggtagcttggccgaaaactatgagtttgccgccatgaaatcgtcggggatttccctgcaacgcgccatgcgcagcttaacagttttcatttttttattaagtatagtggccttcttctttgccaacaacgtgattccgtatgccgaatacaaattcatcaacttccgcagaaacatcgcccaagtaaaacccgccatggccatagccgaaggacagtttagcgatgtaggtgcgtacagcattaaagtagaaaaaaaatcgggtgacaatggcagattcttaagtggggttaccattcacaaaaaagccgcagtaggtgccggaagtaatacagtaatcaaagcaaaaaaaggagaactcatcagcagcgaagattcgaacaccttgcaactggttttaaaagacggtaactactacgaagacatcaccccgaaaaaatttgaagaccgcaacaaaatgccgtttgccaaaagtacgtttcagcgttatgtcatcaacatcgacttatctaaactgaacaacaccaatgtaaacgaggaaagcattaccaataccaataccatgcttaacgtgagcgaattgtcgtttaccatcgactcactgcaaaaaaactttaataaagaggtgaagtcgtatgccgacaacatcaaccaaagggtcgtgatgcaaactttagattcgcgttttaacacccaacaatctctggctaaaactaccattttagacaacttcaacaattccgatagaatgcgcattttgcgtgtggctgccggaactgtggatggcattacctttaccttggaaaccaccacttatgaaattgacagccgtatcaaaaacatcaaccagcattggattgcactatacgacaagtttgttatagcctacgcttgtttgctgatgttctttatcggggcgcctttaggagctatcatccgcaaaggtggtttgggcttgcctatcgtatttgccatattaatttttatcatcttccactttatcaatacttttggaaaaaaagtagcccaacaaggcgaattgtctcctttcttgggttgttggatgtcggctttcgtattaacgccttttgccattttgctgaccaaaagagctactgatgataaaggctttagcttgaattttgattggttatccaactttttcaataaaatatttccggataaaacccaacccgaaccggtattggcttcggttacacctgaattggctattggaaccgatgaaattcataactatctaaacaccttatccgataaccctaacgccacaccggaactaccggaaggcaaagtgatagcaacgattgaatacaaagcttctacttaccaactgtacagtttaatggcattagcatcgaacatcatcttattggtgttgttcttttttgaaatgatcaatacaccgcttttaataagcgtcgctggtgccctgggcctactccttttatggggcagtttcaaatcgcaccaatgcttgtccaaacttggaaaaatgactcaaaacaactacgacataccacttattgttttactaccggcagggtttccgttttacttcctgttttacggttataacagcctttggataaaacaacacaacaactaacactgcatggaccacaacaccaaaatacaactgaacactatagaagaagccatagaagacatccgccaaggcaaagtcattatcgtggtagatgatgaagaccgtgaaaatgaaggcgattttttggctgctgccgaaaaagtaacaccggaaatgatcaactttatggctacccacggtcgtggtttaatttgtgcgccgctgaccgaaaagcgttgcaacgaattggaattgcattcgatggtaaaaaacaacaccgatcatatggaaacggcttttaccgtgtcggtggatttaaaaggtcatggcgtaactaccggtatctcggcagccgacagggctaaaaccatcttagccttggttaacgaagaaaccaaaccgcacgatttagcgcgtcccggacatattttccccttaacggccaaacaaggcggtgttttgagaagaaccggccataccgaagccgctatcgattttgcgcgtttggcaggttttaaacccgccggagtgatagtcgaaatcatgaacgaagacggtactatggcacgcctaccgcaattggtggaagtggctaagaaattcgacttaaaactggtttccatagaagacttggtggcctaccgcatgcaacacgacagcttgattgataagaaagaagactttgggatgcaaacccgctttgggtcgttccgattaagagcttactggcaaaataccaacaagcaagtgcacctggccttaaccaaaggcagctggagtgccggagaacctatcttaacgcgcatcatctctacccaatccaacaacgacatcctgaactcgctcaccgacagtatggataaaaaactagacgaggtattcaaccttatcaaccgcgaggaaaaaggcgctgtggtgtttattaacagtgagcgcgactcgagtgatttactgaatcgtttggctgaactaaaattgttacaagcggaagggattatgaaagtaccccaaattaaaatggacagcaaagactttggtattggtgctcaaatcttacacgatattgatgtgtctaaaattcgcctaatatccaacacccaacaaaccaaacgcgtggggatgattggatacggattggagattacggagtatgtggggtattagggaagtacgaagtgagaagtgagaagttgggagaaattattttgagactaagtaacagttattgaaaggaatagcttttgggcaaaaaaataagtgcattttttagcctaaatctttttgcaaaatgaaaaaggttgttatatttgcaaccgcattacgcaagtaggcaccgacttattggagaaatggcagagtggtcgattgcggcagtcttgaaaactgttgactgtaacaggtccgggggttcgaatccctctttctccgcaaaggaaaacccgaaacgagagtttcgggttttttgttttaaagcagtgttaaaagctcgcttttataagctgttttaaaacaaaaaaccaatgcctttttcaaaggcattagggttttactttgctcaggtatcccccaatgggaacagcgtagctaatccccagattaattacgaaatttacgaactaaagttcgtgtacctgaagcccaccgggcttcctcctcttaatatcaaatgcaaaggaaaacccgaaacgagagtttcgggttttttgttttaaagcagtgttaaaagctcgcttttataagctgttttaaaacaaaaaaccaacgcctttgaaaaaggcgttagggttttactttgcccaggtatcccctaatgggaacagcgtagctaatcccgaaatcgttacaagacttctcgatacaattctaaaactcaaaagctaacgcttttaacttttaaaatcactcgaagtgacgtgatgagggcgtgatattttaatagggtttgctaaaactacttctcccgtcagttcgagtgtttttttatagagtgaaacggaataaaaaatgacacgaggcgaagccgactgccgaaggaaatcgagaaccactgtgttgatagggcttctcgattagcttcgctcaattcggctatagcctcgggtcaattctaaaactcaaaagctcccgtttttaacttttaaaatcactcgaagtgacgtgatgagggtgttaagcttgaatagggtttgctaaaactactactcccgtcagttcgagtggtttttgtggagtgtaacggaacaaaaattgacacgaggcgaagccgactgccgaaggaaatcgagaaccactgtgttgatagggcttctcgatacaattctaaaactcaaaagctaacgcttttaacttttaaaatcactcgaagtgacgtgatgagggcgtgatattttaatagggtttgctaatactactactcccgtcagttcgagtgtttttaatggagtgtaacggagttaaaaatgtatcgagaaccattgacctcaccccaaaaaaaaagttgcccatcggacaacttctctctttacaaaactacagcttacagcgcagcttttctcgcctctacagcagccacgaaagcatcaacttctgcgatctcctgctctaccctgcctaaatccatttgtttttccagtaaggctaccactccgtaactctccactctaccttccaacaagaattttttgtactctaatcttgtttttttgtcgacggcttcatctttaattggcccgtcaggtaagatggcaatgtagctgtccactgcggctaattcggcaattacgccttgcaattgggtagctacttctaccgaggtttctgcataacgatcggttaatcgctctacggataactttctgaaagtcaaatcggctttctctttttgggcccaagataacaatacgtcgcaatcggccacttgtgtcaaattctgaactgtgtaattcataatataaaaatttaaagttatattttccatcttacaaactgcttgccaaaatctgacagaaataacttatttaatacaactttaacacattcacgctcaaatagatgacgatataaacccacaaaaaaacatctcaagtagtactattgttgacttgttccggaaaaaatcaaaaaaaattattttggaatttccatagcctcatgtaaaattttggcttccgtttgtagtgtagccaacttaatttgccattgcagtagttggggcaaacctgtttgggccatttttttatgagctttgttttccaggctttttaaaaatccttggtactctttgctgtcattagcattggcttcttttaaatgcaccaccaattccaataccttgagttgggccgcataagtttgctccatcttggtcaaaatacgggacacgcgcaactgcttaaaggtgtttaatttcagttggcgttctatccagtgttgcttgcgttgttcttgttgagcgagtacgggtaagactgtcggtgccgacttccgttgttgggcctgccctaccatagcagtaagcaagaccttagcagttaacggtaaatctctttgtcccaactcgtacatcgagagctgactgcgggagacttgcaataaccgagcggcctctcgctgattcaatcctaatacatcactgataatactttcctttttcataacttttatttttggtggcacattgtatcaaaacaaaaattttgccacagttttgtggccaattttttctaaatgctttttttggccacaaaagggtggcatttttttcaaaaaagtattttttgccacaactttacaacattgcatttcatcgttactatttgattttcaaagagtaaaaaaggatttttatgctgtaactagaatattttattatctttaaggtatcgatttttcgatgttcaaataccaccacattttttaattcctatgaccaacccgctcctatgggttttggttgtggtttatagtgtaacttttaaaactatataggtatgagaacaagattatttttaggaatgctatggtgcttgggtactatggcttatgcacaagactttaaattcaacaaggcttttgcctatgatgccaactccgagcgagggcaatctatctataccgcttataagaaagcgtatgagaaatcgatagccgacttagtagcaaagcgtaatgctattctaaacgaaattaatcaagaaggcacggctatttccaaagtgactgacggtgaaaaggaaatcaaaaaaattgaaaccgaaatcagagaactaagcaccagcttaaagacgttgaacaataccgaagattttaaaaagaaaaccttccacgcttttttcgggtcgccggaatcagatgccttttttaatgtgatgtattcggaggagcgcagtgtgattaactttttgaacaactcgggctttaacttaggcagtaaatcgggttcggtgtatacagaactggcgtcgggtaatatgagtacggtacgattgagtttgggctctatggtgtcgaacagtgcgcaggaggacgtgcaggaagccaaagaagaagaagctttccaaaggttatctaccagtggcgggaatacggtgcttacgttagaatatcccttgctgtattggagcactaaagacaatcaatacaatttgatttcacggtttatagggaaggctacagccgattttccggcttttggtacccaaaccagtgactttgccggtagcttgttggcagcggtagatgtgtatgtggatgcctctacctctaacggcgatatccgtttgtatgccaatgtgaacctcagccgcatttacggtaccgaagtgtataaagaaaatttagggttggataatgccaattttaattttggcaaaatcacgaccggtgtggtcattaaaaacaagttcaacctctcggcgatgtttaaaacctttagttccgaagattccttagaaaaccgcaatgtaattataggcggcgcgtttattttttaatcgaactgcaacactttcaccctttcagctcgaatcgtaatggttcgagctgcattgcgaaaaaccgtaaaagttatttcaaatggctttttatatttacttcaaaatataaccaaatactcatttcataagatttttctattggaaagcttgttgataatccctattaatagggattgcaagtgtgtgggaaatttggtatgtttgggagataaattatttcgttatggaaaaataccaacaagtaattgatgaacttataaagttcagaaacgaaagagattgggaacaatttcacgattctaaaaacttagctttagccatatccattgaagccgctgaattgaatgaagtttttctttggaaaaaagaccatgaagtggaacaagtaaaagtcgaaaaaataaaagaagaattggctgatatactttccttttcctttcttttggccgaaaaacatggattgaatatttatgacatcgttttagaaaagataaaacgaaattctgaaaaatatccggtggaaaaagccaaaggaactgccaaaaaatatgacgaattatgattaacgaatctgttaagattgacattattcgctttgcctttaagcctgatttggtaaaagaacctgaattagagaatctccactatgccaaagaattatggcctatagtatacataattacagatggcaaaatcaaacaagcttacataggtgaaaccactgatacgtttagtcgtatggctgctcacctcaaaaatggagacaagaataaattatccgaggtacatctaattaccagcaatacttttaacaaatcggcaaccttagatattgagtctaatcttatcagatatttttcgggtgatggtaaatacaaattactcaatggaaatgtaggtttagccaaccataattattaccaaaaaaaacactactgggaaatttttaaatccatttgggatcaattacgttctaaaggcgtagcacaacattctttagaacatattgacaattcggatttgtttaaatattctccctacaaatcactctcgttggatcaacgtcggagtttaatgactattatgcagcacttactaaatgatactactcataatatcgtaatggaaggtggtgccggtaccggtaaaagcatcatggcagtctttttaataaaattgatttgtacggataatgacgattttaactttaaagaatttggagaggaagagcaacagtttttagacttaattgttaaactcaaagttaaatatcgtaaccctaaaatagcgctggttgtcccaatgggttcgtttagaaagactctccaaaaagtttttaaaaacattaccggactcaaagctgatatggtaatcggaccttctgatgtctttaaagaagattatgatattattttagtagatgaatcccatcgattaagacgtagagtcaatttgggtccctatttcaaaatctttgacaatgtttgtacttatttaggaataaataataccgaaacaaacgaattggattggatgcaacgcacacgagccaagtgtatttatttctacgatgaaaaccagtccatcaaaccttcagacgttttacaagaagattttacccgaatgaaacaactgcctaatacggtggtagaacaattgaaatcacagtttagggtaaatggtggtaatggttatgtagattatattaaaaaaatgttggattgttcacttccttcaacccaaccgaaatatgcttccaaggactacgagtttgtattgtttgaaaatattgaacattttctccatgagttgaaattgcgagaacaagaaaacggcttatcccggatgatcgcaggatattcttgggaatgggcttctaaaaatgacaaaacggctttcgatatagaaattgaaaataccaaattacgttggaacgggaccaacatcgattggattaataccgaaaatgcgattgaagaagtgggttgtatacacactacccaagggtatgatttaaattatgcagggattattttcgggaatgaaataacgtataatccggaaactaattccatagaaatcattcctgaaaattatagagacaaagcaggaaagaacaccattaaagatgccgaagttttaaaaaactttatactaaacatctataaaaccatcttattacgaggtattaaaggaacttatgtgtatgcttgcgaccctaatttgagaacttatttggctaatcatattgctacttatgaaaccaccgcaacaagttatcactttactgaaaacgaagccataataccttttgaaaatgccattccgctctatgatttggaagcggcagccggtggctttagtgaagaacagcaaccaaaagttttggagtggataaaactcccgtcccactactcacctagtgaagaactgtttgcttgtaccgttgtgggcgaatctatgaataaaattatcccgaacggttccatagctttgttccgcaagtaccagtttggttcgcgcaatggcaaaatagtattggcacaatcagccgatattcaagaccccgaatccggagcgagttataccgtaaaagagtacgagagtaaaaaaatgattggagaagacacttggcaacacgaatacattgttttaaaaccaaagtctttcgacaacacgtttgaacacataatcctccaaaaagagacgattactgattttaaagtgattggaatttttgaagaaattttaaattagatagtaataaaaaaataatgaataacaatcctattcttaatagtccatacgacgaacccaagttacccccgctcccgcgcgaaatgcaattcgacagagtcaatcccttcgcgtggtatttaattagtctgaaaaaataaaaaaccaataccaatgaaccaaataaaaaaaattattagattaggttttaataaacaagcacaatcttattagagcaatggtaactttaaataactaaaatctaacaagtcctaaccatgtgccattataccaccaccctaaaacgctacacttgtgccactaacgcgcaagagtaacggtactcaggctaaaatctaagtataacttagtatcttggcacccaatgttaaccaaaaccaacatattgatgaagaaactaatcttattatcctttttattgttaagtggcaccgtattggctcaaaaaaacaaagaaaatgtagaatctaccactcgtgtttttattgataaagcacagtttacacagataaataaagactggaatacagtagccgattttaattccggtattggcgaatttgtacaattttaccctattgaggtaattgatcttaaaacaaaagaaaaggtgaaagcattacagctggatatgtacattaaaaaaccggaaatctataaaacggcttgggtaggcttggatgaaattgacgagtttattcagtttattgaaaaaaatgtaattccaaacctggacttaaaattcaagaaaaagtcaactgagtatatttttaaagccaaggaaatgactttctcctatttagtagatgaaaaaagaaaaagaatttcaatttggttgaataattatgaaaaagaaggtcaacttaactattccttttggacagaaactcaagtagacaaaatacctgatttgctaaaagttcttaaaatgataaattaatttattaaaagtgaattttaaaaactgaatatggaccaaataaaaaaagaacacatactatctgccatacaagaaatagatgaacaaggcattcgccctggtcggcattccagtacttatgatttggtttataaggggaagttatatccacctaaattagtgattagtatcgccaataaatatgctgccggtgaagaattagacccaaatgcttttaccggtggtaaaggaacagaggcttttaaagtatttgaaaaagagggatttacagtagtaagtaaagaagaaataacttctgattttatcaatgtaaaagaggaatttatagattggatggtggccaatgttagtggtggcaattattttaaaaatcagtttgcctcaaatagagaaagattcgaaaaagaaatgaatgcttatgaagcaaagtataaagagtcatttaatagagaactttttattatcaatgctactgactgtaaaaatgagattgaaatactgcgcaataatttatataatacaacatctcaattttcagaatacagtaataaccttgcaacaggtagaccaaaagctattttagggaagaaaaattatatacgatttttagaagagaagttcggaactcaaagcacaactcaatactggatctttcaaggcagtcccaaaatatacaatgccgtagctgccataaatgacaatgcggtcaaaacttggacagttagtgcccatagggacaaaataaaaccaggtgataaaataatcttatggctaaccggccccaatgccggatgtgtagctttaggaatagtggactctgaagtgatgatgatgaaagaggaagatgttgaaatgggatattatatcactcctgaagattctattgaggcttaccgagtgaaaattgtcattgaacacaatcttaccgacaaccctattttatgggatttggtaaaagacgatgaagtatttaaagattttaagggcagtaatcaaggaactaattttacggcaacgcaagagcaatatgaagccatattaggctttgtaaacgctaacagcagtaatgcttataccaacgtaaaaaagttgttacaccaaagaaagttacaatcgttcctggcattattaagaaattatttgaaggaacataacattcaaccaaacgatagtcgcatcagttttaatgtttgggagaaagaaaatagattggtttttttaattgggagaaggtatgtcttaaacatacaaaaaaaaggaggtgaaacagaattttcatttaccacaaaaaacattttgaccgaaaaaaacggtggttttaccaatcaaaaaggagaaattgaagcctattggaatgtagccaacagcattgaaaactatgtttccgaaattgaagaaggatttaccatagaactggcacgcaatacaaagtgtccttatagaaaatataccaatcaagatttcattaatgatgtttaccaaataaaacaaagtgctatggcaacgatatcacctgaagcaagtttcccattaaaccaaatattatatggtcctccggggacggggaagacatacaacaccgttttagaagccgcgaagataataaccggaaatgagttgattgcttatgaggaagccttgacggtttttagagcaaacttagaccaccaaattgagtttattactttccaccaaaactacagttacgaagactttatacaaggactaagacctgatacggaaaacggtagtgccttgacttttgagaaaaaagatggggtgtttaagcggatagcggatagggcgtataagaatttaatggcttcggaaaatccggcaagtgctaagaaagagtttgatattgtttttaatgaattaattcagcctttgaatgacggtgatgtaacagaggtggaaatcaaaatgaagaagtcttctttctatattactgcggtgggtgaaaaatctattgatttcagaaaaaacataggtgactcagaacatactttaagcatcaacaccttgcgcaagatgtatgataaggggttgaatgatattatattgggtggtctccaaccctactataatcccatattagaattacttttggaaaaaggaagaagtgaagtcgctcctacgcaacgcaaaaactatgtcatcatcattgatgaaatcaatcgcgccaatatctctagggtatttggggagttgattactttgattgaagaagataagcgttcgcatggtagcattccgatgcgcgtgactttgccttcgggggattcttttattgtgccttctaacttgtatatcattggtacgatgaataccgctgataagtcgattgctttattggatattgctttgcgcaggcgttttgagtttgtaccgaagtacccactttatgagggattagagcgaacggtaaacgatgccgacaaactaagaaaaatcaatgatgccatagtgagcagaaagaatcatgattttaccattggtcatgcctattttatgggagatgattacctgttggaaaaaaccatcaatcataaagtaattccgttactattggaatattttatgaattcggaaaaagaagtaattgatattttaaaagaagccggcattactattggcggatggccattaaaaatgatatcctaaatgattaacctctttgaataccaaaataaagtggctttccctgaagtgcatttcgataatctagaagtgttcttggatgctatttggagtaaaagagaaaaatcatcctattacaacgaagatgaaaaccgcgaggaagtgcagcactttatccagtttttacacaagaataaagaactgaaatcaaacaagtttgttggtgtcattcactttgaagaccaaaccatcaacttattgcctaaaattttctattccgggaaagaaacaacagaagatgatgttcggctcatcaactcacacgtattgtggtggttgagttattgtcgaaaactgcggtttcccaattacttatcggggcttaatacccaacaagccgatttttttgaggtgttgatttacttgtttagcaaatacaccaaagaactattgaactcctcagtctatcaaaaatatattgaggttgaaaacgaactgtcgtttgtcaaaggcaggatgaatttcaatgaatacattaaccaaaacttagcacgaggacgaaatcataaagtgaattgtatttatgattcttttgaaatggacaatccgtttaaccaatgtgtgaaatcggtttgtaaattgctgcttactgcttctaaagaccttcaaaacaagcgcaacttaaatgacatattgtttttgcttgatgaagtaagcgatgccaccatatcggctgaggaatgtaagcgaatacttttcaacccgatgtttgccgactttgaaactgttcgcgattactgtgtgttgtttttagaaaacagtgtttcgtttaattataaaaatgacttgaaactgtttgccttcctcctgccgatggaatatgtttttgaggatttcctttttgggtttatcgacaaggaattggaagaaataaacgccaaaaaccaaataaaaaacaagagtctggacgaggcaaaaacgtttggtttaaaacccgacttattgctaaccataggaaaccgaagtattatagcagacaccaaatataaaatggtttatgccgacagtaccgatgctaaaaaaggaatttcacaaaatgatttgtatcaaatggtagcttatgccatacggtttaaggtaactgatatcaaattgttttatcctaacactataaacaatgaaacgtctaatgatttaaaaacgattgaaatcattgatgaactggctggcagagaaaagattacgattaaagcgcatcaggttagtgttttggataaagaaatcacaatcgcttcactggaaagtatgaggttgtctgattgttttgtttctttgaaaaataagttgaagggagagttggaaataattttacagacttatcatgtcacgaattgaccaatataaatccttccctatctaccaaagccgaagtgttattcgcctgttcaatactataacaccacaaatgatcaaaacatgatagtcaacttaattatcattattgccacactgagcggttgtgtatttgtgtatcaacgctataaagcccagataaaatacgaagaccccaattacctatcgaatgtagctcaaatccctttatttttggatattgtagaacaatttgacgactatattacttgggtgcaacgcgaccaaataaaacaacagttttcggttattggtaaatactttaaaaacaaatccaactattataaagaagaagagcgggtaaaaaaattcaatgacatttaccaagactttgacaactacattgtagcctataaccaaaaccatgttcaatctcaaaaagaaaaactaacccactattttgatgacattgaaggaaaacaattagatgagcaacaaagaacagccctaatcaccgacgaatattccaacttaattattgccggagccggttcggggaaaactttaaccatactgggtaaagtaaaatatctgatagaacagaaaaacatacaaccggaaaatattttgcttttatcctttaccaaaaaaacggtcgaggaattaaataaccgtttaaaagacattggccttggcgctcgagcaaccacattccataaattgggttttgataccataaaaaaattcaaatctaatcttccggttgttaccaacaccaataccttaaccaatattatcaaagcttatttagaaaaagatatttttaacgatacacaggctttagaagcttatgtgacctatgtggcctgttatatgaatgttccggaaggccatgaaagttttgaatcacttggggaaaaattggatactgaaaaagggattgattttcagactttaaaatcaaaatgcgaacccgaagaattaaacaaagtggctaaggcaaagcttgacaccatgcagggcgaaaaagtaaaaagcgtggaagaacttaccatcgctaattttttgtatttgaacggcattgaatacgcctatgaaaaacaatatcctcatggcgaaggcaattatcaacctgatttttacctgaaagattatgatatatatttagagcattttggcgttgacgaaaacaatcgtgcccaatggcttacgcctcataatgagcagaaatatctggaggaaatggaattaaaaagagaaaaacacaaaatacataacaccaaacttttagaaacctattcctattacaatcgcaaccacgttttattagagaagctggaagaaatattgctcaacgaaaacgtagttttcaaaccaagagatgtaaaaagcatctacactaaagttacagaaaacgataagaactttggaaaagaaattaccaaactgatagaaacgtttatcaccttaagtaaatcaaggcaattagactatgatgccataacatcgttgtttttagaccgaaagaaagcctttaattcctttatgcttgaaagacaagagatgttcttaaagtttgccttgcccattctgaaaaaatatgatgcaaccttaaaagacttgaatgaaattgatttcaatgatatgatcaatcaggccactgaccttatcaaagaaaacaaaccacaatatgcttatcagcacatcatcatagatgaatatcaggacatttcctattcccgctttaacttaatcaaagagattcgagagttatcgggcgctaggttaatttgcgttggtgacgattggcaatccatttatcgttttgccggtagcgacatttcgttgtttagtaattttgggaagtatgttggaaaatacgaacagttgtttattgaacaaacctatcgcaattctcaatcacttattgacatcacgtctaaatacattcaaaagaacaaaaagcaaattcaaaagaatccaaaatcgaaaaaagaacctctggaaaaccccatcaagtttgtttattattcccccaacaatgccgaagaggtttttatcaatgaaattcaaaccttaatagataaaaacggctacaagcctattttggttttaggccgtcacagttttgacatcaatgaatttattaagctcacgccaaacagcagaataacgtattacgaacgcagtgataagttagccataaaaggctttgacgaccttgatattaaatacatcacggtacacaagtcaaaaggattagaagccgataatgtcattgtattaaacctaaaaaaccacctactcggttttccaaacaaaatgaccgacgacccaatgttgtccttattactgagtgatgatgaagaatatcgttttgcagaagagcgaagattgttttatgtggccttaaccagaacaaggaatgaagcggtgttacttattccgactgatgcatctttattcgcagaagaactaatcacagacaatgactttatacttaccataaacaatgaaaaactaagtaaaactaattgcccgtattgtcaaacagggcatcttgtgataagggataattcattaaaaaacaatcaatttttaggttgctcgcattacccaagttgtaaccaaacctttaaccatatagaaatcttagagaacactatcctttgcccgggttgtaaaagcggctttatgactaaaagagaaggcaaatttggtaagttcttaggttgcaccaattacccgaaatgtacgcatacgataaaattgcagtgatattgaacttccccaagttttatacaattcaccttttgactatcaaaaaaatcatatatcgttcagaaaatttaattggtagtgtttttttttatgctattaggtgtatttttacaactgaattattcacatcattatttatgaaaaaaattatactattggttgttttaaccttttcagctttttgcagcgcacaaaatgtagaacaaaaattaaaaacagatattgttaagatacaggcaggtaaatttacaattgacgattatacattggtcactactaaagggaaaaacattcaggttaagattcacgccgaagctgccaacacaggatttattagccgtgacaattttgtgtatgctacagcaaatattgtcgaagcaatattaagtcagtttacagctttagatgaaaatgccaaaacagaagatttagacgaaattacaggaacagcggatattgtggtgaattgttttatgagtaaaacagggattcaaattgaaacaactacagcaggaggaactgaaaaaaccatgcaaaaatggtctgagttgttttagaaataaaatgattaatccctcgctaccgcacgaaatacaattcgacggagtcaatcctttcgcgtggtaattaaataaaaaaatagtaatactgtactagttttaaaacttggtggttgataatcccgcggggacctgggagacttgtcataatcgagctgcctcgcaccgattaaggcctaatcaatcacttatagcctttcccttttcataactttttttttgtggccaactttatcaaaaagaaaattttgccacagttttgtggccaattttttctaaatgctttttttggccacaaaagggtggcatttttttcaaaaagttttttttggccacaactttcgccaatcatagcattatggaagtttaattatattcctcgctaccctatttaaaattagggttctaaatgactactacacccgtcagttcgagtagctcgcagagcttatcgagaaccgttgtagtgatagggcttctagcttacgctcagttcgctatgctcgagtcgatacaatttataactacaaaaactaacgtttttatacttataaatcactcgaagtgacggaataaggacgtgatgcttgaatagggtttactagtactactattttcgtcagttcgagtggttttttatggagtgcaacggaataaaaaaatgtatcgagaaccgttgtttaactaaacctcttcctagccaaattaggcaaagtatcatattcccctcttatcaaagcctctttcttagctttagaccacttttttatttgcttttctttttcaatggcaaagttaatatctgtaaactcagcataaaaaaccaatgcaaccggtcttctggaaaaagtataacagtcggggtaaaagcctgaattgtgttgaaacattcgttggttaagattacttgtaactcctgtataataagtgctatcggagcattttagaatgtaaacgtatgattgtttcatttagtaaaagtaagaaaaaatttatttaaaagaagcttctcgatacaatttataactacaaaaactaacgtttttatacttttaaatcactcgaagtgacggaacgaggatgttatatttaaaatagggttctaaatcactactacacccgtcagttcgagtgtttttttatggagtgtaacggaataaaaaagtgacacgaggcgaagccgactgccgaaagaaatcgacccgagcgcagcgaactgagcgtaagctagaaccgctgtgttgacaaggcttctcgatactatttttaaactcaaaagctgccgcttttaactttaaaaatcactcgaagtgacgtgttaaagacgattttttataaagaacgtcagttcgagtggttttaatagagtgcatcggagtgaaaaaattgactattaaacaaattaacatatttatataaacaaatttgtttacttttgctgttatggaaaagcatatcaacatactaaaagggatccatcccggttttgtactagagcgagaattggaaaaacgccaaatacgaaagggaaaatttgcccttcaaattcaggaatacccccaaaccttgtcaagcattatgaaaggtaagcgggatatgaacattgcgcttgccttaaagattgagcaacacctaggcattgaagaaggttttttcatgattcttcaagtgtattataatattgaacaagagaaaaagaaacaaaacagttcgcatcctaatttgtcaatactcagaccgattttattttgggatactaaaatgaatagcattgattggcaaaaacaaaaggaagccattattaaaagagtatttgaacgcggaaacgaaaaagagaaaaacgaaattatgcgattttatgggaatgataccgttttccaattattaaataaagctgaatatgcttaattatcataccgtaacccctttattacggttgattttagaagatttgatgcaagcagctccttttgccgaattcagattagtgggaggaacagcgcttagtttatatcaaggtcaccggatgtcggttgatatagatctttttaccgatgccaattatggtaccgttgattttgaaaccatagatacttatttgcgaaaaactttcccatatgttgacaccaataattttgctgaaattggtttcggaaaatcttattatattggaaagagtgaagaagcttgtattaagctcgaccttttttatacggatccctttatggatgattgcgttgttatagataacatacgcatggccacagtagaagaaatcattgccatgaaaatggaaataatttcaaaagcagggcgaaaaaaagacttttgggacatacatgaacttaaggatgattatagtattgctacaatgtttgcccttcacgaaaaacgttatccctacaaccataacagagcattacttattactaactttacaaattttagtgaagctgataatgactttgaacccgattgcattagaggtaaacattgggaattaatcaaattagatcttactgaatttagtaatacattttagttttacagtcaaactaatcccgagccgagcaacattgaaaaccctttaatcatttacaatgccaatcaaaaaatgaaaataatcctcttaacccctatggacattgagcaagaaaaagcactcaatgctttggctcaaatacccaacttacaaaataactacgaggtaattgtgtccggtatcgggcgagaaagtactgccaaagccctgatgcagttgccccaacacgatgtgtgtgttttagtgggttttgccgccatagtgggtaacgaaagtaccttgcccgactacttggggtttggaaaaccaatcgaaataacgcatgctactttgtatggttatgaaggcggtttgtttgaaaatggccaacccttgatgtctgagtcgaaaactcaactcccaaaattggcttccctaacctcagacaaatttgttagaaccaccgatttggcagaacaaaccgtaatcaatatggaggactatacgtttatgtacttgaaaaaaccacaagactttatcctacgcatcatctcagatttcctaccacatgaaacggaaatcgacttttttgaagaggtaaaaagtattgattttttggaggctattaaagcgattgaggagagtgtttgaaattagcattaatgattaggctatagttaagaaagttcatattctttattaattacttgataattaagataatcattttagctttgtggaataaaataacaatataatgcgattgtatttaatagtactaacagtatttgtctcgatgaacatgggaacaaacaacaatagcgatgactcacttaccttaaagattccatctgagggttttaaagtggtgcaacatatccctttcaatcaaaaaggaagagaactaaatactttgtatcaaacgccacgacaaataacccaaaatgaatttaattctccggagcttactatttttattgatagtatgtatcaagtgatgaaaaaatatgaaggagttggtattgcagccaatcaaattggcaaaagattgcaaattttcatcatagaagccaaagctgataatccgagatacaaagtattaggtccggttgaaaaacaaatttttattaatccaattattaccaaggtttccggtgctaaaaagaacttttggcatggttgcttgagtgctagtggtgaaaaaagaggaaatgtagctacttatgaatggattgagtaccggtgtcaaaatttaaaaggagaaaaagtaagtggtagattggaaggttttgccgcagtaatttttcagcacgaattcagacatctaatgaatggaacttatctggattttgcaaagcagtttttatctaaaccggaattagataaaaaaattgagtccggagaacttcctttttttgatattgctccagacaccttacccctgttgataaaagattttgaaataggtcaaaacatagaaaaatttcgggtgagataacttgatttttctgttgaggtaacttatatattcctcactaatatgagaagtccttttttataaagtacaacggactaataaattaaaccaacccgagcgcagcgaactgagcgtaagctagaacaccgctcctgcgcgaaatgtaattcgacggagtcaatcccttcgcgtggtaattaattaaaaaattattgatactgtatttgttgttgatagaccacgcggaaacctgttagacttgtcataatcgagttgcctcgcaccgatttaggcctaatcaatcacttatagcgctttcccttttcataactttttttgtggccaactttatcaaaaagaaaaatttgccacagatttgtggccaattttttctaaatgctatttttggccacaaaagggtggcaattttttaaaaatgcattttttggccacaactttcgccaatcagagcattatggaagtttaaattatatccatcgtcaccctatttaaaatagggctctaaattactacaactcccgtcagttcgagtagctcgcagagcgtatcgagaaccgttgtattgatagggcttctcgataaaattttacaaagcaaaaactaccgttttcactctgtaaaatcactcgaagtgacggaacaaggacattatgtttgaatagggttctaaatgactactactcccgtcagttcgagtggttttcacggagtgcaacggagtgaaaattttatcgagaatcgttgtattgatagggcttctcgatacaatttataactacaaaaactggcgtttttatacttataaatcactcgaagtgacgaaacaaggaaatcatgcttaaatagggttctaaattactaccactcccgtcagttcgagtggttttcacggagtgtaacgtagtgaaaagtgtatcgagaaccgttgtgttgacatgccttctcgatacaattctaaaactcaaaagctaccgcttttaacttttaaaatcactcgaagtgacgaaacaaggacgttatgtttaaaatagggttctaaatgactactactcccgtcagttcgagtggttttcacggagtgcaacggagtgaaaattttatcgagaaccgttgtgttgacatgccttctcgatacaattctaaaactcaaaagctaccgcttttaacttttaaaatcactcgaagtgacgaaacgaggaaatcatgcttgaatagggttctaaatgactactactcccgtcagttcgagtggttttcacggaacgcagtggagggaaaattctatcgagaaccgctaacaaaacaaaatagtccattttctatccctttttatatcttagcctaaccaattttaagaaaatgattcgcaaaatagttttaggattaaccgccttgtttgtgttgagttgccaaaacaaaggcaatgaactgcctccaaaaccacccaaaaatgcttgtggttgtaccctaaccgacgaggaaatgattaccaaacttcccattacagccaagggcgacagtatagtgatttgcaaagtaggtaccgtttcagtccccggaagcgacttgggtactatgaattggcttcagtatttgcaaagcgaatacaacggcggcgaaggtgacatatacgattgcgtaaccaaccaacctttcaaatcattgtatccgtcacgtattttaaaatacaaagacaagaaattggttttggattatcgctttccgatggatgtgtatgacgctcacaacaaggcttgggtagatttggaaattccggtttaccgccaaaccatttatgccaaaaacaatcggatctattatactactgtgacggttaattttgacattcccaaacaaaagcaagcggcctttgccgcagccgatgaagcttaccaaaaagaaagccaacaaccgtatcactacatgatttccggggtggttaaaaaattatttaccgctgccctcaacggagatgaggtttctaaaaaacgctttgaaaacatcaccaaagattttgaagcttactacaaagaccacgctgactcttataaaatttaccaacaataccgcaaattatacgacgattacaaccaatatttggccaaaggcgggaaggtaaactattatgatttatcgatttttccatatttcaaaaaaataaccgataccggaaaatcctatttgtaatacatctcatggaatccctaactttcagaaaactgacttttcccgaatttgaaactttagtaatttgggcagcccttgaaggctggaaccccgggctacacgatgcggaactgttttacgaaaccgacccggatggcttttacggctactttgagcagaataccatgattggtggcggttctattgtttcctataacggcaaactaggatttatgggcttttttatagtgcaccccgattacagggccaaaggcattggcaatgaactttggttgcttcgtcgcgatacgctcttaaaacgattgcaacctaaggctgccataggaatggatggcgtagtggccatgcaacctttttatcaaaaaggaggatttaccattgcttacagggacgaacgctacgaaagaaatggggaacaattcccaactcatccattggtcaaactcgctactgcaaaagacgaaaaagcgctattcgcactcgatttggaatgctttggtgtaaaaagagaaaaattcctgaaactgtggcttgatccctccaaaagcaaaacatttacctattccgaaaacgataagctgttgggatttgcagtgatgagaaaatgccaaaacgggtttaaaatcggccctctgtttgccgaaaatgaaacagtagccgcggcactctacgaacgttgtttgtcggaagcccctgaacaacccgtatatttagacattcctttaaataatgagggagctgtgagattggtcaaaaaatacaaggcgaactatgtattcgaatgtgcacgcatgtactacggtatgccaccggaaacggccacagccaaagtgtttggtattaccagttttgagctgggttaaactgatagtctgctcttctatctatatgatttaatcgctgtaaaaacattaattctttgagataagtttatgtttttaaacaatatgggctgttttatttgataattcacaaaaatagaccctagaatatttttggttttttctgacaagtttttatcctatatttggtcattccaacctagtaaaacaaaatgaaaaaactatttatctcgctggctttcatggccgcagcttccctgagcgctcaaaccgactattctgctgtctataacggtaaagccttcgtacaaaaaggtatacagttatacgaagaagaaaaatacgatgccgctatggccgagttcaaaaaggtggatgccttagacccggaatacggtaccgcacaatacgaaatggccttaacactctcagcacaagagaaaaaagaggagttaaaagcccacttcgaaactttgtacaagtccaagtggatgaaaaaactcccaacactttacaccttgtacggaagctttttaagcgatgccgagaaatacgaagagtccgaaaaaatattcaaagaaggcttgcagttcattcctaacaacaccaaccaccaatacaatctggccgttttgttttaccgtgccaaaaaagtacaagaatgtgttgacattttaaagaaaatcatagccaacaatcctaacagtgcttcatctcattatttattgggctcggttgctttagaaaacggaaaaattgccgaaggcagcatggcactactctcctacttgatgatagcgcctaccggaaaatttgccaaaaatgccgtgttcaagctgaatgctaaaatgggcgaaaactacatggagaaaagcaaagtggtgttttctaaatcaggagataactatgaagagttggaaaccatcctacgcaatcaattgcctttgcgcagcgcttacaaaatacaagctaaaatagacgatgtggtaacacgtcaggtacaagccatactcgaatacacccaaatgcacaaaatgggcgacggcttttttgaaacaacttatatgccttggttgaaatcggtggccgatagcaaacaaatcgaaggcttcagctactacatcttaatgggattggaagaagaattaggcaaaaatttactagctcagaaaaagaaaatattgcaattcagcgaagacttcatcgccaaagacttctggagtgtttttgcccgcagaaaaatgaacttgttcggagaagaaaaagaagtcattatctacctagacgaaggcattcctaacctaatcggaagtgtggtaaacggtaaaaaagaaggcaaattcaaactcttaaacgaatttgaaaacctcgacggcgaactgcaatttgccaacgacgagttaaacggcttgcaaaaatactataacgaagaaggcaaagtttacgaagagaaaaactataccaacggcaaactcaacggcaaacgcaccgtgtattaccctagcggcagtttgagtttagaagaaaattacaaagacggcgaactcgacggtaaatcaacttcttatcacatagccggcggtatcaactgcgacggaacgtttaccaatggagaaatcaacggtactttaacttgttattatcctacaggtactaaaaaaaccgaaagttcgtatgccaacggaaaactggaaggtgtatacaacagctacaacaaagcgggcgacttagcctcgacagaaacttataaaaatggtgagctggaaggcaaatacaccaaattttacggaccaaaagccatacaagaagaagcggaatacaaagccggaaaagtggttggctctttcaaaaaataccatactaacgggaagttggaagaagaattcatctacaccaacggcaaagtaagcgcttcagctgaatactatgcgaccggcgtaaaatcgggggaatcaacctataacgagaaaggcgaactcatggctaccacctactttaacccttccggtgaaaagtattatgacgaagtattcaattcgaaagaaatcaaactcatccgccaatacagccgcgacaatgccaagccaaccgaaatcaacttggccagaaaatcgttcgaaatcaaaaccctcgacggcaaagtagttgctaccggtgctttcgaaaaaggcagaagaaacggccaatggaaattccaaaccgcctcagggaaaacggaaacagaaaccgctttcgtaaaaggcgaaagagaaggaatcaccaaaaactattctaaaaacggcttactcaattccatcagtttctacgctaaagatactttacaaggaataaatgaagtatacaacgaccgcggtttgaaaagaatttacaactaccgcaacggcaatctaaacggaccgtacaaagtgttttattctgatggcagtgtgttaaacgacggtttctacgacgaagacgaattggaaggcgaacgccgtactttctcgcaatcaggccaattgatgatggtagacaacatgttccgtaacatcactttatcaacagactattataatgaaaaaggcgaaatagccacttcaatagcctacgaccacaaatcaggtaccgtaaaccacagcatgaacaacggtgcctatacttcggtattcgaaattaaaaacggctacctcgatggcaaatacaaccgcaaagacaagttcaataagcctatggttgaaggggaatacaaatgcggtgcagcggtaaacctatacaaagaatacggcccgaacgacaccatcctattggaacaatcttattacaacggctcaatcaatggcgtatctaaaaactacgacttaaccggacacttaaaaattacttcggaatacaactttggggtggaaaacggtaaaaccattcgctactaccacaacaaatcgaaaatgtatgagtacaaccaacaaaacgatgtaaaagaaggcgactttacctactacaacttaaaaggggaaccgctaatgaccatcttcttcctggatgatgcaccgcaatactacctcaaaaaatcgaaaacaggggaattgagcgagaaagtgatgatagtaaacgaaaccggaacacttacttctaactatccgaacggaaaagtagccttgcaaattacgttcaacaaaggcaacaaagaaggtgcatttttcatcaacaacgaccaaggcaaaccggaatacaaagccttctacaaagacgatgtagtgcacaacgaccgtatcgaatactacgctaacggtaacatctacttgaaagagcactttgtgagcaatgattacgaaggcgtacaggaatactttaaagaagacggaaaaccttggattaaagccgaatacaaaaacgatgaattacatggtaaaacacaaatctttaccaacggtgtgttaaccttaactaaaaaatatgactcagactatttggtggacgttatcaaataaagcgatactaaccggggctgccgtactgagttcggtggccttattcgcccaaaacaatttcgaaacgtacaaaaaacaataccccgattacaacgaattgattgtcaacaatgccacttcctactccatcagtattgtggataagaagctaaaggtgattcaagacaaccaatacgaatcgatgatcctttccgacaacggcatccaaaacaacaaagagagtttttcgtattccgattttgtcaaactgctttcctacgatgcctataccgtggtgtccaacggcggcaaagaaaagaaaatcaaagtcacccaagccttggaaaaacaatctagaggcggctcggtatttcacgacgatgtgaaaaccaaacaattgtcgttccctaacttagaagccggcgccaaaaaagtatacgaatactccaccgagttcaccgatccgaatttgttgcacaagttcatcttcggcgaagtactgccggtgaaaaattcgaggctggaaatcaaagtcgataaaaatgtcaacatcggctttaaattgttcaacgacccgaaccatttgattgcgtttaacaaaatcgaaaagaaagattatacactttatcaatggacattaaccgacggcaaacccttcaagtttgaaggcaatgcgcccagcattttgtacagtgtgccgcatcttattttttacatagaagattataccgccgacaaaaacaaagtgacgcttttaggcgatatccaacgcatgtacacctactacagcagttttgtagaaaacctcaacactaaggaagacgctggcttaaaggaaatctcgcaaaacatcacggccaataaaacttcggaagaagaaaaagtaaaagctattttctattgggtaaaagacaacatcaaatacattgcctttgaaaacggttacgaagggtttattccgcgcgaagctgccttggtgaacgaacgcaaatttggcgattgcaaagacatggccagtatcatttcggctatggcgaaatacgccggaatttccaatgtgtatttggcttggattggcacccgcaacattccgtattccttcagcgaagtggctacgccttccacaaccgatcacatgatagcggtgtacaaaaaaggttcggaatatattttcctggatgccaccgaccaagaaacggcttacggtttgccttctgcctttatccaagacaaagaagcactgttgtacaacggcagccaataccaaattgtaaaagtaccgattaccgcaccgaccaaaaaccaaatcaaagatgaagtggtaatcaacatccaaaacgaaaaaataaccggctcgggttggttgcaaatctccggatacaatcggactaacaccttagggcaattgggcgacgccgccaacaaaacccgttttgaaatgatcaaaagcttggttttaaaaggcaataacaagtttaccttgaacgactattgcgaggccaacttgaaagaccgcgacaaaccgtatgaagtgggttacgattttaatatcgaaaattatatcgtaaaagtagacaaggaattatacctgaatttgaccttcgacaaatactacgaaaaatcaaacttagaaaaagaccgcgaagccaactacgacttcgatttcctcaaccaattcgtatcctcagtcacttgccttattcccaaagcatacactgtaaaatatgttcccaagaattttgagatagacaacgaactcctcaaagcacaaattacctatcaattacatggcaacaccgtagaaatgaaagccactttggaaaccaaaaaaatcatgttggagaaaaaagattttgcgctgtggaacgaaacggttaaaaaattaaaatcggcttacggggaaaccatcatcttacaagaaaaataaactacgaaaaaaacaaaccatgaacaataccaatctttcaaagcttacagtcatagtagccctattgtttactgtgtcagtcaacgcacaagatttcaccttccaaaactaccattgggaagataaaaacaccttaatcgatgttcctgcgcagtataaagacgaaaaagaagtagtcttatcgcgcgtggtcaaaatcgaattggccaccaaaggcaaaggcgcagcacaatactacatggttcacgaaagaacctatattaactccaatgatgccgttgaacgcaacaacaaagtgtacattccgtttaaaatgaacgaaagcgtaatcgaaaccaaagtacgcgtcatccaacaaaacggtaaggtaaccttgtttgacaaaaaagacatcaaagaagaagtagatgaagaaaaacaactcaaatacaactacttcgccattaccggcttagagaaaggcagtgtaatcgaaaagatattcatgctggaagaattccctgaattagacggaaaaaccatgcgcatgcaatcgagcgtacctattgtaagcaacgaatttcaattgatttatccgcgccatttgaaattcaaaaccaaatcgtctaacggcttaccagaagctgttgaagaaaccgctgccgatactttgaaaaaaacacttacggtttccgataaaaatatagcggctttagaagacgatgaaaagtactccaaccgcgatgtatacttgaaattgttccgctacaaattggatgaaaacttttacaccggtgccaaaaacatcaacagttacgccaaatttacttctaacttttacgatcgcatcaatccgacactcgacaaaaaagacttgaaaacgataaccgatttttgcagtcagattcagaaaacaaacgacatacaagcacaaatttggaatatcgaaaacaaaatcaaaaaaaccatctctttcaatttgtacgccgaaagtgccgaaagtatcgccgccattttaaaaaacaaacaagccaacaaaatcgacctactcaagttgtattcggctgtgttccgcgaatttaaaattgaaaataaattggtactcacctctaaccgattcgaaatcccgtttgaaaaagattttgaaagctacgagaatctcgacgaagccttgttttacttcccggccatcaaaaagtacctgacacccagcgaaatcgaataccgcattccgttgttccccgacaatttagggaacaataacggtttgttcatcagcgaaaaaatcttcggtggtgtaagtatgggtgtaagcgaaatcaattttatcgaattgccgggtgtggaaatcactactgatcacatggtcataacagccgatttcacggaagatatagaaaatcctaaaatcacaacctctatcgattttggtggttatactgcaatgagttttcagccaatcaaagactttacgtcggcagaacaataccaaaccattttaaaaagcatagccgaaaattataccaataacaccgaatattcttcgctaaaaacagaaaatgacggcgtggaaaacatcggtaaaaaaccgtttgtaatgaagctgacgtttgatggcaaagatttactccaaaatgccggagggaattatttgttttctgtcggcaaactcataggttcccaaatggaattgtaccaagaaaacaaaagaacgttaccggtagagatagaccatccgcacgcctaccaaagaaccttaaaaatcatcttgcctaaaggtgtaacggctaagaatttagagaagttcaatatgaatttcaaaaccgacctcaacaataaaaccgaagccggatttgtgagcagctacaccgaaaaagatggcgtgattactgtgaccaacaccgaattttacaatgtggtgaattatcctttagagaaattcaacgaatataaagacgtgattaatgcggcagccgatttcaataaaattgtcatcatgctgaccaaaagttaaacccattcgaaccaaaatgcaaacctcttccctaacccgaagaggtttttttatgccgatatgacaattgtcatttttaataggaaacactaatcctacctttggttttgaaaaattgcattatgactgtttcattagtccaaaaatataacgttccgggtccgagatataccagttatccgacagttccgtattgggatgaaagctccttttcttcaaaaaaatggagtgcaaccttactgcaaagttttaccgaaagcaatgctgcagaagggattagtttatacattcacttgccattttgcgagagtttgtgcactttttgcggttgccacaagcgcattaccaaacgccacgaagtagagcatccgtacatagacgctgtattgaaagaatggcaattgtactgcgatacttttcccgaaaaacccatcattaaagaaattcacttgggtggcggaacaccgacattttttgcacccgaaaacttagaacaactcatcaaaggtattttagccaaagcggaaaaggccaaagaacacgagttcagttttgaaggccatcccaataataccaccaaggcacatttgcaaaaattatacaacttgggattccgcagggttagttttggcgttcaggattactccgaaaaagtgcaaaccgccattcatcgcctgcaacctttccacaatgttgcgaaagtcactttttgggccagagaaattggctatacatcagtgtctcatgacttagttttcggtttaccgtttcaaacgttagataatgtaattgatactattgaaaagaccaattcgttggctccggacagaattgctttttacagttatgcgcacgtgccttggattaaaggcaatggacaacgcggttttaaagatgaagacgtgccgaaagacgacgaaaaacgcaaactctacgaagtgggaaaagcactgttggccgagcgtggctatcacgaaatcggaatggaccactttgcccttaaagaggacagtatgtaccaatcctttcaagaaggaaaattacatcgcaattttatgggctataccgcctcaaaaacacgcttgatgattggtttgggcgtttcttctataagcgacagctggtatggttttgcgcaaaacgagaaagaactcgaaacctactacgatagcatcaatcgcaatgaattgccggtgttcagaggtcatatcttaacagaggaagatttgattattcgccaacacattctaaatttaatgtgtcaattcaaaaccatttggcattacaacgaaggaaactttaaagaattgcacgaggtactcgacagcttactggaaatgagtcatgatgaacttttggtcatcaaaccaaatagtttgaccgtaactgaaaaaggaaagccgtttgtgcgcaacatttgtatggcattcgacttgcgactcaaacgaagaacaccccaaaatcagttgttttccatgacggtttgattcgtaaaacaatctgtcaatcccaacaatccattccgctaactatctaattcatgccattcaaccgttaaattaggtacgaataaatttattttttcaagtttaaaaaaacatttcatcttaattatttaaccgtttaaataattatttgtaccttttaacttgtttaaaaatccttttatctaattttaacagtattgctgacagattcatttatttttgagtgttacttaaccctgaaatttgtataaaaaaaatgttgcaaatactactaatagaagacgatactatagaggtaatgaaatttgtgaaggtgaccgaaaatatgggtttaaaacatcaaatcatagaaacccgaaatggcgaagacgccttaaagtttttaaacaactccaaacaattgcctgatattattgtattggatttgaatatgcccaaaatcaatgggattgagttcttaaacactttgaaaaaaagcaagcatttaaagcacataccggccattgttttgaccacatccaacaatccgaaagacatcgtagaatgttataaaattggcatagccggctatattataaagccattaaagtacgaagattatgtagttcgcgtagagagaatactggattattggagctcaaacgaactcatcaaatcataagccatgtacggaattgttaataaagcgattgaagatttagtaactactaattatggagaagaacagtggaagctggtattgaaaaaaagcggtatcgaagaaagtttctttatcagtaatgaatcttatgacgatgccatcaccttcaccttggccaaaaccatagcggaggaaatgcaaatccctttggaagacgttttgatctcttttggaaaatggtgggttttgaaaaccaccaaagacaaatattcgggattaattgaagccggcgggaataacctgagagagtttttaattaatctgcctgtttttcataatagagtaattttgatgtatccgaaactaacaccaccggaattcaaaatcagcgagctaaaagaaaacagtcttcacttgcattatatgtcgaaaagagaaggcttgcaggaatttgtcagaggtttgattatgggcctaggcgaattgtttaaaaccgaaacccaaattgaactgattgcctcaagaaatgaaggcagcagtcatgaagtttttaaaattgaatggatttagtttagtatatgcaccaaaaggattttacatttagcgaagctttctttaataaaatattccctttttatattttattggatgaaaacctgcacatcaaatgctttggaaaaagtattgctaaactggtacccgagttacaccgaaagccggcattttcggatgtcttcaaaattatccgtccgtacattgaagaaatcagtatggaaagtttcgataaaagtcttgagcaattggtaattatttcagtcaaagaaccttttgacatcacactcagaggacagtttgaacctatggaaggtggctatatttttctgggttcgccttggtttgtctccatcaacgatgtgatagacaacaacctaaccttaaatgattttgcctttcacgatccgttattagacatcctacacatttctaaaaaccaagaaatcaattataaagaactcaaagaacttttagagacggttaaccaacaaagaaatgcgctaaaacgagacaaagaagaactcaacaaattatcattagtagccagtgccaataaaaacggagtggttttgttctcccctgacggtactattttatggtgtaataatgcgtatttagatattgtttctttagacaaagacgccgttataggtcagtttgtcctcgatttcggtccgtgtaaaattacagacaaagccaaaatcaatgaagtacttgaaggctttagacaaggacaaatatttgaaggggaaaaatccaatttaaccatcaataataaaacccattggtacaaaacaaccaaacaaccggtgcgcaatgaagccaatgaaatcatttattatttcgctttcattgaagatgttaccttagaaaagtgtaaatcgtcagcaaaaagtgtactgatttaagtcaaaactaagagagtgttttcaaaatccttaaatttgatattatgagaacacccaagaaaaaaacagcagagaatttcatcaaagacattcg

SEQ ID NO: 19 - DNA, 74904 bp, Sphaerospermopsis sp. LEGE 00249
  LEGE00249_31
attaatcctgataatataatagcattaactagctatggtaaagccttagctgagtcgggaaattatgaaaaagcttgtgatatttttgagaggtctttaaaaattaatcctgatgatataatagcattaactagctatggtaaagccttagctgagtcgggaaattatgaaaaagcttgtgatatttttgagaggtctttaaaaattaatcctgatgatataatagcattaactagctatggtaaagccttagctgagtcgggaaattatgaaaaagcttgtgatatttttgagaggtctttaaaaattaatcctgatgatataatagcattaactagctatggtaaagccttagctgagtcgggaaattatgaaaaagcttgtgatatttttgagaggtctttaaaaattaatcctgatgatataatagcattaactagctatggtaaagccttagctgagtcgggaaattatgaaaaagcttgtgatatttttgagaggtctttaaaaattaatcctgatgatataatagcattaactagctatggtaaagccttagctgagtcgggaaattatgaaaaagcttgtgatatttttgagaggtctttaaatattaatcctgataatataatagcattaactagctatggtaaagccttagctgagtcgggaaattatgaaaaagcttgtgatatttttgagagatttttacaaataaaatctaataattacatatcttttatatacgctagatgtctagaacatttgggtaaatacacagatgccatatctcaactgcaagcgatagattttgatagtctcccccaatatcatataaatgttattcatattactttaggaagactttattattgtcttcaatcttacgaacaaggaaataagtattttaacttagcacttgctaactcagatgataaagagaagtcaatactatccagtgctagaagtattctcgctcataatccttataatgaaactgctatgaagatgttacaacaaattgctgaagaatcaccacgctattctcaagcactggagatgttgtcactaaatttaagtgaagaagaatattttaaaatggtcaaatctgattatcaaagtggtgtgaatgacaccgaaatactaaatcgagcaatttatcataaaattgctaatgaaatcagtattctcaaaggcattgcttaccggattttgcgtttttctcaaacagaagatcccttacttacaggtattattaatgatattgaggatgtatttgaagaagttaaccgtcgtcgagcattagaaaaatcccaaatttccactattgctaatgatgaatacgagcaaattatagcaattatttccaaaactgctcacgatatttctgattttgttaataatcagttagcaattattgagtctaaaactagacgtgcaatgagaaaacttgctgttgatgaccctcactataagcaatttgagaaactattaacacaactagaatttactcaaattgctcttaatgatctcaaagccattaatgaagggattaaaattaaaaatcatcattttaaaatcaaaaaactatttgaaaaatgggaagctaaccctcatattgataatgcttctattactctggatattaaaaatggtgattcagagtttaatggtgatgaagaaaagatcaaaagtattttaaatgaattagtagaaaattccctcaaacacaatgctaaaaaactagatttaaacatctccatatctacagaggatattatcaatcctccgggaatccgtggtgctaatattcctggtgagcaaaaatatctattaattgagtttaatgataatggtcaaggagttcccccagataaaaaagattggatatttcaacctttaaaaactaccgctagtgaaggtcatggtagtggtttaggattattcattatccgcaaaacattaatacagatgaacggacacatccaagaaactggatggaaaggagctagatttaaaatctatattccttatacagaaagcaaaaatacttaattgtgttaaatttgatataagtcacactatcaggttatactaggaatatagtataatttgctttgtgtcatttttaaatctctgaaaattatagaattatgcagactaaaaatattcatttgctattggtggaagataattctggctacctcactcaacttatagagtggttaaatgattatggttatcgtcagattcagactgcttctagtgtagttgaagcaacagaaaagttatgtgatccttttgatgtcataattgctgatatgcgaatggagcaagataacagtggatttgtgattttggaagaggtaaaagcacgtaatctttcatcagtggtgattatcctcactgctaatgataatgtggtagattgtcggaatgcttttaaattgcaagcatgggactatatttctaaaaccatgcggggtaatgtttttgatgctctccacgattctatccaagaagctattacctattttaatcggtggggtaatgttcacaatgaacaatggataactgaaaatctggaaattttagaaaaagactattggggtaaatatattgcagttattaataaaactgtgattgaaacagcagataatgaagataccctcaacgcattacttgaggaacgaaaattaagacggtttttaactactattagaaaaataggtgatttacaaccaatttctcaacttataaaattaccagaaagtccgaaactagaatataaaagcactttgcaatgggatgttagacaaaatcgtaaaaatgaggatttaaaatttagtgtccttaaaactattgctgcttttctcaattctgaaggtggaactttaattattggagttgaagatgatggtaatatttttggtttagagcaagatttagtgatactttccaaaggttctctagatcaatttgagcagacaattgtacatctaatttgtacgtacattggtgctggttttatgtcattagttacggtcagatttgagacaatagacagtaaaacagtatgtgcaattgatgtcagaaaatcagatataatagctgtgatgcaaggtaaagataaaaaatcagaactctatattcgtgctggtaatacctcaaaatctcttgatatttcagcaacagtagaattttgtttaaatcagaacaaaaacaatatcaagagttgatataatatgagagaaaattatgatttttctcaatctattaaaaatccctattctaaacagttgaaaaaacaaatcacaattgatttagaacaggatgtaattgaatactttgaagaaatagctcaagaaactggcatttcttatgtaaaattaattcatctttatctgcgtgaatgtgtggaaaatcaacacaaattatcaataatcaaacaaataacttagacggaacataaaaatatttacctaaaacttcagcttgttctgcattgatattacaatcacctttaaggatagcattgactatttcctgatcaccttctttaagacctaaaatatttaataaatctgcttcattcattcccctttcttccatcaaatgttgtaaaacttgtagaggttttgctggttctaaaggatgattttcagtttcatatttttctaccaacatcactaataaatcatataaagcatcttcttctgtggttctatttttgttaaagaaaagccgttcaacttcttgtaatgctgattgatattcattacgatcaatagcataatttatatcctttcccatcctgtaaatcctgaaatcctgtacttcgacttacttcgactgcgctcagtacaagtcgctcagtaaccagacatcctgattcagacaaaaaaatcactacaatcaataatataatttatatctttcatcatcctgaaaatcctgaaatcctgtacttcgacttcgctcagtaaccagacatcctgattcagacaaaaaaatcactacaatcaataatatagttgatatctttgatcatcctgtaaatccttacatcctgtacttcgacttacttcgactgcgcccttcgacaccgcccttcgacaccgcccttcgacaccgctcaggacaggctcaggacaggctcagtacaggctcagtacaagtcgctcagtaaccagacatcctgattcagacaaaaaaaccgacaaccagacgaaccaaaaacaccaagaaaaatcaacagtagggacaattcataaattatccctaccgcaaattagagtagggtattaaccacggaagaaggtgctaccccattttgggaatcattaatcgtagtatttgcgctttgtggctgaatttcttcctgtacaccccgcaccttaatcaaccgaatagcacgactcacactttccggtaaaatcaccaccagactaccatcaggagccatatccaaacctttattaatggcttgggtttcatccagaattgattcataacggcaattaggtttagcctgattaatgccttgaataatcaaatctgcggctgatccccgtggtctgcctctagtgtcatcatcttctttcacaatgatgtagtcaaaaatatcagctgctaatttacccagaatgacaaaatcttcatcccggcgatcgcccggtcccccaactacacctatgcgctgtccacttgtccagttacgaacaaaagatcccacagcttcataactagcagggttgtgggcataatctaccaaagcatgatatttacccaaattaaacaaattcatccgtcctggtgtttgactcactgaagcgcggaaagtcctcaaaccagaacgaatttgttcaatactcacattctgtacaaaagctgccaaacttgctgctaaagcattggcaatcataaacggcgcttttccgcccattgttaagggtatattttctgctctttctatccgatgtgtccaatcgcctttaacaattgacagataaccattttcatatactgccgctactcctcccttctggatgtgctttcgcaccagttccgagtcaggattcatggtgaagtaggcaatattggcttttgttttttctgccatcgctgctactctggtatcatcagcattgagaactgcataaccatcaggaaacaccgcttcagcaactacacttttcaggtttgctaactgttcaatagtatcaatatcaccgatacctaaatggtcagcagccacatttaacaccacacccacattagccgcatcaaaacctaacccagaacggagaataccgccccgtgccgattctaatacagccacctccacagtcggatcttgcaggatcacatgggcgctttggggacccgtgttatctccagcttccaccaagaaatcaccgatataagtaccatctgttgtggtataaccgacaactttacctgtttgcttataaatgtgtgctaacagacgagttgtagtagttttaccattagtaccagtgacactgaggataggaagacggctcggtttttcgttggggaacagcatatccatgactgcgccggcaacattgcggggagtacccacactgggagcaacgtgcatccgaaaaccaggggcggcgttaacttccacgatcacaccatccatttctctcagcggacggctaatatccgtagtgacgacatccaaacctgcaatatccaaaccaatgattttcactacccgttgtgctaaccagacattttccgggtgaatttcgtcggtacggtctacagcaataccacctgtactcaggttagccgttgcccgcagataacaaatttgccccttgggaggcacactattaacggtgtaaccttgtctttctaatagctggtagctggtacgatctaactcaattttagtcaggacattatcatgaccttcaccgcgatttgggtctttattggtttcatcaaccaattcagcaatagtggatttaccatcaccaactacatgagcgggaactcgttccgctacagctacaactttaccatctaccactaacacccgatggtcacgcccaacataataccgttccacaataatagaacgggaaacctgtctagccgcgtcatagcctgcttcagcttcatcccaatttctgatatcaatggtgataccacgtccatgattgccatctagaggtttgatgactataggataaccgcccacatattcaatggcttcttccaaatcatccaagaagttaatcaccgtacctctgggtactggtacaccattggtagcgaggatgcgtttggtggcttctttatcacaagctaattctacaccgagaatgcctgttttatcggtcattgtggcctgcatccgtttttgattcacaccatagccgagttgaatcagaaacctggcggctagaggcatccaaggaatacctcttttttctgcttctttgactattgcttctgtagaaggaccaagggaagcatcacgccaaaagtctttaaggtcttgaatatcctgctctaactcggctttaggataacgaccccggtcaacaatgctttgacaaagccgcactgctgcacgtcccgcataacgtcccgcttcttcatttaagtactcaatcactacctggtaaactccaggagtggcagtctcacgggtacggccgaaacctacgtgcattccagctagttcctggagttctaaagctacgtgttctacgatatgacccatcatggtgccttctcgtacacgcatcagaaaaccaccacgacagcccggtgaacaatagtgaccctccagacttggtagggcttcaactaatccttcataaaagcctgggatttgatttgagggtgtttcggcaagattttccaaatcaaggcgcatgacgattagtttatggcgtcgaatgctccaatagtttgggccgcgtaaggtctggatcttgaggattctcatgggaataggtagatggagattcggaaccaaaattctagtttcttactgaaattgaccgctaaactgttcactataaacagttttttctttttagatagtatttgtctattttttttggtaacaacaaataaatacgcggtcaaccagtgtaacctcagatactctatcccgtcagctggagatccgatgcacagcgggtaaaacagtacgttggtaaagatggaagcgatctccgtaactgaggatatgtagacgtaaattatgtacagttaatggttcgttagcactaacatggggttcgttagtatgggtaagttctgtaggatcaacaattgtgacgctacctttacctaatacttgcaaccaaccatcacgttcaaacacagcacaagtatcttcatcaatgccaataccaagacgatctggatgggctgcgatcgcactaatcaatcttcccatgcgattgcggttgtgaaagtgttgatcgacgataacttcaggaataaatcctaaacctgtggccatatcaaccagggaacgattgggcgtttccccactacctccacctgcaatcatgtgatgtcccatgactgctgcccccgcactcgttcctgctaaagtcagttgtcctgctcgcacccgctggcggataatatccattgccggtgtatctgacagaactccacagaggcgcaattgatctccccctgttaaaaagaccccagtacaggcttctaaggatgcctgaatttgagagttgtcgcattgttcgcgttcacgaatgtctaaaatctcaaccttttccgcacccatttcttcaaaaatgcgaatataccgaccaccaatgatggctggttcgcgggaggcagatggaacaattgtaatatatgccttactagcaccagcacgagcaacaaaagtccgcaagatttcgcgtccgtgaactttgtcttctgcgcctccgataactagaacggcggttttagttgcttggggtgtcctcatttccagcgatttagcttttaattgctgcattgtgtttctgtggtcaacaacttcaggaaccatcgcctttaaaggtttcccaggcttgtggcgaatggcttgtgaatttaatcaggtttagtcgcctgtttcttttcgccctttgcttttttaagaggacacttgtgatcagtttcagagttgctaaatttgactctccaacttttccttaaacgcagatgaagtttaagttctgtcatgtccgttactgttcctcatcaccagcgccttgtttttcacctttctgctgattccagagtggtagaataatagtgctttcaggctgggtttaccctttagttttgggggcgaaagcaggtcttgacactcttttttctgaagttggctcgatacatcctggaagttgttaactttggtgggattattaatttaaatttagttgtgacaatatttaaacataaattaagtaattagaaaaacttttgctcccaccaaaaagataagaattctggtacttttagatactatagctccggtttatctctagtattacctcctcctgacttcacaggaactcttaatgggataaagatgggaagatagaaagatgggaagatggggagaaatatttacttacgttctgccttgtgccttctgtcttgtgccttgtgcctcattggtaatttacgttaaatgtcccaatctcatcttagtgtcattaaatacgatttattgtgcgttttgatatagttacactttttcctgatagttttagttcagttctgggatctggtcttttgggcaaagccctagccaagcagattgctgaagtacatctggttaatcccagggattttaccacagataaacatcgtaaggtagatgatgaaccctacggcggtggtgtggggatgctgatgaagcctgaaccgatttttgcatctgtggaatctttgccgattttaccccgtcgagaggtaattttgatgagtccccaaggtgaaacaataaatcagcccctgctgcgagaattagcaacaaattatgaccaattggtggtgatttgtggacattatgaaggggtagatgaaagagtgctaaatttagtcactcgtgaagtatctttgggtgattttatcctcaccggtggcgaaattccggcgatggcgttattaaatggcgttgtacgcttactaccgggaactgtaggtaaggtagaatctctcaaggctgaaagttttgaggaaggtttattagattttccccagtatacccgtcctgccaattttcgcggttggaaagtcccaaatgtgctactcagtggtaatcatgcggaaattgccaaatggcgttttcaacaacaaattcaacgcaccgcttcccgtcgtcccgatttgctggaaaaatggcaacaagagagggaacaggggactggtgactggtgactggggactggggactggtgactggggactggtgactggtgactggtgactggggactggtgactggtgactggtgactggggactggtgactggtgactggtgactggtgactggtgactggggactggtgactggtgactcctgactcctgactcctgactcctgactcctgactcctgactcctgaacttctattttttatgaacatcagaattggtaacggctacgatattcacagattggtgagcgatcgccctttaattttgggtggtgttcacattccccatgaactcggtttgttaggacacagtgatgctgatgttctcactcacgccattatggacgcaatgctgggagctttatctttaggagatattggccattatttcccccccagtgatccccaatggaaaggcgctgatagtcttgtgttattaaaacaggtaaaccagttaattattgatcaaggttggaaaattggcaatattgattctgttgttgttgcagaacgccccaaattaaaaccccatattgctacaatgcgagataaattagcagcagttttacaactagaaccaaatcaagttggtgtcaaagctactactaatgaaaaattgggtcctacaggtagagaagaaggtatttgcgcttatgctgtggttttgttagtggctggtgattagttaataggaggatgagaaaatgtttagtttagataaacctgaagaattagttaaaatcagactaatttctaatatttggaataatcaagttgattcaccagaaaaaatagaaagtttatttcaactaccttctccagatattattgtcttagatcaaaatcagcaaattgcattattagtagatatcacaacgcaagaaattctgaaaaatcatgaaaataatttatcaaaagtcagcaacctatatttacaaaactctcaggaaaaccctagatttgctaatatagcaaatctaacagaaattaaggtttttaaatctattaagggcgtatttgtcaagccagagatatcattaaatacaggaaaaattctcagccattatgattcagaatttggcgagaaaacaatatttataatttataatttaatattacaatctatcctagatcatgctcaattatatcctcaagaaaataaagcatttattagtaataatagtaaagactttggtacatcagaagttaaaaatgctttagaacaagcaggaatcagatatttgacaatgacacagcattttctcgactggtttaataattcccgttcatcaacctaaatagtattgagattttgtggttatattagattttgtggttatattttgtgaaaaaaattatgaaattcaataaaaacattctcaatcacacaacacgccttttattactcatcaccatcctgtcatttacagcattatcaatcacaggttgtaaccccagcaacttcaaaagtaatgcaactcaaaaagtaccacaattaatcaccagtatactcagcgatcccaaaacctttaactatgccctcagttccgaatcacctaatattttcggttatacttatgagggactaattagccaaaatcctattacgggtgaactagaaccaaatttagctgaatcctgggaagtttccgaagataaactcaaaattaccttcactttaaaggataatttaaaatggtcagatggtaaaccattaaccgttgatgatgtcgtctttacctataacgatatttatctgaatgaagacattcccactgatgtgagagatattttgagaattggaaaagatcgcaaattaccaaccgtgagaaaagttgataataaaagagtagaatttagtgtacccgaaccttttagaccattcttacaaagtgctggtgctgctattttacctgctcatgtattaagagaatcggtaaaaacaaaagatcaagatggtaaacctaaatttctaacaatgtggggtgtagatactccacctgagcaaattattgtcaatggaccttataaagtagaacgttacgataccagtcaacggatacttttccgtcgtaatccctattattggcgtaaagatgcacaaggtcaatcccaaccttatattgagcgtattatttggcaaattgttgaatctacagatacatctttactgcaatttcgttctggtgggttagactttgtaggggtgacacctgattatttttctttgctaaaagcacaagaaaaacaaggtaatttccaaatttataatggaggtccttcatcaagtacaagtttcatttctttcaatttgaataaaggtaaaagaaatggtaaaccccttgttgatccgattaaatcacgttggtttaatagtgtggaatttcgtcaagctatagcttacgcaattgatcgaaaaaccatgattaacaatacttttcgtggtttaggtcaaatgcaaaattcgccgatttctgtgcaaagtccttattatctcactccagaacaaggattaagagtttataattacaatcctgaaaaagctaaggaattactactcaaatctggttttaaatacaatgcacaaaatcaattagaagatgcacaaggaaaccgggtgagatttgctttacttaccaatgcaggtaataaaatccgtgaagcaatgggttcgcaaattaaacaagatttgagtaaaataggtattcaagttgatttcacacctttagcatggaatacttttctagataaactttctaatactttagattgggaagcatcgttgttaggtttaacaggtggtttagaacccaatgacggtgcaaatgtttggtctcctgaaggtggtttacatatgtttaaccaaaaaccccaaccaggacaaaaaccaattcaaggttgggaagttgcaccttgggaagcaaagatacatcaactttatattcaaggcgctcaagaatttgatgaagcgaaggtcaaggaaatttatgctgaaagtcaaaaaataacacaggagaatttaccctttatttatttggtaaatccctattcactaggagcagtaagaaataagttcgcaggaattaaatattctgctttgggtggtgctttctggaacatttatgaaattaaaattacaaagtaggtgactggtgactggtgactggtgactggtgactggtgactggtgactggtgactggtgattggtgactggtgactggtgactggtgactggtgactggtgactggtgactggtgactggtgattggtgataaataattatctattaccccattccctattccctattccctattccctattccctattccctattccccattccctattccctattccccattccctattccctattccccattccccaaaaaactgctgtgagtcaacctgaaaatttaaaatctctattagaatctgttgctaatggtacaatttccccagatacagcttttgaatctctcaaagatttagcttatgaatctgtgggtgagtttgccaaaatcgatcatcatcgtcatttaagaaccggtttccccgaagttatttggggtcctggtaaaactcctgagcaaattgctcaaattatggaagtgatgcgtcatcgtacttccgtagtcatggccactcgtattcaaccagatgtatattctatcctgcaaaaaaaagtcagaggtttacaatactttgaattagcaaggatttgtgcgattattccccatgaaattcaaccgcgttttcccggagaaataggtatagtttctgctggtactgctgatttacccgtcgctgaagaagctgctatgactgcccaattatatggttttcgggtacaacgtctttgggatgtgggtgtggcaggtattcaccgcttattaaataatcgtcatttgcttaattctgcatctgtattaattgttgtggcgggtatggaaggcgctttaccaagtgtagttgcaggtttagcagattgtccagtgattgctgttcctactagcatcggttatggtgcaagttttggcggtttagctcctttgttaacaatgcttaattcttgtgcagcaggtattggtgtagttaatattgataatggctttggtgcagcggtgttagcaggacaaattttgcgaacttccgagaaattacgcttggcatcggataaagagttaggttaatacagtgaaaactgcgtataatttcggtaactgctgattggatcaattactgctaattcaataagctgatcacccgtttggtaaagagattatggaatatttgcattttcatgatacactgttttcccttttgggaaatatacacattgatattaactttgtagctactaagatacaagacccagatgttttaggacagatgcaaaatgcttggaataactttgttaaaacaggtcaagtttgggcaatgttaattgggatggttatcggctatatgtttaagagtttaacaacttacggttgaatgaattttggattttagattttagattttagattttagattttagattttagattttagatttggaattgatattcattcaaagtctaaaatcacaaattgttattacctctcctttctaatttatgaccgaaaaacaaacttggagccagcggtttgaaaccgctctacatccagcgatcgctcgttttaatgccagtatcagttttgacattgaactcatagaatatgacatcactggttctcaagctcatgctcaaatgctggctcacacaggaattatttccccagaagaaggagagcaattagttacaggtttagaacaaattaggcaagaataccgagaaggtaaatttcaacctggtattgatgccgaagatgtgcattttgctgtagaaaagcgacttacagaaattattggcgatgtcggtaaaaagctacataccgcccgttctcgtaatgaccaagtaggaacagatacaagactttatttacgcgaccaaattcaacaaattcgccgatatttaagggaatttcaaaaagtattactagatatagcggaaaacaacgttgaaaccctcattcctggctatacccaccttcaacgcgcccaaccgctgagtttagcccatcacctcttagcatacttgcagatggcacaacgggactgggaacgtttaggagatgtttacaaacgagtgaatatttcccccttgggttgtggtgctttagcgggaacgacttttcccattgacagacattacacagcaaaactattgcattttgatgatatttatgctaatagcttagatggagtcagcgatcgcgattttgccatagaatttctctgtgcagcgagtatgatcatggttcacctcagccgtctttcggaagaagtgatcctgtgggcatcagaagaatttcgctttgtcaccctcaaagatagctgtgccacaggttctagcatcatgccccaaaagaaaaaccccgacgtaccagaattagtgcgcggaaaaacagggcgtgtttttggtcatcttcagtccatgttagtaattatgaaaggtttacccctggcatataacaaagacttgcaagaagacaaagaaggtatttttgatgctgtgaacacagttaaagcctgtttagaggctatgactatattaatgcaagaaggtttagaatttcgaccccaacgcctagcacaagcagtagcagaagacttttctaatgctaccgatgtcgcagactatttagcagcgcggggagtaccttttagggaagcttataatatcgttggtaaagtcgtgaaaaccagtatcgctgctggtaaactgctgaaagatttaaccttgcaagaatggcaacaaatacaccccgcctttgcagaagatatttatgaagccatatcaccccgtcaagtagttgcagcccgtaatagttacggtggtacaggctttgagcaagttaaacaggcgctcattgctgcacgtactcaaattttataacaataaattggtaattggtgatgggtgattggtgattggtgattggtgattgggaaaaaaataaactgttgccttctgccttttgccttctgccttttgccttctgcatcccaaaaacaagggcgtacagataaaaataaatgtacgcccaaacatagcaaattaattccagagtaaatattcaaagagtaaatattcaaacagtcaaattaatcagcagcgtccattgctgctgcccctgtttcttcatcttcactcttaggtggtctttgttggaaccgtctttgcattcttcctgtagtagtccgtttacgaaacttcctggcataagcctggttccgtagcgccttttcttttttcgggttacggcgcttggccatattcacctcatgaataaacaacaaaaaacctacactcaggcaatatccagttaccgatgttattgatacactttcagcctagtgtagaaatgaaaatagttgaaacagtatcctagtctaccttatttaatggaggtatgtcaagccggattgatcataatttttcttatgagtcaggagttcaaggagtcaggagtcaggagttcaaggagtcaggagttcaaggagtcaggagttcaaggagtcaggagttcaaggagtcaggagttcaaggagttaggagtttaaggagtttaaggagtttaagcagttaggcaattactgacagcagatgttaaaattgactgattctcagaatgaccatgagcaagtcctaagttgacaatttcatagacaaaactatacttgtattgacaaaaatcaatatatttttaggaaaaaatcaactacttgatatataataaatacggtgatatcaagtattgaattgagactattgccgacgcgaaaaccaagcaatgatggtggtagtctttttcagaaacttaattggaacacaatcgcgtctggctaaggcgtgaaagtctactgagggataactgctcccatgctcccgttgaagtagaaagtaaagtctagttttgtctaggttttatatagcagaataataaacctaatacttgatagagttgtataaaaaaaacgaaaatcatcttttgtgagttacatttctatcaagtgttcgccaattaacaattacaaaataagaatttgaagattgaatattctggctttttttagttcattaattaaatctattggtagcttatggcacgttggaaaaacagtattgggtattatttttcgccatcccattactggtactagcgtgattcccattttacctgatggtagaattgttttgattcgtcgcagtgatgatggttgttggtctttaccgggaggaatgatagactggggagaggatattgctagtgcagtttgtcgagaattaaaagaagaaactggactagaattattaaaaattcggcgtttggtaggggtatattctgcaccagatagagatccaagaattcattctatttgtattgtggtagaagcagaagtacaaggagaaatgaaagttgaagataatttagaagtgttagaaattcaagcttttgatcctagttctttacctcaacctcaaatgtctcatgatcacgctagacagttagaagattatttacaaggtttaacaactttggcataattggtaattagtcattagtcattaattttctttaccaattaataaataagctgttgtgcatttaatttatataaggttaacaggcaagatgcctgttccacaagacttaagaatattaagattatacagtttagctgcataacagcttaacttcaatctgaaatgcgatcgctgatcttgtaggttgggttaaggaacaaaacccaacaaactatccctaaaactagctaaactgtataatcaaaaaacctgaacttacagtagcacaagcatcttgcttgtattaattattcaagttaaaggcacaacagcttaacttcgctctaattttattactgctatataaaacctagacaaaactagactttactttctacttcaacgggagcatgggagcagttatccctcagtagactttcacgccttagccagacgcgattgtgttccaattaagtttctgaaaaagactaccaccatcattgcttggttttcgcgtcggcaatagtctcaattcaatacttgatatcactgtattatatatcaagtagttgattttttcctaaaaatatattgatttttgtcaatataagtatagttttgtctatgaaattgtcaacttaggacttgctcaattactcaattactcaattactcaattactcaattactaaaaattactaaagtgacaactacagcaaatacaaatcatcaagagttagtcggtttgatttggagtatagccgacaaactccggggaccttaccgccctccccaatatcggcgggtgatgttacctttgatagtgttgcggcgattagatgcggtattagaaccaaccaagaaagctgtactggaagcccaagtaaaatatgagggaatggggataaaaggagacgcactagaaaaagcgatcgccaaagttgccacaggtacagagagaactcaacctttatacaatctcagcaagttcacatttaatacatctgacacctcatccacagaacctaactatattccccaatatgtaagtttattgagtgacccagatggcattaccagtaacttacgcaattatatcaatggtttctcccccagggcgcgagatatatttgaaaaatttgattttgatgcggaaatagaaaaactcgatgaaagtaatcgcttgtatttagtgattaaagaactttgtaaaccagaaatagatgtatcaccagagaaactttctaacctacaaatgggttatttatttgaagaattggtgagaaaatttaatgaacaagcaaacgaagaagcgggagaccactttacaccccgtgaagtaattcgcttgatggtaaatttggttttttgtgatgaacaagatgtttttaaacaaggtatttatcgttctatttatgaccccacagccggaacagggggaatgttatcagtagcagaagaacatattaaaaatcagaatccccaagctaacttaggattatttgggcaagaatataaccccgaatcctatgctatttgttgtgcagatttactgattaaagatgaacccattgataatattatttatggcgacaccttgggagtaaaaaacgccaaagctaaaagtaataacttcttaccccaggacggacatcctgataaaaaatttcattatatgtttgccaatcctccctttggagtagaatggaaaccagagcaagattttgtgcaagatgaatatgaaagcttaggatttaatggcagatttggcgcaggtttaccacgcattaatgatggttcattgttgttcctgcaacataagatatcaaaaatgcacaaaccaccagaggaagggggagacggttcaagaattgccattgtttttaatggttcacctttatttacaggagatgcgggaagtggtgaaagtaatattagaaggtggatcattgaaaatgactggttagaagcggtagttgcattacctgatcagatgttttataacaccggaattttcacttatatttggttagttactaataaaaaagcggatcatagaaaaggtaaagtccagcttattgatggtacaaaacattaccagaaaatgaaaaagagtcttggtaataagcgcaatgaattatcccccgcacatattaccgaactggtgcgattatatggagattttcaccacaatggtattagtgaagtagaaacagatggacaaatagaacagcgagtatgttctaagatatttgataatcgggaatttggttttttaaagattactgtggaacgtccattaagattaaattttcaggtaagcgaggaacgtttagggagattatgggaacaaacagcgtttcaaaatttagctactactaaaaagcgcaaagatgaaaaagtacaacagttagaaatattagagggtaaaaatctccaatcacagattattgatgctttgcaaaatatgcaagctgataaactgtatttatcccgtacagagttggaaacagatttaaataaagtgttaaaaaaggcaggattgacattaaaagcacctgtaaaaaaagccattttagcagcattaggagaaacagatccacaagcagaaatttgtacagatgctaaaggaaatcctgaacctgatagtaatttacgtgatacagaaattgttcctttaccagataatattcccttacctttacctttggaatatggagacaaagcgagtgtcaatgaattgattaagttagtagacaaccactgtcaagaatatttagaaaaagaagttttaccccatgttccagatgcttggattgattttgataaaactaaggtagggtatgaaattcctttaaatcgccatttttatgtatatcaaccacccagaaatttagatgcaattgaggatgatattaaatctttggaaacggatattatggcgatgttaggggaagtggtataggttgtagtagcagaattaagatccccgacttctttaatattcttgtccagaaattattaattaatggtagaagtcggggatctgggtatgatggaagattgttaataaaagttttcatcttgtccctagaatatgctgtaaaattaaaagatagattggggagattttagtaatggcattagtgattttagatgaacaattagaaagtattcagctttcagaagcagtcagacaaaaggctttacaaaaagccaaggaaggttatgtaatgacattattagaagtaggagaaattaccagtggtagggctggtaaaattctgggcatttctcgtttagaagtcatagaaatgatgaaaagatggggtatttctctttttgatgattctcaaaccttggatgaattacgtcaagaagtagaacaagcagaattagcaaaattaattttaaatcaacataattattaaatgataatcgtttctgatactacgccaattagtgaattagctaaggtaaatcatcttgatttattacccaaactttttggtaaagttattattccccaggtgttcaaggtgttttagatgagatgcaagcacagggaatgagaatttctgacagactttatgtacaagttttgactttggtacaggaacaggagtaagaataaaaaagaagtagggtatttgttcaggtataataaaaaaatagattagggagattttataattatgcaaatcaccatagatttaccagataatttaacagataagattcaaaatgaatggggtaatttaccacaaaaaatcattgccaatcttgtcttagatgctttgcgggaaggtttaattgattttcaggaaatgaaggagatgcttaactttttctctgaagctgaattacaggagtttttaaaacaaaagaatatgctgcatactaaaggaatactcaatttatctggtgcttgtgcggatattgattttaatattgatgaactagggatttatgaagatagggatgatgatttagttggggtgtttaatgaataaaaattctttagtttatttattagatacaaatgcttgtattatgtatctcaagggtaggtcattagacatctccacaatagaatgtattaatttgtaatatgttgtaggggcgaagcatttgggcgataatttaacggaaaaatcagacatctagatatcccataagcttcgccctgcccccataaataagttccataatttcttttctggagatgtctattgagtattaattatcatctcgataatctagaacctgaaaaagttgcggtttgttctgtggtcaaggctgagttattttatggatcaaagcgaagtaataaccctgaaaaagctttgaagattcaaaaatcatttttatatcaatttgtatctttaccttttgatgataattgtgcggaagtttatggacaaattcgggctgatttagctaaaattggtactcctattagttccaatgatatacaaattgctgctattgctttggcgaataatttaatattagtaactcataatgtgagagagtttagcagaattgacgggttaaagtttgaagattgggaagttagttaaatgggtaagtatcagggttatgataagtataaagattctggggttgagtggttgggggcgattcctaatcattgggaagttatacctattaaattctctttatctatgccaattacagatggaccacatgaaactccagatttattagatgatggaataccatttatttctgctgaagctattaaaaatgatcaaattaattttgacaaaaaaagaggctatatttctttagaagaacataaaagattctctaaaaaatataaacctaaatatggtgatgtttatatggttaaatccggtgcaactaccggaaacgtagctcgtgttcaaacacatgaagaatttaatatatggtcgcctttagcagctttaagacctaatcaagaaaaaacaacaactgattttttattttatgtgattaagtcaaaacctttcttctattcagtggaacaaagttggagttttggtacacagcagaatataggaatgggaattatagctaatattagaattacttttcccccattagaagaacaagaaaagatcgctcgatttttagactataaaaccaaacaaatagatgaactgatagcgaagaaagaaaccctgattgaaaaactggacgaaaaacgcacgtcccttattactcacgcagtcaccaaaggactagatgtaaatgtcccgatgaaagattctggtattgagtggttgggtgatattccgaagcattgggaagtaaaaagattacgctacacagggttttgtcaaaatggaataagtaaaggtgctgattattttggttttggttatccttttgtaaattatacagatgtttatgcaaatccagaattaccaaaaatagtaaatggattagctaattctacagatgaagatagaataaattattcagtccaaacaggagatatattttttacaagaacatcagaaactatagaagaaataggcattacatcaacttgtttacagtccattgataatgcaactttttcaggttttttaatcagagttagaccctttgcaaacttaatatttccaggattttcaaaatattattttaggtgtcaactgcatagatttttctttgtaaaagaaatgaaccttgttactagagcatcattaagtcaggaacttttaaagaaattaccagtattattacctccactccaagaacaacaaaaaatagctgaatatttagactataaaaccaaacaaatagaagaacaaaaaaccaaaattaaacaagccatagacctattaaaagaataccgcacagccttgatcaccaatgccgtcacaggtaaaatagatgtgaggaaaattcccatacctaaaatatagttaatgtagctaaataaatcaaacctgtaatcataaaacctgatgctaaaacatttttaaacccgttccctattctctaccacaaaacccatgatagaccacgatagactatttaaagaattaatccaaacattcttttgggaatttatagaactgtttctaccagaaatattagaatatgtagaaaaagacaccctcacctttttaccagaagaaatatttacagatgtcaccgctggagacaaaagaaaaatagacctattagcacaagtcaaatggcaaggacaagacagttattttttaatacatctagaaaaccaaggatataatcaaaaagaatttgaacggcgaatgtttcattacttttcccgtttagatgccaaatatttacttcctatcttccccatcgttatattttcctatgatgaaccaaaacgcccagaaaaaaaccaatataccgttaacttccccaaccgcaaaatattagaatttaactatgttgccattcaactaaacaacctcaactggcgcaactttttaaaccaacccaaccccgtagcagcagcattaatggcaaaaatggactttgcaccagaagaaagagtccgcgtcaaactagaatgcctaagaatgttagtaacactccagttaaaccctgctaaaatggaactaatttccggtttcattgacacctacctcagattaaacaccacagaagaacaacaactagaaacagaattaaaacaagctaacttagtagaacaggaacaaatcatggaaattgttaccagttggatggaaaaaggtattgaaaaaggtattgaacaaggagaacaaaaaattatcaaaaaacaaataaaacggcgttttaataatattacacccagcctagaaaaccggattaatgaattatctgtagaacagatagagagtctagcagatgctatttttgatttccaatctgtagataatttaattaactggttagatcaacaaaaataacttaaaataacttaattgtaggttgggtagaacaaagtgaaacccaaccaatttaaaatatttacagcatatttcatctacatgatgtacagaacaggcaagacttgtactgagcggttagtgagcttgtactgagcgacttgtactgagcgtagtcgaagtaagtcgaagtgcggagtcgaactatgtcgaagtgtgcctgtgctacaagagttaagaatattaggattatactgaaaatatttacaaaatttggttatacaccaatgcacacagaaaaagaatttgaacacaccatcgaaagagaactactgcaacacagtggctaccaccaaggtaacgccgcagaatacgacccagaaaccgcccttttccccacagaaatcatcaatttcatccaaaccacccaacctaaacaatggcaacgcctagccaccaataaagacccccaaaaaatcctcatagatagcctcaccaaagaacttaaaagccggggaatgctagatgtcctccgtaatggtttcaaatgctacggtaaaaccttacgagtcgcctacttccaacctaacacagccatgaaccccgacaccttggcacagtatcaaaaaaatcgcctcaccatcacccgccaagtcacaattaaaaccggaaaaatccctgatatcctcctcagtatcaacggactacccatcgccaccatcgaactgaaaaaccccttcacccagcaaacctacctcaacgccatccaccaatacaaacaggatagagaccccaaagaccccctatttgtctttaaacaacggtgcttagtccactttgccctagacacagaagaagtatggatgaccaccaaactagcaggagaaaatacttacttcctccccttcaacaaaggccataaccacggtgctggcaacccaccgggggaaaatggcgaatatcgcaccagttacttttggcgagaagtattagcaaaagatagtttattagatatattagcccgatttttacacataaaaattgaagaaatcaaaacacccacagccacaggaattaactatcaaaaaaaagaaactttaattttcccccgctatcatcaacttaatgtagttcgtcaattaattgcacataccaaaaaacataaagccggacataattatttaattcaacattccgcaggttcaggaaaatcaaactctattgcatggttggcacatcggttagccaacctccacgataaccaagatgaaaaaatctttcataccgtcgtcgttatcaccgatagaaccatcttagaccaacaattacaaaacaccatttatcaatttgaccataaagccggagtggtgcaaaaaatagatgaaaacacccaacaactagccacagctttaaatgatggtgtaccaattattatttccactattcaaaaattcccctttattaataaagccattcaaaccttagctaaaaaaggtaaaactatagacatcaccaccaaagataaacgctttgctattatagtagatgaggcacatagttcccaaagtggagaaaccgccaatgaactgcggcaaattctcaataaagatggcattgaatcagccattgctgcccaaattttagcagatgaaacagaagaagatttaacagaccaagccaaacaagaactattaaaagaacaaattgcccgcaccaaacaacctaacttgagttatttcgcctttacagctacacccaaacaaaaaaccctgctggtatttgatgaaccaggagaaaacggtcaatctccctttcatctttacaccatgcggcaagcaattgaagagggatatattaaagatgtactagccaattatacctgctatgaaagatattatgaacttgtccgcacctcagaaaaaaatcccgatttaccccgtcgccaagcagccaaagccattgccagatttatcgaatttcacccccataacatcgcccaaaaagtagaaattattatcgaacatttccgcaaccatacccgtcataaaataggcggtaaagctaaagcaatggttgtcacccgttcccgtgaacacgcagtaagatataaactggaatttgataaatatattcaagccaaaggctatagtgatattaaatctttagtcgctttctctggttctatcaccttagatgaattaccagatgaaacatttacagaagtcaacatgaatggaggaataaaatctcaagaaattgccgataaatttaccagtgatgcttaccaagtattattagtagcgaataaatttcaaactggatttgaccaaccattattacatacaatgtttgtagataaaaggctagatggagtccaagcagtgcaaactttatctcgcctcaatcgtaccactacagggaaagaagacacctttgtactggattttgtcaacaaaccagaggacatttaccaagcttttaaaccttactacgaagaaacccccgtaggagaaacagcagatccccaacaattaaatgatttatcctatcaactttatcaatggcaactttttagcctagatgatgttaaccaatggtgtgaaatttggtttcgtcctaaaacttccttgactggcggtgaacatcaaaaattaaatagtttattagatccaattgtagacaaatatcaagaattagcagaaccagaacaagaacaatttaaaaatcaattaaccagctttcgtaatttgtatttattcctagcgcaaattattccttatcaagattcagaacttgaaaaactttatgcttacggacgatttttactcaagaaattacccaaaagtaaaaacgctccccaaattgatttatctagggatatagaaattaaatattatcgcttagaaaaaatcagtgaaggcaaaattgatttacaagaagggacagcagaaccattaacaggtgctacagcagtgggaactcgtcaaccagatagagaagttcccctatcccagcttatagactctcttaatgaacggtttgggactaattttaccctagcagatcagttattttttgaacaaatcaccgaaacagctattagtaaagatcatatcaaacaagcagcccaagtcaacagcaaagaaaacttcgcccctgtcctagaaaagcatctggaagcgttgtttattgaacgcatggacgggaatgaaaaaatctttatggaggtgatgaataatgaagaatttaaagcggtggtgtttgataagttattggctagtatttatgagagtcttaaaggtgagaatttatgatagtgcgatcgccaattctgtagggtacgttaatgaaatgtaactaaaatttggatatctggttactgagcctgtcctgagcctgtcctgagcctgtcctgagcctgtcctgagcctgtcctgagcggtgtcgaagggcggtgtcgaagggcggtgtcgaagggcggtgtcgaagtaagtcaaagtacaggatttgaggatttacaggatggggatttttgatttcttgggtttagttatgggaagtcagaaaaccctttttattaagttgggagtaggggatataaagatatagtagtcccttgggtctgtcttttctatcataacataagctgtgaagatgtcaagaaccttgaaaattcgttggttgattttggcttgttgacatgattctcaatagttattgagaataagacagattttattgataataaaaggtttgttgatcttttttttgtcagaatcaggatatccaggatttgaggatgtacaggatggggttttttgatttctggtgttgattttttgtcagaatcaggatatccaggatttaaggatgtacaggatggggattggtgatttctggtgtttggttatttaaaagtatgataatttagggattttggaacagtttagcagattgtagattgtgcgatatctttcgtaaaagtagcgatcgccaaatcccaattattaaaattaccaaaaaatcctgtaaatccttaaatcctggacatcctgattcagacaaataaaaatcattgcatctcacaaataacctctcaaagacaatcctgtaaatccttaaatcctggacatcctgattcagacaatttcccaatcttctaattttaattcgggtatacgtgaaaattctctggtgttgtgagtgactaaaattaaattgttggttaaagcaatagccgcaatttgtaaatcataaccaccgataggtgttccttgtgcagtcagttgagcgcgaatgtttccgaaaatagtggcagcttgatcattaaaaggtaaagaaacaaactgattgagaaaatcttgctgtaatttcaaattacgttctggataagcactacgcattgcaccataaaatagttcacctttgacaactgaacaaacagcgatttctgaaagtggtatgttctcaagttttttctttaaatagagatttttacctttgagataaacaatacaggtattagtgtctagtaagtaaatcattaaaatgtttctctctctggttgttctgtttgtggatgtctgataaatgtttcatcctgaatacatccataaaaatcactgattttgattgtgttttgagttttattttgaactgttgctgttgtttcatagacaagaacaatatctagttctgttccttcttgtgcttcgggtaaatgaatctgcaatagtccatctttaccaatgcgcgatcgcactctcatactgtgcatcattaatttttttcctatattccaatagttatgatgtaattataaacaatttttggcaatatttttattttaaaatagaacaatctaacaatattactctactcatttatattgacaacttgtttttattcaaagctgcttcaatttgaggataagtttcttgatcatagcctgattcatcagctatccattcgtctacaagtgcgataattttttctaaagaattattattttctggttttaattcgcttaaagattctgttgcaattggaatttcgatactgtgagagtatgatttaatttgaattaaaaaatctacttttgttttaactgccagtagttcttcaacagaaagagagtctaggtgctgaataacatcaatcattaatgttttagtcatattttatttcattgtatagaaaatagtatatttattatatcacattttcaaaggttttgtaaatcatgtgatatctttcgtaaaagtagcgatcgccaaataccaaccattccccaaatcccaattattaaaattaccaaaaaatcctgtaaatcctcaaatcctggacatcctgattcagacaaataaaaattatgatactgcacaaataacctatcaaaaaaaatcctgtaaatccttaaatcctggacatcctgattcagacaaataaaaatcattgcatctcacaaataacctctcaaagacaatcctgtaaatccttaaatcctgtacttcgacttacttcgactgcgctcagtacaagtcgctcagtaaccagacatcctgattcagacaaataaaaattatgatactgcacaaataacctatcaaaaaaaatcctgtaaatccttaaatcctgtacttcgacttacttcgactgcgctcagtacaagtcgctcagtaaccagacatcctgattcagacaaaattaacttctctcattccccaaaatatcaaattattatctaaaattatcttttcacctatttcggcaaactgttgttttaaataaattctcaataactcactatctcccccagtaatagcaattttactatcaggaaacaacgataaccactcatcaataaactcttttattcccgccaataaagtgtaaatgataccactttgaattgcttggggtgtatccatagcaaaccggggcggtaaatctatgatctccctaatttttaacaatggtaattgtccggttttttgtcctaaactggtaaattgtaaacccaaacctggtaaaatagcaccaccaataagacgctgattggagtctgcccctgtaaaagttaatgctgttcctgcatcaattactaacatgggaaaaccataggatttacctgcgccaaataaagccaaagcgcgatcaatgcccaatgtgggatacattccccggatagggacttgatttaaggtgattaaacgatgattagggtaagtttgccatagttgtgtttgactgggaactacggaggctaaaacgagagtgataggcaggttaggagaaaggaagatagaacgagcataagacggaggaaggggcaaagtattcgtttttgctaatttttctagatcagactttgataaatgttgtgtatcccaggtagagttgagagtgtgatctataaataaagcccaatgtagccgggagttaccaaccattaaggctaaccaagggttgtttgtctgttgcggttggatattctgtttcacagtttgtttcacagtttgtttcacagttttaattttcttaattgaatgataggttttttaagaaaaagttatattcaacccgtgtcacaatataaggcagaggaataaatactcaataaaagttaaggaggggagttatggtattgctcaccgataaaaatcaaggccaggaaggtacaaccccagtaaaacggctgactatacaaacggtagaaattgatcaggataccacggctattcgttctttagactggaaccgcgatcgctttgatattgagtttggtttgcaaaatggtacaacttacaactcctttctgatccgcggtgaacaaactgccctggttgatacttcccatgaaaagttccgtcagttatattttgatacactgactggtttaattaatccgcaagatatagattacttaattattagccacacagaaccggatcacagtggtttagttaaagatttactacaaaaagctcctgatattaccgttgttggttctaaggtagcaattcaatttttagaagatttggtacatcagccttttaaacgtcgtattgtgaaaaatggcgatcgcctggatctcggtaatggccatgagtttgaatttgtgattgctcctaatttacactggcctgatactattttcagttttgaccacaaaacccaaattctttacacctgtgatgcttttggaatgcattactgtacagatagcacttttgatgatgatttatctgccattgaaaaagactttcaatattactatgaatgcttgatgggtcctaatgcccgttctgtgctttctgcaatgaagcgcatggcagaattaaaaaccatcaaaatgatcgccactggtcacggacccttactatatcacaatctccaagaattaacaggacgttacctcaattggagtcaaaaccaaaccaaagcagaaaccactgtgggtatattttacgtttctgaatatggttatagcgatcgcctagctcaagctattaccaacggtatcgtaaaaaccggggtagctgtggaagtagttgatttatctggaacagttgatttacaagaattacgggaacttgtaggacgctgtaaaggcttggtagtgggaatgaatcccgtatctagtaatacaagcattcaaacagcattgagtacagttctaggatctgcaacggaaaaacaagccattggtatttttgaaaccggtagtggagatgatgaacctacctatccactgttaaataaattccgcgctgcgggtttaactgtagcttttcctgtgattgagattcgggaaacacccacagaaaacacctataaaaaatgtgaagaagcgggaacagatttgggacagttggtgacaaaagaaaaaagcatcaaagctatgaaatctttaagtgctgatttagataaagcactaggaagaattagcggcggtttgtatatcatcacagccaaaaaaggcgatgtttccagcgccatgttagcttcttgggtaagtcaagcgagttttaaacctttgggtttttctattgcagtagctaaggatcgggcgatagaatcattgatgcaagtaggcgatcgctttgttctcaatgttttagaagaaggcaactatcaagcattgatgaaacacttcttaaaacgttttagtcccggcgcggatcgttttgaaggtgtcaaaacccaaccagcagaaaatggtgcgcctattttgggtgatgctttagcatacatggaatgtgaagtagttagccggatggactgcggcgatcattgggcggtgtatagtacggtttatgcaggtagagtatctaaacctgaatcattaacagcagtacaccatcggaaggttggtaatcactattaattggtaattggtaattggtaattggtaattaagaaaaatttgccattactaattatgaattaaattttatcaattactgtgtggaaaatgcccactttgtaaaaaaatgggcattccacagtttatctgagaaaccaactaatttataaaagaaccactccaggcacagaggacacagagttttatttgaatgtttttaagtggaaacaaacaatataaatatgggaacatcccaattttgaaaaaataaccgcagtaacaccaaaaaaactcctaaactctcttacctttgtgtcctttgtgtcctttgcggttcaatcatatcagttcattggatcatttttaccattagttcaaaaaagatttacacatttgggatgctcccataaatagaagatttaaaagcaagaaacaaggagattaaatttatgtcaaatactaaaccccgtgatgtccaaatattgcctattggtactgatacaacaatcatcagatcgcgcagttgggcaaggttaagatttgaaattgaatatgctttagctaagggaacaacagctaattcttttattattcaaggtgataaaatcgctttaattgatccacctggggaaacttttacggaaatttatttacaggctttacaaaaaagaatagatatcaaaaatattgattatgtaattcttggtcatgtcaatcctaaccgggcagcaacattaaaaatattaacagaaattgcgcctcaaattacttttgtttgttctaacccaggggcgataaatttacgtgcagctttagaaaatgaagatttaccgattgtggtaatgcggggtgatgaaactttagatttaggtaaaggacatcatttacaatttattcctactcctaacccccgttacgctgatgaactttgtactttcgatccacaaacagaaatcttattttctgataagttatttggggcgcacatttgtggtgatcaagtatttgatgaaggttgggaagtttttaacgaagatcgccgttattatttcgattgtattatggctccccatgccaaacaagtagaaacagctttggataagttggcagatttgccagtcaggttgtatgctactggtcatggtcccttggtaagatatgctttacaagaacttacccactcttaccgagaatggatcaagcaacaaattaacgcggaaatgagtgtagctttgatctatgcttctgcctatggaaatactgcaactttagctagtgcgatcgctcgtggtattactaaagcaggtgttagcgtagaatctattaactgcgaatttgctgatcctgaagaaattaaaacggcaattgaaaaatcagccggttttgtaatcggttcgcccactttaggcggtcatgcacccacacccgtacaaacagctttaggtattgttttatcaactgcaactaataataaattagctggtgtctttggttcttttggttggagtggggaagcagttgatttaattgaaggtaaactgaaagatgcaggttatcgttttggttttgaaaccatccgcgttaagttcaaacctaatgaagtcaccttacaaacctgtgaggaagcaggtacagattttgctcaagcattaaaacgcgctgctaaaaaagccgtggttgctagacaacctgcaagtaatgttgaacaagcagtagggcgaattgtcggatctttgtgtgtcgttacagcaactcaaggtgaagtgaaaactggaatgttagcatcttgggttgcacaagccagctttagtcctcctgggttaaccattgcagttgctaaagatcgggcaatggaaaacatgacttacacaggtagtaaatttgttgttaatatcttagcagaggggcgagaaatacgtaaacaatttatgaaggtttacgcccctggacaagatagatttgcaggtttagacaccgcagaagctaacaacggtggtataattttaaatggtgctttagcttacctagaatgtacagtgaagaaccggatggaagtaggcgatcattggttagtttatgccacagtggatgatggcaaagtgttaaaccaagatagtgtgactgctgtgcatcatcggaaatcagcaagttattattaagcaccccatacattaacccctctaacatgaaatagaggggtaatttaggctataaagaggcgttttctgcttcattagtaatcaacaactccattcagagtcagagactagtaaggagaaaacttaaacctatttctggttgtccccagaatcattttcaacagatatctgaagcattaatttgagtttttggttatttcaagttctatccctaaccaattacttaactcatcagctaaccattttaattcatattcagacttgatgatatagtcaccaacttttatttccaatttttctacccctatccaaattaccaactttgcgttgactaaagaattaccaacctcactatcttttgtcaaatgttgaggtatataaactaagtgattaatgttttctctcggtgcagaggtatgtttaattttcagtccccaaagataaagactatgggatatttgttgctgatttatgctaattttacattcaaaaaatgaacttaatataccatatatcatagctaaaccactgtaaaaaaaaggtgatagtaagaaagctacgaatgtagcatttattattgttctccaatcaaaaggattagaaataaagaccttaaacgcgccaacgataaacaacaaaatcacggaattccaaaatatcataaatggaattcctaataaactaagagttaatgttaatcccttagcaggaagggtagtttctaaatattcctcatttttaattagtcgaatttgactacctgctggtttagcaattgttgaatttgtaatatcagttttttccggtgtttctaaagcttgtagtgctgtttttgcagatgtaaaccgctttgctaaatctggttctatcatattttttaaccagttagttaagcccggactcagatttgccacttgttcaaattgaatgcgaaaatctttttgtggtaaatctgccggttgagtacctgtgattaaataaattaaagttgcacctaagctataaaggtcagaagcgggaactgtacgccccccaaattgttcttgtggcatataaccatagcttcctacaatggttctagtacctgtttctgaggctaaaacagtttgcacagaaccaaaatctactaaataaacttttcccacactattccccgatcgctctcctaataaaatattgctaggcttaatatcacggtggatcacaggtgggtgtaactcatgaagataaaccaatatctctaaaactgctttagctatctcttgaacttcattttctgtgaattttctcccagtttgtaagtattgttctagggttttcgctgggatgtaagtttgtaccagggaaaatccttgaaaattagaggattttacttcaaaataatcaaggtaggagggtatggatggatgggataaagattttaaggtttccgcctcccgttcaaacagtttcaaatcatcccattcaaagtcactattaaaagcaagtaacttgacaattactaagttattgtttatggtgtcacgagctaaaaaagtccttcgggctgactttttacctaactgctgttgaacttggtagcgatcgcccaatatttccctattcatcagcatcacctagatcacttagaaaattatgttgttaaactttctctattttattcttgttgactgtcaggatgttttaaaagttttcggtgaatagttttactaattgttactacttcctacttctgctgatgcagcacttcccagtgtcatcaggtacaaaaaccccatccccaaccccctccccgcaaccgatgagggcgctattatgtactttataacacaggaatccgctgtaatttttaagtttgaattttaactttgaattttaaactttgaattttaaactttgaattttaaactttgaatttttaattgcttatgccttcccaactttggccttatgttacccctggtattcccgatgacttatttgagaacttaccaggtatacccctaactcagcgagaattaagattgttgttaatttcccaactacgattaaaaccagattcggtattatgggatattggtgcaggaacaggtacaattcctgtagaggtggggttattgtgtccccaaggaagagttattgcggtagaacgagatgaagaagtggctaatttgattaaacgtaactgccatcgctttgaagtcaaaaatatcaaagtaattgaaggcagcgccccagagtgtttacatgatatacaacccacccctgatcgtgtttgtatagcaggggcaaaagctatccaggaaattttacaagctgtctggctttatttgcctttatccggtcgagttgtcgccacagctgctaatctagaaagtctgtatgctatttctcaaagcttttctcagttaagagccagaaatatcgaggttgtacagtctgctgttaaccgcttagaaactcgcggtttttcccaaacctttgtcgccgctgatccgatttttattctcagtggtgaaaaactagattgaatctattcggttttcggttttggattcaatccaaaatccaaaatctaaaatctaaaatactattattatgccttggtcaagaattattagtggaattattgcgatcgctctagctttatcttcaaccttattaggtggttggtactttaccatagctatggcgatcgttgtctttttaggtcaacaagaatattttaatttagttagatccagaggtattgctcccgcagctaaaactactatagttgtcagtttaattttactggctatttgtactctcaatgccagtttagcggatgctatcatgcccatagcaggaacttttatttgtttttacctgctttttcaacccaaatttgctaccattgccgatatttccgcttctattatggggctgttttatgtcggttatttaccgagttactgggtacgtttgcgaaatctcaatagtacaaatattattagtaatcttccctttggtggctactggcctgaaaactggaatcaaatttttaccccagaaaatatcactggtttacccgaaggtttaacatttacagttttaacttttttatgtatttgggctgctgatattggtgcttatttttttggtaagtttttcggtaaaactcctttatcaaatatcagtccgaaaaaaactgtagaaggggcaatttttggtattagcggcagtctcatagtagcactagccggtgcttattttctccattttccttactctgtgatctctggtttaactttgggtttattgataggtgttgctagtcttttaggcgatttaactgaatctatgttaaaacgagatgcaggggtaaaagattcaggacaattgatacccggtcatggtggtatattagaccggactgatagttatatttttaccgcccctttagtttactattttgtcacactcattttacctttgttaaagtgatagttgatagttgacagttgatagttgatagggaaacatcaaatttattacccagtcaccagtcaccagtcaccagtcaccagtcaccagtcaccagtcaccagtcaccagtcaccaatcaccagtcaccaatcaccacttatcaattgtcaattatcaattgtcaattatctattatgggttgacgttgatgcgtccacgacataagatttggctagattccaaagttaattcttggaggtcaacgtctgaaccaaggtctaaattgtatccaggattattttctaaaattggttcttgattatacagaattttaatctgtgttaattgtagttcttgactgttcagcagttctagacctaaagaaatttctaaagatataggttctctgtcagttgctacaagtccatacagtattaaatgctgattgtcaagtgtaattttctgccaacaaataggcttgtatttttcccatgattctggtaatagtttaaacagtacatcatttaagccagttgacaataattctgatgaaagagatttattcagatccccttcatctaccaccagttcaccaactacgggaactatttccaataatttaaggggtttacccctgactatggaaccaatgtttatctgtatattttcagctgaaagttgaatgcgtgtaacatggataccctgataaactgcattagtagtaaaaatagataccacaggaatacagccagaaaggagttggcgatcgcttgctccaatctctatctcaatctgcgatacttgagttaattgtgtttttagccatagcttaattgctgtggttagtgcttgagtaattaaccttattttcttactattggcggatggggggtttttatctgtcattgaacaaggttattgcttaatatttgatatttgctcaaaaatcacgagatcttaaacagttcttaactgtaatggtgattgctattaactgagaaatggcaagattcacttttaggtatcaactccacaaaacttggaacaattaataataagtctgaattaacaaagtatacaaaatttatacatggaggcacgagtacaaaaaattatttctcaatggggtatagcctcacgtcgtgaagctgaggagatgattaagcaatcacgagtgcagataaatgggattgtggcacatttaggtcaaaaagtcgatccccaacgagacactatttgcattgatggtaaacctatttctcacagcgatcgcccagctttaatctatttgttactcaacaaacccgctggagtagtttctacttgtgatgatccccacggcagaactacagttttggatctattacccgaaaatttacacaagggtactggtattcacccagtggggcgtttagatgctgactctaccggagcattaatattaacaaatgatggagacttgacattttcgctaactcatcccagtcataatatctctaagacatatcatgttgtggttaaaggacatcccccagaaacagttctgaagatgtggcgtgaaggtgttgtactagaaggtagaaaaacacgacctgctaaagtacgcttgattgaacgtttggccaaccaaagcaaattagaaataattttacaggagggcagaaatcgtcaaattcgccgtgtagctgaacagttaggatatcctgtgatccaactgcatcgcactgccatcggttcaattcaactacaaacactaaaagctggttttctcggtgttggtgactatcgtcatctcaccccagaagaaattatttttttaaagaatcaattcaataatggacaactaacaatgaacaattgacaattgcctcttcctaaaagtcagaatcttgaaaaactggaatttttggcttttttacctggaaatcggggattttcaaccttgaataacacaattatcaattgtcaattgttaattatcaattgataaagcggatacctattaatgattaagttgagttaaggagtgtaataaaaattatgaaatggccaagaaaaaaagatgagaaacccagcaaaccatcaatagaagaacaacaggcggaaaaattagcacaaatgggcgctaaactcgcggttttgcgtcaacaaaagggtttatctatggatgaaattgtgttaaccactagaattcctcgccgactattaaacgcaattgaagtaggtgatttaagcgatttaccagaacctatttacactcagggtttaatcaggcaatttgctgatgcactgggggtgaagggggcagaatttgccagccattttcctctcggttctcaaaaagtcagttttcaaagcaattggcaaccccaacccttttttcaactgcgtcctcttcatctgtacttgctttacattgtcgtcatagtatgctctgtaactagtttatctcagttattgaatcaaactgctttagaagcaaacaatagccaaaatcaactaaaggcggagaaaaatgacgatttaaagcctcagaaactgcaatcccaggatttaaaggcaattccatttgatatcaacagttcagaaactgtagaaattgatgttaccttgcagtcctcatcttgggttcgtattgtcgctgatggtaaaaccgagtttgagggagttctaccaaaaggatctcaccgcaaatggaaagctgctgaagaactgactgtaaaaactgacaatgctgggggtgtgttgatgagcgttaatcagcaacaacctaaacaaatgggacagccagggaaatttcaggaagtcaggattgccgctaaggtcaggtcttgaaacgtcgtgcgtcagtagggataggttaaccaagtattaaatttatcagtggcatacaacacaatatagaaaacattgctgttatttgccaatatcatctactacacataactaaaaatagctatgtttccttgaaactgctaattaggttaaaccaacccctactaaccatgaggttttgagtacggaatggaggtttcagctttatactacgcacccagaaaaagttaatcaggaaaagttaatcatcaacttatgggagcgcgtccataaagattggtgagaattttcaagcgatcgcttaattccttagtcaaaacctcttgctgataacgccattcccaattaccctcagccgtactgggataattcattctggcttgagttgccaatcccaaaacatcctgtaaaggaataatcgcttgattagcgatggaactcaaagctaaacgaattaaatcccagtttataccatcagggctgatatttcccaaatataacaataaattttgcttttcgtaatcattggtagtattgaaccagcccagagtcgtgtcattgtcgtgagtgccagtgtaaactactgcattacgtgggtaattaaaaggtaaaaacggattaccaggatctgaaccaaaggcaaattgtaataccttcatccccggaaactcaaattgatctcgtagtgcttccacttcttctgtaataatccccaaatcttcggctaaaatcggtaatttgcccagtttttgtttaataactgcaaaaaattctacccctggcgctttgatccattctccattgatggcggtttcttctccttggggtacagcccaataagcttcaaaccctcggaaatggtcaatccgaatgatatcaacataatccagcatagcctcaaaacgttgcacccaccatttaaagtcctgcttttgcaacttttcccagttgtaaaccgggttgccccataattgaccggtggcgctaaaataatctggtggaactcctgccattaaagccgctgcacctgtttcttcatccaaagcaaaaaattcaggatttgcccatacatcagcactatcatgagctacgtaaatggggatatcaccaataatatctacaccattttgattagcgtaattcttgagttctgaccattgacggaaaaactcatattggatgaacttgtaataaaatatttcttgtgttaactcttgttccatccgtgccaatgctgcggtttctctttttgtcagttctagttcccaactgtaccaactagctccattgtgggcatctttgagcgccataaacaaagcatagttatccagccaatagcctctggtgttgcaaaaagtgtgaaaagcttttctttggatagcggtggcgtgatgtttaaaattttcgcaagcttttttgagcagattggttttaatggcaataactcgctcaaaatccactttatcagccggaaatgctggtaaattcgcaaaatctgcttcagataacaatccctcatctaccagcttatctggactaatcagcaggtgatttcccgccattgctgagtagcacatataaggagaattaccataaccagtaggtcctaaaggtaaaacttgccaatattgctggtagctatctttgagaaaatcaataaaacgataagctttatcccctaaatccccaatcccgaaacgactggggaaacaagttggatgcagtaaaattccgcttgatctaggaaaaggcatagttaatggtgaatatgagtagattgttgatgaggacttacacaaatgttacatttaattgattttttagggacactaaattaaaaatatgttgattcttaacaatttatttagtctaacgtaccgtactaaaatttagcgtatgttggacatttaacttgcatattatctaaaattgaaactcttgtggggtgggcatcctgcccgcattggttgtgcaaattaaaggtttatcagcttagtataatagttaatacatagggtttgctgaataaacctaaaaccttgatatatcaaaggttagaggctgataaacacagaaattagtgcaagggttttgaagggtataccggaaaaagtgtgcattttttgggatttcaatgggatttcaagagatggcaaagaaattttccaatctcctcctgactcctgactcctgactcctgactcctgactcctatgccctcacggaaagactttctcagcaacccctacatatcaattccagtataaaataaacaggagaactgcaagtaaaaacaaatatttttcgtgcaagcttgatcaagcaaagatctctcaatttaagtttctgtctaagcagttacaatttattctttattgaggattcatatatgagtattaaaatcgcacaatggcgacctgagtatgaaacaggcaatgtcatcattgatgagcaacataaaagcttattaagtacaattaatgcgctaaataatgctatgttggagggacaaggccaatccttaatcaaacaaactattcagagtttaaaagattacacaacaattcattttagcactgaagaacaattcatgatagaccatgaatatccgggttatacagaacataggatgaagcatgaagcactaaaagccagggttttaagctttgagagagaaaatgagtatgacttatccaagttaacgaatacaatttctcactttttaactgattggttaattcatcacattcaaaatgaagacgtgaagatgattaattattgtcttcagggtcatttgagcaagtcccaatctcaagatatctcatcctttgcttctagtaattcccagatagagattgcccaatggcgacctgagtatgaaacaggttatattctgattgataatcaacatcaaagtctgtttcatgctattaatgccctcaatagtgccatgctggcaggaagaggatctgaattactagaaaaaaccttagagattctgaaaatctacacaactattcattttgaaaccgaagaagaagtaatgctaaaaaatgactatcctggctacaccgaacataaagccaaacatgaacttctgagggaaaaggtgacagtatttaatcaaaaaataaatacacaagatagctcccaagttactattagcgtatcccattttttgacagattggctgattcatcacatccaaaatgaagacaaaaaaatgagtgcctttctgagacaaaaacggcaaaaaaaagatgaaattcaatcctaagcatctcaataaacgtactgctggggatgtataaaccctagccgacatcgttgaggctggggtagttcatattagatgaagctacttaaaaattgacaatgacttacagaaatcctgctcctaccgttgatattattattgaattaattgatcgacctcatcgcccgatcattctgattgaaagacataatgaacctttaggatgggctattcccggagggtttgtagattatggtgaacctgtggaagtggcagcacgcagggaagctgaggaagaaataggtttaaaaatagagttaattgaacagtttttggtttattctgatcctagtcgtgatcctcgtcaacatacaattagtattgtgtttttggcaactgcaacgggtgaacctgtagcgggtgatgatgctaagggtgtgggtatttttgagccttggtgtgtaccgattaacttatgttttgaccatgaccggattttgcgggattatttccggtatcggaattatgggattcgtccccggttcggatttgggaaatgaaccacatataggataattattgtaaaatatcatgctgtgtaaggattgaggatacagaatacaagattcagaacaaatgagagttttcgagttattggttgttgagaaaaaaacttgattctggaggtttcttgctacaaacaaatattctgactcctgactcctgtacgggcgttcgggaagcgtgctagaagcatcagcattcgggcgaacaattattaatttttctccaaagctattttccgaatgcttcgcccctacttcgcccctacttcgcccctacgactcctgacttcttgccatactgttttatactcaattctctccagccctaaataggagtatatatggagccaattattgctatagttttagcactcataggttatgctttaggatctgcaaaactggttaatcaaggtaatgaagctctagttgaacgcttgggaaaataccatcgaaaactgaaaccaggacttaatttcattgttccctttcttgatcaaattgttatggaagataccaccagggaacagattttagatgttaagccccagaatgtcattactaaagatggtatttacatggaaatagatgcagtcgtttactggcgcattgtcgagatggaaaacagcttttatgcagttgatgatttgcaacaggcactttcaaatttagctacaactacagtgcgggaagttatagcccagaaaactgtagaggaagctaatatgtctagggcagatatggacaaaagcatattagatcaattaaatccaatttcacggacttggggagtcgaaattctgcggttggattttcagcgaattacaccccctgaaagtgtacagaagtcaatggaagaggaaagagcagcagaaattagaaaacgggcggtaatcgcggctgctgaaggtgagagacaagcagctattaagaaagccgaaggaactaagacttcaatggaaattatttctgaagctatacgttcccatcccgaaagcaaagatattttaagatatcttgtagctcaagattatgtacaagccagccaaaaattgggcgaaagtaataacgctaaaattgtgtttgtagatccggctaattctacagatatgtttcaagaattaattgctgaatctgtaactaaagaagatgatggtaaaacttctggtaatggaaaaaattagaggcaaaaggcaagagaattttagattttagattttagattttagattttagattggattcatgaaatacaatccaaaatccaaaatccaaaatccaaaatagaatcaccaatcaccaatcacctgtcgatagatagcatcagcaactagggagacatcacgcatttcggcaacatcatgaactcggaggatatcagcaccattaaaaatggcagcacaacaggctgctgctgttccccaaactctggcttttggttctggttgatttaaaattttgccaataaaacttttgcgggatgctcccactaagatgggacactttagggttttgaatgttggcaaactgcgaataatttctaaattctgatcataatttttggcaaaaccaatacccggatcaataattattttttcctgttgaatacccgctgtaattgcggcttttatttgttgggataaaaaactataaatttctcccatcaaatcttgataatctgttaattgttgcatcgtttggggagttccccgaatgtgcattaacatgattggtacatctaatttggctactgttggcaacatttctggatcataagtaccaccagaaatatcattaacaatatctgccccagcttctacagcagcttgagctacttctgctctagttgtgtctacagaaatgggaatagtaatttttggtctaatgatttgcaaaaccgacagcacccgatcaagttcttctgtgagggtgatttgttctgctcctggtctggttgattgaccaccgatatcaataatatcagcaccagcgtctaccattgtttgcgcttgagctaaagcggctgaagttgtgttaaatagaccaccatcactaaaactatctggggtgacatttaaaattcccattaaataagtccgttgtccccaagtaaaacaacgttctctaataattaattgatttgacatacaggagtcaggagtcaagagtcaggaggcaggagtcaggaggcaggaggcaggaggcattggaaaatgaatcaacttttgccttttgccttttgccttttgccttggttattgataattgacaattctggcaaaactatcagcttctaaacttgcaccgccgacgagagcgccgtcaatttctggttgtaccatgatttcatcaatattattgggcttgactgagccaccatattgaattgatacgtgaggattcgtcagttgatcacgaattaaaccaatgactcgatttgcttctgtggcttcacaggtgtcaccggtaccaatcgcccaaattggttcataagcaataatcaagttagtttgatcaacatctactaagtctttttctaactgggtgctaatcagtttttctgtttcccctgcgtctcgttgctgtttggtttcaccaacacagagaatgggtgtcagtccgtatttttgggctgctttgaggcgcagattcactgtttcctctgtttcgccaaaatattgtcgtctttcgctgtgtccaatgatgacatagcgcacaccgatttctgtgagcatgggagcagcaatttcacccgtgtaggctccattttcttcccagtgaacgttttgtgcgcccaagtttacacggctaccgtgtaaatatttggacattacacttaaatctgtgaagggaggacacaatattacctctctttctgagggtgtttcctccaggtgaggcagaaatccgcttaggaaattttctgattctgcctgggttttgaacattttccagttgccggcaataactatttttcgcacaggtgattttgtcaagatgctaacgctactagatcaatttttaactgtactactttttcggacattccttgtctatcaggagaggaaagtgctagtgtttcgcccaaaggcgtaatagctataagaggatgttttaaaagtccctgagagtgtatcaaatattttttacccctccctaacccctcacaagggtaggtattttacattgtcgtgagggcaagacttggaggacaaggcagacaaggtagcaagggagaaaatacgtatcaataatgtacaattagtaacaaaaactgaggctcaacagaccttgtactgagcgaagccgaagtacattttttgtagaaaatcttccttgtctactttccctccttgtcttcctggtcctgccttcacagttaatattaaaaacctacccctgtgagatccctaaccctccccttcaggggagggaactggattttcttgtttccccccttgataatgggggattaaggggggtaaaaatatgattaaaatcacgggataccactgttcaaacatcctctcacacaaaaatcctctaaactttcttcattacctgaaaagctgaaatataagaaatattaatccttcctccataaagctgatcaatcttttgttttaaccccgtaaataaaccatctctgattccaacttctaattttaaataaggtgaaagcgtacctaacaataataaataatcatcaacatgataagttacttcacagattacatgaccagaaactaagtttgtgaattttcctgaatcaatggctttttctccaaaggatttaactattttttcttgatctgttacatcttcatatctggctgagtatggagcataaattttataaatttcatgcaaattttggtatacttcataatcaggttggggtgtcatgttccacaacaaaattaaagccccatcatctcttaaagcagcagcggctttttcataagctgtttctgggttcatccaatgaaaagaagtcgctgctaaaacagcatgaaattttcctggtgttaatttccattcttcaaatgtcgtctgttgaatttctacattgggatatgctgcacagttttttctggcaaatttacaagctgcttgactgggatctaaacaaaccattgaaaatcctaatttcgcaaaagatacagttgcatttccaggaccacatcctagttccaaaattttccttttaggggtaagtttagctatttttatagctcggttaattatttctttgggataacgtggtcttaccttgtcataagctgctgctacaggagaataccagttttttctcagttctaagtcttggggatataaatttttgacttgtgctaattctttcatgatctatgttataataatggctatttgaaaaattaattagtcgtgctaagtatagtgcgattattttaagagcaattacacaaattaaaaataaatatattctatattcattattcattcaaaaaatgctgcctcccgcaactactctcacttaggctgaactgaaaacggctattgttcaaaccaatgactcgaaaactctaattcattctgtattctgtattctgaatcattgcccaaaatcccaaatcccaaatctaaaatctaaaatctaaaatctaaaatctaaaatctaaaatcccatgacatcgacattacctcaacctgaaaacagtaatacacccaactgggaagaagaactagatagcgccattttcacctttaaagatattcaagcagaacttaactatacacaagcaaaaacagcactgagaaatttagtcaataatcttgatcttaccacccaagaaaaatctggactagaagcggaaatttccgacttagaaaccatgctgggcaaactagaaagtatggtagtgcaaatagcagcttttggcatggtaggaaggggtaaatcttccctacttaatgctttggtaggccagcaggtatttgaaacaggacctttacacggtgttacccgtacagaacaaaaggtaaattggagtatcagtgaagaagctattggtacattaaaagccacctttccctcaactggacaatctcaggtagaattagttgacacaccgggtttagatgaagtagatggagaaacccgcgctgcgttagctcaacaggtagcaaaacaagccgatttaattctgtttgtgatttctggtgatctgaccaaaattgaacagatggcgctttctcagttgcgagaagtgggtaaaccgatgattttggtgtttaacaaagtagatcaatatccagaaacagaccggatcgctatttacgaaaaaatccgcgatgatagagtacgagagttgctatcacctgatgaaatagtcatgtctgcggcttcacctttagttaaaactgccgtagttcgtgctgatggtagtagaggtatacagttacgtcaaggtcaagcacaagtagatcaactaaaactcaagattttagagattttgcaacgggaaggtaaagcgttagttgcgctcaacaccatgctttatgctgacacagtaaatgagcaagttatccagcgaaaattagaaattcgggaacagaacgctaatgatttaatttggaaagcggtgatgactaaagcattagcgatcgcccttaatcccgtgactgtagttgatatcctcagcagtatcgttattgatatttctttgattttaggtttatctaaactctatggcatccaaatgacagaaaagggagcggtacaactactgcaaaaaatcgccctgagtatgggcggaataggcgctagtgaactactagcaaatttaggtttaagtggtttaaaaaccttactgggtatctctacatcagccacagcgggagttgcccttggaccttatttatccgtagctgtaactcaagcaggtgtagcgggagtatcatcctatggtattggccaagtcaccaaagcgtatttagccaatggcgcaacctggggacccgaaggaccaaaagcagtagtcagtaaaattttatccagcttggatgaaacatcaattttaaaccgcattaaagatgagttattgataaaaattagaagaaagtgaaagttttcaggactcaggagtcgtaggggcgaagcattcgggcgactaattacagcactttctggtgttatgaggtacaccacgggcgggcaagatgcccaccccacaagagttttattattaaaatttgtacctcatagcaatggaatctgctgtatcaattgtatgaaaaggttattttccgaatgctaatgcttccagcacgcttcgcgaacgcccgtacaagagtcaggaggaaagacaaataacccaattaccaattacccattaccaattacccattacccattaccaattaccaattacccattaccaattaccaattaccaattaccaattaccaattaccaattaccaattaccaattaccaattaccaattaccaattaccaattaccaattaccaattaccaattacctaattatgatgaaatttataggtattgatttaggctggcaatctcaaccaagtggtttatgttgtttagaattaaaagatgaaaaactgcaacttttggatttagatcgccaggaagccattgcagatatattaacttggattgatcagatcatcaaaccagaagaaccagccataattgctgtagatgcacccacattaataccaaattctacaggtagtcgcttaccagataaactcagtcataaatactttggtaaatatcatgcgggatgctacccagcaaatcaaaacctagcttttgcagaacgcacaattaactttggtttagaattagaatcacggggatttatgcacgcgcctaaaattgaacctcaaaaattagggagatatcaaatagaagtatttccccatccagcaatagttaatttatttagattagaaaaaatcttaaaatataaaaaaggaaaaatccacgaacgccgattagaactgctcaagttatataattacattcttgagattcttcctgttatttctcctcctttatcttctccatgtatctgtagttcctttccttcagaaatacccaacacaggaaaacaactcaaagaaaccgaagataaattagatagtttaatttgtgcttatgttagtgcttattggtggttttggggaacagaaaaaaacctagtcttaggagatgaaagtacaggttatatagttgtacctgagagaatttgtagtcaggagtcaggagtcaggagtcaggagtcaggagtcaggagatcaaggagtcaggagatcaaggagtcaggagtcaggaggaagaattagaattagctattgtttatctagggagaaaagtggtcagtattccacaactcaagaaatattaatattgccgattcttccccatatgcacaacttagcagttgttgaattagctgataatatgcctgtagacgctgttcattcatatattaaagctgggttagggtagcatttagatgatgcttcaatagcattttcccccatttcggatcattttatgctgtaaatcctcaaatcctggaaatcctgattcagacaatcacatcctgtaaatcctcaaatcctggaaatcctgattctaacaataacatcctggaaatccttaaatcctaaacatcctgatgctgacaaaaaatcacaaaagaccaaaaaaaagataaaatctataaagtagaaactgtttacggttatataaacctaacaggagaaaaaagaatgacatcaacaccctatgaaactgactataaccaatggatacaagaaacattacaaaaactgcgagaacgaaattttaatgatatagattgggaaaatttaatagaagagatagaaagcatgggtaaaaatgataaacgtgcattgattagtcttttaacccggcttttagaacatcttttaaaattagcctattgggaatcggaaaaaccaagatcaggtaatcactgggctgcggaaattgttaactttcgttcccaaattcaaacaagattagaagatagccccagcctcaaacctcaacttattactatgtatgcaaaagcctatcctgtcgctataaaatctgtctctaaactatttacacttcccccagaagcagaaattactctctcccaagctttagatgaagattggtttcccaagcaataaaactaataaatggcgatgttagatatttgtagatccccccaacctcacaggggtgggtttttaatattatctgttaacgcaggatctggaagacacggagggaaagtagacaaggaagatttgatacgcacaattttcatgtctttaaaccacagtaagggcgaagcattcggatgatagtcttaggtaaaaaccgataattagggtttgctgaataaacctaaaaccttgatatattaaaggttagaggctgataaacacagaaattagtgcaagggttttgaagggtataccggaaaaagtgtgcattttttgggatttcaagagatggcaaagaaattttcaaatctcctcctgactcctgactcctgactcctgactcctgactcctgactcctatgccctcacggaaagactttctcagcaacccctaattaattgtccgaatgctgatgcttccagcacgcttcgcgaacgcccctacattgtttgttgacgcgaaacctaaattaaaatgtggtttatttacctgaaaatagctgtaaatcctggatatcctgattcagacaaaattaggtgacaggtgacagtaagaaaggaataggcaatagggagaaaaatttgagattttagattttagactttagaaaaataatccaaaatccaaaatccaaaatccaaaatccaaaattaccctattccgcccaagcgattaacctgggttcataagcatttgaaaggtattggttttgtggtaacacccgcaaagacaaaccttgcaaaccagaagaggtataagtgatatcagcaatatagacacttaaaccttggtcatcttgtccttggtaatccataactacaggaacagcattgacaatattgccgttagcgtcaatagcaccttggtataattctacctgcacatcttcatttgttaaagttgctaaatcaaccttagcttttacagccacagtttgattaacttcaatttctgaagctgctccgacatcaatatctttgattttgatgttaaaccaatgttcaccaagttttgctttccaagctgctaattctttcgctggggcataattattagccgtgagggtatgatagcgatcgctggcaggaaaataagctcttaatgcatattctcgcaccatccgcgctgtattaaagaacggacaatttaaccgaatagcatctttcatttttgctacccaagcacggggtaaaccatccccatcacggtgatcatagaataagggtacaacttctttttctaacaactcataaagagcattagcttctatttcatcttgatagttgggatcttcgtaattttccccatgtccgatcgcccaaccagtacgtacataatcagcttcatcccaccaaccatcaagtacacttaaattaggtagtccgttcattgctgctttcatgccgctagtaccagaagcttcacgggggcgacgtggtgtatttaaccacacatcacaaccagctaccatcaaccgagcaatgtgaatatcgtagtttggaacaaacaccacttgtttttccagatggttttcgcggataaagtgattgatatcgcggatcagttctttccccggaatatctttaggatgtgctttaccagcaatgacaaactgtaccttgcggtgtttatgtcctgataaaatcttcttgatcctttctaaatcacgcatccagagcgtagcgcgtttataggtagcaaaacgacgagcaaaaccaatggttaagacattgggatcaaggacttcttgagcttgggcaatatcagaagctgaagcaccgcgatcgcgtaaatgcttaaccaaatgatcccgcacatacaaaatcatatccaggcggcagcgttcatgattacgccataactcctcatctgggatcgcgtccatccgttcccataactgattatctggtggtactgatgaccagtttggaccaagatagcgatcgtacaactcctgagttgatttagccacacaactgcgagcgtgaacaccattagtaatagcagtgattggcacttcatcaacggggactttcttccataaaccttggaacatttgccgagataccacaccgtgcaactgtgccacaccattggaaaatgtcgccattttcaaagctaacaccgccatactaaaaggcgcggataaatcaccagtattttcccgtcccaaacctaaaaactgttctttgggcaaaccaaagatatctgcataatatcccagataatacaaaactttatcgggagcaaacaaatcaataccagcgggtacaggggtatgggtagtaaagatattactggaagctaccacttgtctagcttgagaataactcaaaccgtcttcctggattaacatccgaatgcgttctaaagctgagaaagccgcatgaccttcattcttatggtaagctgtcaccttgtaacccaaggcttttaacatccgcacaccaccgatccccagcatcatttcctggtggatacgcatatcaatgtcaccaccatataactgatcggtgatgtcatgatcataagctttgttaggttcaatattggtatccagcatatacaggggaactgttcccacctgcacacgccataccctagcgtataccttgcgtcctggataatctacctcaatccttagctctgagccatcgggattgcgttctaagtgcaaaggcatattataaaaatcgttgatggggtagcgttcttgttgccaaccatcagcattcagatattgggcaaaataaccttgttggtagagtaaacccacaccaaccaaaggtaatcccaaatcactagcagatttgaggtgatctcccgccaaaacacccaaaccgccagaatagatcggcaaacaatctaccagtccaaactcagcggaaaagtaagcgtaacattccttttgggttgatccgcgttgtttgttataccaagtgcgctcttgtaaataatcttctagttgtcgagcagcacgatccatttgtgctaggaaaccttcatcttcgacaacttccaataatcgcccttgactgatagtacctagcatcaaaactgggttatgtcggcttgattcccacaaatctgggtctaatcgacgaaataagtctttgctctcaacattccaatcaaaatgtagattgtatgctagttttcgcagtggttctagtcgctgcggtagtgaaggagaaacgttaaatgtgcgaattggctgcatagtatggcaaaagttctaattctgttatggttattgtttactgttattgtttactgtttttactgggtgttgccaattctttatactatgtttgtgaatttctgatgactttgttaagcattaagaattattgtcttatactttgctagagtttacaccaaacaacgttcttggtctataggtttccattcctgaatttcctattggcatcaaattcagtttctcattgttacttgtatagcatcaggcaagaggcaacaggcaaacggcagtagtgaaaccctgaatattattaggtttcaatgatcaatcaccgattttggcaacaaaaattatagttatcattaaatttactaacactttagcccaaaaatactaaccaccacatcaaccaaccggataatttttaattatttcttaatatttttagcagtttagcagtaaagtaatctaccacaaaaatttgtaaaaaaaatttgtaatttgtgtaatttatggtttatttgcacataaatccctaaaatttgtctaattcaacagagaataaacaaattttctccaccaaattcttcccaagagtgaacaactgcgactacacccagctttgtaaaatgaatattttattaatattttattaatattttattaatatttattaatattttattaatattctgctcaggaaaaaatgaatcaggtgatcattgatatacttatgtaccgatagaaggctgatcttggggattatgtggcatagttaaggctattgcagccgcaaaagccatttcagcagctattttataagccagtttgatgtttggagaagcattcttatctttggaagctatgtcagagtaattttttttacgaagtgactcttggttaactgcacccgccacaatagaacgttgtaaaataattaacgcatctaggtcttctgagtcataatttgtttgcagaagtttatggatctgatgttttgctgtagcactcaaatagccagtagttaaagcttgctgcacaatttctttaattgtaatcatgatttaaccgtaggtgttacttaaaagggatattctactctgtaagtggatttttgtcctgtgcatggtgcaaaaaagtgatttagggaaggtaacagggaaaagaaaacgggtaagaagcaatcaaggtgtaccttgcgatcgccaaaatcaaataaaagtcctatatcagcagtcagccttggagaaatcctagttgatgatcaattaatagtagtgagtaagactacagaaagccagctatcaaacataaaatctgagtcataaaatactatttatagcagtataaaaatgtgcaatatcacaatttttacagatacaaatcatagagaataaacggattttttgtttaaagttgttcattaaaaataaattatgttattgtgaagatcaattgtcattcaaaatcgctaatgttattgaaagcgtgatttccctagcctataagtcctttgtgtgcagcatgattagagcatcatactctacaaatttattaccagaaagccgtcacagcaatcggggaagtgcttacttgtttgcaccgatggtcaacttcaatatcatggcagacgtgggagatactccaccataaacttttataaaaaaatactaatttattgtctttattgtcaaaattcaggattcagaaaaattttacaattcagaattaaaagattcaagattttgtcaaacatttccagcatcatccttgaagtcctgtgtattctgtatgctgtattctgtattctgtattctgtatcctgaatcattacaataattgctcattcaaaaaaagtaagtattcagctatcagcaatcagcagtcagctaaaactgcttttcagactaattttacagaatttttagagcagactgataccaaaatcaattgctaattcttcgctaaaaatgctcataaattccagatcataactgattactgattactgattactaaatactcggaataaaaattacattgtctgttaagcaacaagacaatattttcctgtcacacaaaacttatgtgagatatttgtagccatgattaaccaactatattctgacaaattacagcgactaccagaacttttattaaccaccttattaggtgatattccggcaattttttggggaccacaactgagaagattagtatatcgccgtctttttgcagctatgggtgatggcgtgtatattcagcatggtgtagaatttctctctaccacctctattgaaattggtaatggagtacacatctttaaaaatgtgcgtttagatgccaaaggacacccaaacaataaaatttatttaggaaatggagtagcaattgagcgtaacgtagatataggctgtttggaaaatacttgtatacacatagaggaagatacattcattggacaaaatgtctgtattgctggacctggaaatattaggattggtaagcaatgtatgatcgcatctcaatctggtatatatgcaaataatcacaattttacagatacattattgccaatgcaaaaacagggcgttacccgtcagggaattgtgattgaggatgattgttggctaggacatggagttactgtattagatggtgtaactattggcaaaggtagcgtaattggtgcaggagcagtggtaactaaagatattcctccctattccgtcgctgttggtatacctgcaaaagtgattaaaagccggacagctaaagaaatggtgcagtattcttaattagggtttgctgagaaagtcttttcatgagggaataggagtcaggagtcagtaggggcaaaccccccgtggttgccccaggactcaggaggaggtttgaaaatttctttgctatctctcgaaatcccaaaaaatgcacactttttcaggtataccctactgagcgcggtcgaagtgtcgaaccactgcctcctgaactcctgccctccaaaaaagaaccaaatgtgagtaagatagagattgctgaaaagttttttgtcttacccctgggagataattctatggtgactttaaaaatcgctgtttatattgttgttgccttcttcgtaggaatttttgtgtttggatttttgtcaaatgaccctgctcgcaaccctggccgtcgggatttagaataggaagacaacaaatcatctgttattaactgcaactgctggaaggtggaagacactcaatgcctaaacactggcacaaatctggaaaatgatactgtgtcgtccttttggcggcttgctacaagtcagcagaaggcaaaagtcggaaggccaagtgtaaatcatccttccggctaaatatttggtttttcatatctggcttgttgttagctcgattttccacaagatatgcttcatccagttttgccacctgactcacctcctgttcaagaatacatccaacctggccatcttctcgcttctgcttctgtggtagaagagcaaactgggacgcagcaacttgcgacttcaggaaatatcgagactgctaatggtctggtgactcccacacaaactaatcaagataatgcagtaattagcagaagcttatcctcaaatcctgttccagaaactgtaccgccaaaattttcccctctgactgtttctagaagtgcggggcttttgggaaaatctttgacagttggtacttcccaagtgggaaatgcgaatgctgacaagacaccgggggctacatttccacaaatttctcgtgaagttaccaatacaaacaatatatggttggctgagtcaccagttatgatcaaaacttcagccccagtaaaacacccagtaaaacacccagtaaaacataaaagccaacatcaaaatcctgtaaatatatacaaatcaggggagaagattaatatttctgcctctacaaagacgggagaaaatacgtccagttctctcctagtacaaaatattattgagtttaagccacgtaattcaaataaccaaccatcaacttctactactgtagaatttcccccgccaaatcaacctgctgggaatacgccacaagtaagacaacgagttatagaagtaattgcagaccgccaagagtatgatgagcaaagacgaatagttacggcagcaggtaatgtggtggttaggtttgatggggcagtggtagatgccgatcgcctacaagtaaatttggataattcaattgctgtgggggaaggtaatgttgctttaactaggggtaatcaggtattacggggagaacgctttacttataattttgttcaggatagcgggaatctggaaaatggtagcggcgaaatttacatccccacaactcaaactgattttgctttttctccctccccaactacagatattaccgcaggtggtgtacctagtcgtccacctagtgaccggattcgtgctaatcaacctgttactggtgtcagcagtcccggtggtattgatgtgaattttgcaggtcaagcggatgccagaaatattcccgtagccaagtcaggtggtatggtcaaaaggttgcgttttgaagctcaacgcattgatttttatccccgtggttggcaagctgaggatgtgcggattaccaatgatcctttttcacccccagaattagagttacgagcttctaaagtgactttgacgcgagaatcacctttggtagatcgggtaactactcagcgtcaacgtttagtttttgaccagaattttgtcttacctatccccattgataaccaaaaaattgaccgtcgagaaagggatattaatccttttattgtttctcctggttatgataatggtaaacggggcggtttgtatgtagaacggaatttcttagcgattaataatgatcaaactcgttggttgattacacctcaattgtttgtacagaaagctattcaagataatagtaatattcctggtttgttgggtgtgaaaactaagctaaatactgtgttaaatgcaaaaactaaggtggaaggagtaggagaattaacaagtctggatgtgaataaattagaggataatttgcaggggagtttacggttacgtcagagttggggtgaggtaaatcctcatatattgaatttagaatatagctaccgcgatcgcctttacaatggtactctcggtttccaaactgtgcagagtagtttgggtggtgtaatcacttctccgattattcctctgggaaaaagtgggattaatcttagctatcaaggaggcgctcagtatattaattctaatacagatcgtgccgatttactagagccacagcggaaaaataaccgtgtttctttaggtcgcttacaaggtagtgtatctctaaatactggttttttcttatggcagggaaaaccattaccagctactgctaaggaaggattaaaatatacatctaatcctgtagtaccttacttgcaggcgatcgcaggtgtgacgggtacaacaagctattataccagtggcgataatcaaagtaccttaattggtactgtgggtttagttggccagataggtcatttttctcgcccattttttgattatactgcctttaatgtgagttattcccaaggtttcaacagtggtttatcaccatttttgtttgatcgttctgttgataacaaagtgttgagtgcgggtatttcacagcaaatttatggaccgtttcgtttaggctttcaaacatcaatcaacctagatacaggtaaagaaagtagtacagattatattctggaatataaccgccgcacctatggcatcaccttgcgttataatccagttttagaattaggtggttttagtattcgtattagtgattttaactggaaaggtggtactgatccattttcttcagatgaagtgaaacctgtggtgggtggagtgcgacaagataattaggctgttaatctgattgataatgatattaaatcaaatcaaccaccaagtgcaggattccaattttttgggcttgtgaaaattgatggtaaaacagaagttttaatgctacactaaaaaaccacgctcgcaggggggtatatgacctctaccacaaatcttcccacatctggaattagtcttccagatcatactcaattaccagagtctgatggtacatttgtgaaaaattttcaggaacatcctcaaagcattctattaacagaatctattaaaccagtattgcagaaaatccatcctgacggacaatattgtataggtcaagatagcggcatttactggcgtatgaccgatcctccagaacggggtgcagaagcaccagattggttttatgtgcctaatgtacctcctagtttgaatggtcaaatgcgccgttcttatgtcctgtggcaagagtatatttcaccattaattgttctagaatttgtttctgggaatggcgatgaagaacgggatcaaacaccgtggaaaggaaaattttggatttatgaacaggtgatacatccagctttttatggtatttatgaagtgaataaagccagtgtggaagtttatcatttaattgaaaataaataccaattattaccagcaaatgaacggggacattatcctattccagctttaggagttgagttaggaatttggcaaggtgaatatcaaaatgtagatttaccttggttacgttggtgggatgtagatggtaatttgttgttaagtggagaagaacgagctgaacaggaatatcaaagagcggaacaggaacgcctaaaaaatgagcgtttaattgcccaattgcgtactttaggtgttgaaccggaagtttaataaaattcagatccccaattgtttaattatgtttaataagtcggggatctaattttttgcaatccaaaatctaaaatctaaaatccaaaattgccttaccttggttttcccaaagtagttatatataaaactgcttcatcagcgggaatacccaaaacatcatttacctgatcatcaaagaaaccaccgataccactaactcctaaattcaagcgaatcgctgctagattaagcctttgtcctaaatgaccggcatcgagatgtaaataacggtaaacgcgatcgccatattgtcctatagctgtttttaaatcagcagtatgaaatattaccgctgctgcatctcgtcctaattcctgtcctaaacaaagaaaatgcaactcacgacgaaaattcttaaagcgaatttgtcttaattcttgggcttttggtgcataataataacagccagattctagtcccttaacaccagaaacagcaataaatgtttcaattaaattcaggtcgaaataatcaggagcagtatctaaattttgatccagataattttgtggttgataggtaaaatcgagtaaagctttcagttcatcaaaagttaatttttcaccactataagagcgagtagaacgacgtttatagatagtattttctaaatctacaaaatttttaccccagtcaattgatgtggtgacagtagaaagtttgtcacaaaaaggaaaattatatttatcatctaaagttttttctggtttggtggtggctacattttttttactgttttcatcagatttaatttgggtgtgaacatgaaaatattttaagagttgtccatcaggaatggaaggataattagtttctgttaatgaaggtaaggcggtttttcctaaaggcaaattttgtttaatatctaataaatctgccaatgccatcactacagttgcaccttcttgttctggatcaatataaagtagatcattgatagcttcatctgcaaaaccaccaattaaatgaggacgataatcagtaattgatcctgccaattcaatgttacctaaaagatgtccagtatcgagaaaaatgcggcgataagctcgatcttcataacgccatgcagaacgataaaaaaccgcagtagtaataatagcaagttgggtattttctaaactaggatgccaaaaacaagctgcttgtaaagctgtccaaacatcattttcccaaaattgttttaaagaatgagtacgacattgatagttataaagtccagcgggtaataaaggtgtaccacgggaaactaaatatacttcagccgggtataaacctcctgcactgggagcagagcgaaaataaactgcactacccatagaaggcattttcgcagtcagtccataactgtgaaatagcagttgcgaaagtctccgccaccatctagcatcaggattatggttaaaagcctctggtgcttcttgcaaatagggtttaaggtcaaaatcagcgccaattttgtattctttaaatggtactggttgtttagcccagtctaactcctgatttttcccggctaatgtctccgggtcgtatttagtacgctcgtggtaatgttgggcaattgattggtatatttctggcatagtatttttaatttaagatcctcggaaaattctattttttgattggggactggtgactggtgactggtgactggtgactggtgactggggactggggactggtgactggggactggtgactggtgactggtgactggggactggggactggtgactggtgactggtgactggtgactggtgactggtgactgggaaagaaaactttagattttagattttagattttagattttagattttagattttagattttagattttagattttatattggaattgacaaaaacaatccaaaatccaaaatccaaaatctcaaataagtaactcctaactcttgctgtatttattatgaattaccaaatgatgcctacacgcaaaacactatcaaaatctgacgttgatatctcttacttggaatggaataaaggtcaaaacccattgctgttattacatggtatggctgataatgcttgggtttggtcgagtttaggagattatttagcggctgattaccatataattgccccagatatgcgtggtcatggtgagagtagtaaaccagagaaagattatagttttgaaagtgcgatcgctgacctagaagcattaatggaacaactgggatggaatgctgctcatgttgtcagtcattcttggacaggtaaactagctgctatttgggcgcgacaaaacccaaaacgcttaaaaagtatcactttggtagatccaattttcatctggaaaatgcccagtttactaaaattaacttttcctttgttgtataaagttctaccattcttaaaaactatgggaccatttaccagttacgaagaagcggaacaacaaatcaaacaactaagtcaatttcaagactggagtgctgtacagcaacaagtttttcaagcgggaatagaacaaaaacccaatggaacttggggtagtaaatttacaatttctgcccgtgatggtatttttgatgcagtcttagaagtaccaggttttattactcctgttgatacacctgccctctttattcaaccagaaaaaggagtaaaccgccaagattggcaaattaaaccctacaaaaccaacctgaaaaacctcacctttaaaaaattacctggaaatcattggccatttctaaccaaaccagcagaatttaatcaaacagtagccgaatttttagcaagacaaaaatgaaggagtcaggagtctggattcagaataattttagattttagattttagattggagttgacagaaacaatcaccaatcaccaatcaccaatcaccaatcaccaatcatgagtctctgtataaatcctatttgtcctcaacctaaccacccaaataatgatgaaaaccgcttttgtcaaagttgtggttctcaattagaattattaggacgttatcgagttttacgtttactaagtgataaaactgggtttagtaaagtttatgaagcttaccaacaagacacaccaaaaattctcaaaatcctcaaagaagaattagctaacgatagcaaagcggtttctttatttcaacaagaagtagaagttttaggacaattaaaacatcctggtattccccaagcagaagaatattttacctatcaaaccagagcaggtttaactctgcattgtatggtaatggaaaaaatcgaaggaccgaatttagaacaatggttaaaacaacaacaaaaccgccccatttctgaaagtcaagcaatagcttggttaaaacaactagccgaaattttattattagtacataaccaacaatatttacatagagatattaaaccatctaatataatgattcgtccagatggacaattagtattaattgattttggcacagccagagaaattacaaaaacctatattgctaataatggcagcatgacatctatttcttcttctggttatagtcccagagaacaaatgaatggtcaagcattgccccaatcagatttttttgcattaggacgcacctttgtatttttattaacaggatgtcaacctgctcaattatatgatgctcatttagatattttaaactggcgacatttagcaaatcatgtttccccatacctattaaattttattgattggttaatggcaaatgaacttaataaacgtcctgaaaatgccagaaaaatcctagataaattaacagaattagaaaatattaatacaggaagtaacgtagccacagtcaatatagtgggtggtttaaaaacagaaatagtcacaccaacaaccacaaccaaaaatacaattaaacctcccgaaaaacaacccgaaaaattacccttattagccttatttaccgccttaatatgttccttattattattatggacagtagcactggcaaacagaaataataaatttaccgttgttcctgctgactatggacaagcaccagttaaaagaggacaagttgattattttccttatgaagaagggaaagacagtcaagggaaagtagcagaatttaacatagcggttttatcagtagaatataaatggcaactaggcagcacttttcaaattaaacataacgatgaaattattaaccttgaggctttaaaaactcggttagaagcagaaggaatacagagaataatggaaaatcccagtgaaattatttctgtaggtacagcttcctgtgaaggtgatgtgaacacagaacaaagtagagcgttagaacgttcaaagcaaattcaattattagcgaaacaattatttagtaatacatcaagtgttcaaggttatagactattaaacttaggacaatttcagagaaaagactgtcaagcaaatcaagattctacagcctatcaacgcagtatcattattattggagtcaaaaaacaagacgagggagtaatattagatgaagcactcagagatagattagagaaaaaaccctttgcggattttaaactagaagattattcactaggtgcagcagataaatttaaaactgtttctagtaatttataatctttcttactctgcgttctccgcacctctgcggtaaataaatctgataaaacttatggtcaaaaaagcagatattagcaccaaaaaacttattagctaactttcaattttcaattttcaattttcaattttcaatttttcatgctcccattcccgaataacgctttaaacctgcacgccataacaagcgatttgcacctaaaaagatcataaaccaagctataattgataaaaatcctctggttaaatctacaggtaaacctactaaaatactagcagggaaattaattaaataaggaaatggtgtcatcatggcaatatttcgcactgcttcgggaaaaacttctaaaggtgcaatcatccctgataaaaacagaaaaaataaaagccaaaagttttctaaagctgtagctctttctgtccaaaatgctaacattgctaaggtgtactgaattaaaaatcttaacgcaaaagccagcaatgcagctaagataaataacaataagttaggtaaagtcggtatccaaaaagcttggggatataagataaaaaagaatcctattaatagaaatacaaaaggaagtcgagcaaatctttcagaaatatggccagcgagatgatgaaatactggatctatgggttgtaataagcgaggtgaaagtttaccttctactacttctttttcaaattcataaattacccaaacaactgtaagttgtctagctagaaatactgcaaagaaataacgtgcaaaatctaatgaatttaaactaaaatttcctcctgcggcggcttttatccagactcccatgagaataattggtaaagaaccagataatacccataatatgagttctgagcgatattctaccatataggcataatatacagtgagcaaggtttggattttttttaacggttttttcatagatattttactcaaattttcttattaactattcctgattaaactgtcacctgtcagctattaaacaaaacctgcttgaaaaactctaccaattacttcttctattggtggttctgtgactgttaaatcaataatgtctaaatcagctaaaatttgtgaaacggtgcgagtcagtgcttctctttcaactataaatttaacttttctcccttctaaaagttgaatatcaccataagaagttaatttttccgctggtaatggttgggataattctacatcaatttctcgatagggtgcgaatttttctaagagtctatctaagctaccatcatacattaattttccttggtgaattaatagcactcgttgacacaaagcggtaatatctgccatgtagtggcttgttaataatactgttgcttgataaagttgattgtattctcgtaaaaagtcacgcactcctacttgagcatttacatctagtcctaaagttggttcgtctaaaaataaaacttggggacgatgtaaaagtgcggctaatagttctgctttcattctttcacctaatgaaagttttctgacgggttgatttagtttacctcctagtgataacatttctgttaattcaccaactcgtcgatgaaattctttatcagaaatattgtaaactgcggcgttaatttttaaggaatctattgctggtaagtcccacagtaattgctgtttttgtcccatgactagggtgattttttgtaggaatgcttcttgacgacgaaagggagttaaaccagcaacttgaacttggccactagaaggatgaattaaaccggtcagcatttttaaagttgtggttttaccagcaccgttaggtcctaaaaaaccgactgcttcccctggttcgatggtaaaggtaacatcttgaaccgcgttaatattacgatatttacggcgaaaaaagtggttaattgtcccaataattcctggctctttaatggcgactggataggatttacaaagtttttctgctataattattgacataaaaaattatttccttgtattttatatattgtattatttcggctttttggttgctgtatactactaatatagcgtttcccagtctaatagacatctccagaaaagaaattatggaacttatttatgggggcagggcgaagcatttgggataagctgttgtgcatttaatttgtataagtggaacaggcatcttgcctgttacacaagagttcagaatattaggattatacaatttagctgtgtaacagcttaaccaattctttgaaatttaacccggaaaatgcacgcttttaggagtatacccctgaaaaatcctgcactgatttcctgattttccacctgaaacccttgatttattaaggttttgagtttattcagcaagccctagataaattactttaaacggcctgaacgtaaaatactaataattaaccataaacctaataaactagcagcagcaaataacaagctgctcagaaaatataattgagaagtttgagctttactagaaataattgctgctcccattattagagaacctactaaaatactaaaagaaagacggttggctgcatcatccattgttcggcgcacaccgtctaatcctcttaatgataaattccattgtagagtttctgatgttactctgtctaataatagttcaatttgccggggagattgtaaagagagacttttaatatctaaagcagtccgtaaaagagaacgaaccggactatctcctaataactgacgacgaaacaagtcagtgattaatggttgaatttcatcaaataaattaacttctgggttaaaggtacgcgctaccccttctaaatttgctaaagttttggcatataaacccatattactgggtaagcgaattttattattacgagcaacctgtaaaatttcataaattatttgactaaaattgatctcagttaaactgacattataatactttcgcaacattcgatcataatcattttctaagcgagataaaatcacaggttgagcagaatcagaaagttgtaaagttaactgagcacacctttgagcatccaaatcaacaattgctaataacatttctgttagaatttgttgagtgcggggatcaagtctacccaccatgccacaatctaaaagagcaacacgcccatccgtcagataaaataaattgccaggatggggatcagcatgaaaaaagccatcaatatataattgttgaaaaaatactctaaataataaagtagtaattcctttccgtttaacaatagaatcttgagcattttcgggatttaaatctgctgttaaaagcggaacaccatccaaccattccatcactaataatttttctgtagtcaaatgccaataaatttctgcaactacaatttgcgtgggatcataccaacgaccttgggataaattgcgccgcagttggtctgtataaccggcttctcttgtaaaatctaattcagcttctaaagctttagtaaattcctcagcaatagatttgatgtcataaatttgtccaaaatcagttctcgccaccaaatccgcaataccttgaattaaggatatatcttgggcaatggtgacatcaatacctggtctttgaactttcaaagcaacttctcgtccatcagagagagtagcgcgatgggtttgggcaattgatcccgctgctactggtatatgattaattgtttgaaaagtttcttccagtgggcgctttagctgtttgcggatcacaacttcaacttcaccccaaggaactgcgggtacttcatcttgcagggttgatagttcttcaatataagcagcacttaataaatctggacgggtagaaagaagctgaccgagtttgacataaaccggacccaaatccaccaaaacattttttaataccgcaggtgtaggtagttgaggttcatcggttttaccaccagtcaacaaccgtcgcatatagtcccaaccattgcgaaggactacttcaataattttccgttgtcgaggcacagtttgggttaaaaacattttggtgattggtgattggtgattggtgattggtgattggtgattggtaattggtgattggtaattggtgattggtaattggtgattggtaattggtgattggtgattggtaattggtgattggtaattggtgattggtaattggtgattataaaacataaaattgattaaccagtccccagcgatgcactgagcttgtcgaagtgtcaccagtccccagtcaccagtccccagtccccagtcaccagtcaagggtccctagtccccaatccccagtcaagggtccccaatccccaatcaccagttataattaaaaacaatgattgtgagtatctaccaacagttttaacttttagagcaagtcagtaaatcggggatcactttgcagggttttgaggatctgtttaatttcttgagtgcgttccttgtttactattagggtaacattgcgatcgcgcacaatcaccacatcctccaacccaatcgtcactaccacatcatctggattagaagcataaacaatagcgccttgggtgtctagccctacatgggtagctaattccacattaggattatcctctgttttcagtaggcgttcaatggcattccagtcacccagatcatcccaaccaaattccactggcaaaacataagctagacttgtcttttccatcagggcataatctatactttttttaggcaactgagggtaaacatcgggtccttgttgttctaaaggttggataatttctggggcatgggtatggagttctttgagaaccaccccagcccgaaacacgaacataccgctattccagctaaaccgacccgttgctaaaaaattctcagccgtttcccggttgggcttttcagtaaagcggtgaacgtgataagctggcaactcattaaagctaccaatcttttcaccttgttcaatgtagccgtaacccgtggacgggaaagtaggcttgatccccaaagtgacaatcgctgctgtgctagtcgctaactgggtagcagcactcaaggtatttgcgaacaccttttgatcagcaatccagtgatcagcggggaaaaagccaataacagcgtcttctccgtaacgcttgttaatttccaaactagtccaagcaacggcggcggctgtatccctaccctctgattcaatcagcaaattttgctctggcagatcgggtagttgttgtcgtactccttcagctatttggctagaagtaatcacccacaggtgatcccaaccacctgcgagtgttagtagtcgatcagcggtggcttgtagtaagcttttagaactgccatcgagacttaaaaattgcttaggtctgtcccggcgactaagaggccaaaaacgctcacctttaccacccgccaaaataacagggatcaatgaatgactcatgttgttatatacacttactgcttaacaatattaagtgtacattcattcaatttgggataatcttcactgatcaatctgagtattggggaattttggatttataacttagtggaaaatgcgagagtgatgacaagaacaaaatctaaaaatcaacaatctaaaatctaaaatctgcacagatagctctaactctagctacaagaatttgtagcttgcattaacatacctttagggagtggttgagtggggagacaattgtgataaaacaagttcaatggtcaaaaaatcaagttatacctcaacaaacaacaggtttagatcaagaggcacaaccgcaacaatttcaaagggtagaaaatcaggtcatacctaccccagtaacaggatcagggacagaggttcaaccaaaacagccagtaacacagtcaataaataatccacgtcaagtcgttgagtcagtaggtgctatccctaatgaactctacgatcgcttagggttaacaatgccccgctggctattgtggatattaacttttgttattggtattattttatcaggtttattggtgtcaactttggccttatggactcccctctggagtaatttagagcaagccaaagatgatgattttggatctactaccagtaaagatcaggtaaaagtacctggggatttatggaataaactttctcagtaccaactatcaaaacccatgaatattttagtcatgggcattgaaccagtgaagggtactgttgacggttctccagaaagttttgctggtagcagcgatacgatgttattaattcggttaaatcctagtgataaatctattcgtgtgctttccattcccagagggacaatgatcgccctcccagatgagggattaaccaaggtttcagaagcaaatgctaaaggtggtccagtattagctgcacgggtagttagtcggactttaagcaatgctcccatagatcgctatattcgcatttctactagcggtttgcggcaattagttgatcagttgggtggggtagatgtatttgtaccccaagggatgaattatcaagacaatgctggtggtttgtcgatgaatttggttagcggttggcaaactcttaacggtgaacaagcagaactttttgctcgttttcgggaatcaaatatcggggatctgccaagagtgcaacgacaacaagcactaataactgctttagttcaacgtttaaatagtcccaccgttttacccaggttgcctcaaattactcgcattatgcggaagtattttgacactaacctgaaaatggaagaaatgatggctttggctaatttttctgtgaatgtagaacgggataattttcaaatggccatgctacctggtacgtttagtaagtttagtaaagacccagatagttactggttgaatttgactggacaacaaagcttattgaatgattatgttggggtggatatacctggtttaaaatcagattcccgtccagtttctcgcctcaaaattgctattcaaaatgcttccaatcaacctcaattaacagaacaagttattagctatctcaaatccaaaggttttgctaatatttacacaattcccgattggcctgatactttgcggcaaactcagatcatttcccaaaaaggaaatccacacccaggggcggaactacaagaaattctaggcttaggtcaagttgaagtttctgcaaagggtgatttaggtgctgatttgacaattcgcattggtaaagattggaaatagtgactggggactggggactggtgattggggactggggaagaggtgattttctcgttcccatacagagtatgggaatgaattttgac

SEQ ID NO: 20 - DNA, 74348 bp, Sphaerospermopsis sp. LEGE 00249
  LEGE00249_32
aggagtctgggccgtgtctcagtcccagtgtggctgatcatcctctcagaccagctactgatcgtcgccttggtagtcccttacaccaccaactagctaatcagacgcgagcttatcttcaggcgataaatctttcacctttcggcacatccggtattagcagtcgtttccaactgttgtccccgacctgaagccaaattctcacgcgttactcacccgtccgccactaactccgaagagtccgttcgacttgcatgtgttaagcataccgccagcgttcatcctgagccaggatcaaactctccgttttgttaagtttgtttagctcttttttgactgtcttttaatacctcagtccggtatcattttctttacttgacgcaggacttgttgtatactgtctttcaaactataatattttcaaggttcggtgtccttccgagtccgctctctcgcggctctctctcaggcacttattcaatatagcgaacctatcttggaatgtcaactactttttaaaaaaaaattgaaaaaaaatttttaatggctggaagctgctcggaatactgggtttaggcaacaatggtgtaggtgttgttgactcataggaagagtagatagtgaattttcaatcagtaatagcggttttacatcagttttggggtgagcgtggttgcttgattgctcaaccttatgacatggagaagggagcaggaactaagaatccccatacttttttaagggctttgggtccagaaccttgggctgtggcttatgttgaaccttgtcgccgtcctacagatgggcgctatggggaaaacccgaatcggtttcaacattattatcaatatcaagttctgattaaaccttcgccagataatattcaggaaatttatcttgattctttaagggctttgggtattcgtccagaggatcatgatgtgcggtttgtggaggataattgggaagatgcaacggtgggggcttggggtactggttgggaagtgtggttagatgggatggaaattacccagtttacttatttccaacagtgcgggggtattgattgccgtccagtgtctattgagattacttatggtttagaaagattggctatgtacctccagcaagtggaggctattactaagattcaatggacggacaatattacctatggtgatgttcatcttcagggtgagattgagcagtgtacctataactttgaagcttctaatcctgagatgttgctaaatctgttcaatatatatgagcaggaagcatcccaactcacagaaaggggattggtgttacctagcttagattttgtgattaagtgttcccatacatttaatttgctggatgcaagaggtgtaatttcggtgacggaacgtactcgctatattgccaggattcgacatttggctagaaaggtggctcatttatatgttgagcaaagggaaaagttgggtttcccgttgttgaaaaattcacaagctgctgcttaattcctgtttcagaagatgcagagcatctagaacaccgattcattaatcgtaagggcgaagcattcggacagaatatgaactggtttcagcgataggttatcacccgaatgcttcgcccctacaaggtaaaaacaggttacctagcattactgaatcgacgttctagatgttcgttaccaggcaacgagataaaataagcaaagtgttaatttttgtaactcctccgtttttgggggagttgctgttcgtggcaaaaataatggtgtgtgtcagatgatgaatattagtgaagcgttagaacctattgcagcttggtttcgttctttgggtattcctgaacctgttacacattggggacatccggtgatgatggggattgtgatttttgtggtgggtagttttgtgggtgtgtctggttggcggggtaaattgctgcaagatacagataaggatgctgctgttaaaagtcgcagcgcccatcgtcagttagcaccttggttatttatctttttggcaggtggttatacaggtggtgtgttgtctttggtgatgcagcatcaaccactgtttgaaagtccgcatttttggactggttctcttgtactgttgctgttgttggtaaatggtgcaatttctctgagtgggttttttggtgataaagcaggtttacgtgctgttcatgcttatttaggaagtacagcactgttaattttgtttgttcatgctgtcttggggttgaatttgggtctatcactctaaaataggtcttttcccaattctctattttgttgggttgtgctgtcgcttaacccaaccggcaataattatttttaactcagttgatttatttatataattacttttttatattaattttactaactaagtgcttttggcaattaaatttttatgatacagagtagtggcgttattatttgtctggcctatattttagggttgttgtttacagcagttccttggggcggtgtatggatttttgcactggggatattggcagcagttttttttcgggcagtttttattaatttacggaaaattaactataaacaggaaaattatctcactaaagctaagacaggggttaatactccgctgactactcctcatcctagagtatggttaattgctggtttggtggggttgttggcaactttttattttcaagtgcggacaccccaaccaggagagaaagatattagtcagtttatttctaatgaaaataatagtaatcaagaacagttagtaattgtccgtggggatgtagtaggtactccccgtttaactcgcagtcaaaggggacaattttggctgaatgcgacgcaacttgatgaggtgaaaaatgaccagggtccggcaagtgtgccaaaaggggtaacgggtaaattatatgtgactgtgcctattcttcaagctactggtttatatcctggtcaacaaattgcgatcactgggatgttatataaacctaaagcggctcaaaatcctggtgcttttgattttcagaagtatcttaaacaagaaggtacttttgcaggtttgattggtaaacagattaatattattgatgaagagcgaaaatggggatggtggcaagttcgggaaaaaattgtgcgatcgcaagttcgttggttaggtgttcctgaaggtcctttagttagtgcgatggttttaggtagtaaggcggtagatttaccttatgatattcgtgatttatttgtgaatgtgggtttagctcatgctttggctgcttctggttttcaaacttctttaattttgggaataattttacaattaactagcaaagctaacaagggtattcagtttttttgcggtagtttgggattacttacttttttatgtttagctgggtttcaatcatcaattcttagagcagtaattatgggttttgctgcattaattggtttggttttagaaaggaaagttcaacaattaggatctttattattagctgctactttattacttttatttaatcctgtttggattggagatttaggttttcaactcagttttctagcaactttggggttaattgtcacagctacaccgataactaaacgtttggattggctgcctcctgctatcgcttcgttaatttctgttcctatcgctgccacaatttggactttacctttacttttacatatttttagtgtagttgctgtttacagtgtgctattgaatattatcactactcccttgatttctgtgattagtattggtggcatgattagtggtttggtaagtttaattgtaccagatttgggtagcaccttagccagttttttatattatccaactcattggttaattcaattagctaaattttttgctaatctgcctggaagctcggttgctgtaggtagtatatctacttggcaaatgtttgtagtttatggattaattatatctacttgtttggtgggttggtggcaaaaaagatggtggtttgctggtttaatggctattgttttagtgataattcctgcttggcattctaccagtaatttattacgaatcacattattagcaactaataatgaaccagttttagtaattcaagatcaaggaaaggtaactttaattaatagcggtgatgaaggtacaggacgtttcactattttaccatttttacaacaacaaggaattaatcaaattgattgggcgatttctagcaaatttttggcaaatgaaaatgatgcttggttagaaattatggatagaatgcctattaaaaatttttatgcttatttttctcaacaagaaaataatctggaaactcaagctattcaaaaaaaattacaacagcagcaaggtatttatcagcctttagcattaggtcaaactattagcactggtgctattatttcccaattcactaatgaaaaattaccaattttaaaattgcagatttttggaagaaattggttattggtaggtagtatcaagtctcaacaaatagcacagttagttaaaaccggtgatttgttttctccccaggtgctttggtgtccatcagaatctttacaagatttggtaacagcactgcaaccaccggtggcgatcgcatctgataataatcttaacagtaaaacattagatgctatcaaaggtaaaaccaaactcttcttcacaggtagagatggtgcgattcaatggactcctgatgctgactttgaagcttttatccaagtcacagaaaacaaatcttcaaatttgtaacaggttagtgaaaaatatggtatgataatgatataaattagtatcacccttattcactaaattctgtgaattatatgagaattatgtgaatcaagatttggagaggtggcagagtggttgaatgcggcacactcgaaatgtgttttggggcaactcaacgggggttcgaatccccccctctccgttactagagatgttttcagtctggaagttacgtttcaaatttttatgtttcacgcaaaggcgcaaagaagcaaagataaaaagatggcaagcaatagaaaagctagaatgtgatacaaatagatgaaaacagtttttaggtgtctggaaaagctgcaaaagcaggacaactttacagtttttaggtaattataaatgttgataaagctaccgataatttagcgtcaggtactttatgaataattaatttgcaaaggaaaaaacgatgcgactatcacaaatgttatttgttacactccgggatgatccagcagacgcggaaattcccagtcataaacttttacttcgcgcaggttatatccgtcgcatcggtagcggtatttatgcttatctgcctttcatgtggcgtgttttacaaaaagtttcccaaatagtacgggaagaaatgaacgccactggcgcacaagaatgtttgttacctcaattacaaccttctgaattatggaaggagtcaggaagatgggatacttatactaaagctgaaggtatcatgttttccctaattgatagaagggaacaacaattaggtttaggtcctactcatgaggaagtaattacgacagttgcccgtgatatgattcgctcatatcgtcaattaccgctgcatttatatcaaattcaaactaaatttcgtgatgaaattcgccctcgttttggtttaatgcggggtagagaatttatcatgaaagatggttattctttccatgtggatgaggaaagtttaaagaaaacctaccaggatatgtaccaagcatacagtaatatgctgcgccgttctggtttagcttttcgggctgtggaagctgactctggtgctattggtggttctggttcgacagaatttatggtgttagctgatgcgggagaagatgaagttctctatactgaagatggaaaatatgcagcgaatgtagaaaaggcaatttctttacctgcggatgcggaaagttcaccttttactacttttgaaaaacgggaaactccaggaactgacacaatagaaaaagtttgtgatttcttaaaatgttctcctacccaaattgtcaaaaatgttttatatcaaactgtttatgataatggtttgactgttttggtgttggtgaatattcgcggtgatcaggaagttaatgatgtcaaattacaaaatgagttgactaaattagctgaaaaatttggtgctaaaactattctttctttgagtgtacccactaatgaaataattgcaacttgggcagcaaaatctttacctttaggttatattgcacccgatttaggtgatgattatattgcgggaagtaaacaggtaaattctaaatttgtgcagttggttgataaaaccgctgttgagttaaagaattttgtcactggtgcaaatgaaagcaattttcatgtggttggtgcaaattggggtgagcagtttaaattacctgatattgtagtagatattcggaaagcaaaagcgggcgatcgctctctacacaaccccaaccaaaccctagaaacagctagaggaatagaagttggtcacattttccaactcggtacaaaatattcccaagctatgaatgcaacttataccagtgaacaaggggaagaaaaacctttagtgatgggttgttatggtgtaggagtttcccggttagcacagtcagcggttgagcagtcctatgataaagatgggataatttggccagtagcgatcgcaccttatcacgctattatttccattcccaatgttaacgacacccaacaggtagaaattgccgaaaaactctacacagaactgaataaagcaggtgtcgaaaccttacttgatgatcgtaatgagcgagcaggtgtaaaattcaaagatgctgacttaattggcattccctttagaattgttacaggtcgcgccattgctaatggtaaagtagaagtagtaaaacgggcaaaccgtgaatctcaagaaattgccattgacgaagttgtaaatatattacaacaatggattaaagaagcagtagagaagaagcagtagagggataaaattaaactcttgtggggcaggcatattgcctgccaataatatgtatttgatttgaggattcacaagaaagttaaaacgaaaagactggcgaaaagactgggaaatttaaatattttcacgaaaattgaagttgtgtaaatatgtacccacaaatttcaggaaactgccattgagaaattgattaatatattaaagatattaaagaatagattcaaggagcaagcaaaaatacagacaagtaagtagtcggttgcaattaaatataaaatgtgggatgggcttacttcgataaactcggtacaagtcttgcccgtcaacaggcttctagcctgttccactatactaacaattaattaaacctacttacttatagttactgtacactgacttatggaaatataattttacctatctatcctgtgagcgtgcgtatttcaagaattgttgagattgacattaaagttgatgtgacggtctataaatgtgaacctaaaattaaagataagataaagttgggtgcaggatgataaattgctgaaacaggcaaaatacaaagtcagcagaattttcacacattaaggcatctctagattttaagaaactacccacgcatccgtatcttctttagccaggctacccctctcttaaacactacttcagccctttgtcaagcaggttttatatatgaatgaacaacaaagaactaatcgtaatatttcttcaggtgtcatagcagccgtctcagccgcagtggtggcagtaagtggtggggtagcttggttgacttcccaaactcctcaaactcccataccaggaaacccctctcaaagcattaaacaaccacaacagccattaactacccagccggggaaagaagaaactgctaatatatattggctcaaaccaacggaaacaagctttgaattagttcctcagccgataaaaattgctgctgcacaacctagccaagctttagaagctgcttttgaaactttgttagcaggtccaacagaaggaacagactcaacaactattcctcaaggtactaaactgctaggtttgaaagctgacaataacgaagttcacgttaatttatcagaagattttaccagtggtgggggtagtgcctcaatggttggccgtgtagggcaggttgtctacactgctactagtttaaatcctaacgccaaagtttacattgaagtcaatggtaagccattagaagttttaggtggtgaaggtgtggaaatagaacaaccactaactcgtaaaagctttaacgaaaattatcctctttagtcagtagtcgtaggggcgaagtaggggcgaagcattcggaaaataacctgtgataaaaattgataatttatcgcccgaatgcttcgcccttataggaaaatagccttggacaaaaattgataatttatcgcccgaatgcttcgcccttataggaaaatagccttggacaaaaattgataatttatcgcccgaatgcttcgcccttacaggaaaataacctgtaataaaaattgatcattgttcgcccgaatgcttcgcccgtacagtagtcagtagttgatgatttttccagaacaaaaagaactgacaaaggacaactgactaattttgatcaacttcttttcaagttgtagcgcagcgatcgcaaatagtcgttaacataacaatgaacagggtgctgaggacatcaattgataatcaaactccaactacaacagggttttcctgctgactctgagaacagttgacttctggaacttttgacttctggaactgctaactgctgactgctactataattaatctggattaattcgcattaaaggttgaccatattctacaggttcgccattttgaacgagaatttccatcacttgtccagagacttcggcttcaatttcgttcatcagtttcatagcttcgatgatgcagactgattgacctactttaacgcgatcgcccacttccacaaatggcgcttcacctggtgcgggtgcgcgataaaaagttcccaccatcggagactggacttctacaaatcgagaggcggcggcgttaacagctaaaggtgattgtgctgtagccgaattatcacgacttgtagttatttctggtaattgtatgggtgctgtttgggttgctggtgcaggtgtcaatcctggactaaccataccacctaactgagcttgaccgaccgacagtacagaattatttccacctttacgcactgttagctcaaagtcatcgcttttaagtgatacttcggtaatatcagtttgtgcaatagtagctaatagttggcggatttcattaaaatctaatggcacagtattttttacctcgacctaaccgtaaatcagaatcttattctcccattcaggaggtaatacccagaaatttggtgtgatttccaggtactacgggaaattgttcatttctccaacctcgctggatgacaagggctggaaatcgatctgggatatccacaaaaaagcggcttattccctgcctaaatatttatcttctctggtatctatcttgatccgttcaccttgagaaataaacaggggaaccatgacagttgcgccggtttctaccttcgctggtttagtaccacctgtagcggtatcacctttcacaccaggatcagtttcaactacttcgagaaccacagaattaggtaattcaacttctagcacttgttcgccccaacgaataacgttgacttccataccttctttgaggtacttaacgcgatcgccaatttgtgcagcacttaatctaccttcttcataagtttccatatccataaagatgaattcttcaccttctttataggtatgttgcattgtcagtttttcaagagtagcctgtggcacagtttcaccagcccggaaagtccgttctaaaaccttgccggtttggacatttttaatagttgtccgtacaaaggcagaacctttacctggcttaacgtgaaggaaatcaatcacccgccatacagacccgtcgaggacgatagaaacaccgggtcgaaagtcattactagagatcatgaaacttgcaaattttggaagatagtcggcatttattgtacctgttattaggggatagggaatagggaatagggaatagggaaggtaaataacccaattacccattaccaattacccattacccattaccaatccgcaatatgggaagatgaatgatgggttacttcccagttcatacagttaacaatttgatgctgcatttgagaaattccatgtttaacttcataaaatcctggctgaaatacagcctcaagaccatgctgctggtaacaatacttgtaggaataagcactgctgggtggacttcctttagttatgcagccctgccatctggtaacgctatcactgacggtaaagctttgttacggtatgcactgcccattgataatcaaccagtacgcaaactgcaagctagtttagaagatatttctaaccaactacgtgctaataagcgatggagtgcggtttctagagacctcagccaagcttcccggattctcgataaaccttcccaaatcttaacaagcgttcccgcagaacgccaaccccaagccgaaacttggattgctgatttaaaatctggcattgcagaattgcaagaagtagttaaaaacaaacaaaaagaccctattctggaaggcagagcgaaattactcaatcttgtgactttgttagaagagtcaatggtgacagaatttccttttgaagttcctgctaagtttagtaatttacctcaacttaaaggccgcgctactattgccattaaaaccaataaaggatatctgactgtagtggtagatggttatagcgccccagtgactgctggtaattttgtcgacttggtgcaacggggtttttataacggtttagaatttacccgttctgaagaatcttatgtattacaaacaggagatcctgaaggtaaagaagtcggttttattgatcctgcaactggtaaatatcgggctattcctttagaaattttagtagaaggcgaaaaagaaccaacttatggtattactttggaagatgctggacgttatcttgatatgccagtattacctttttcttcttttggtgctttagcaatggcacgtcctgaaggtaatgtagatggtggttcttctcaggttttcttctttttatttgaaccagaattaactcctgctggacgtaatcttttagatggtcgctattctgtttttggttatttgactgaaggtaaggacattttagataagctcaaagcaggtgacaaaattgaatctgctacggttgttcaaggaattgaaaatttagttcagccacaagcagcttagttaattttggattttagattttggattttggatttattctgaaatctaaaatctatctggtttgttgttgtttgttgtttattatagcaattaccattcaagtgagatacaggctttaataattaaacgcagatggacgcagattaacgcagatgatttttgacagaaaaccgatacctaacgtaagttgctagttagggaaactgtctgaatcaggatgtccaggatttcaggatttacaggatgaaaacagggatttcatcacctattaacaattaccaattacccattaacagcctcaactacataactagcaacttgggttacctaataaatataatgatatagttaggaaaattcacaaaaatttatatcctgctgttgttagtttagccttgattttgggaaacctgtaaatataggtaaaagacagtgaggctaagatttatgactaattcaaattcagaactaagtttagcagctttagcagagcgaatttctcaggttgaacgggaacaggaattaagacgaaaaaatattgcttggttaaaacagtattttgatgaattgaaacaggattttaataatagaccagaattagtacaagttcaaaatttgcaacaagagatagtcaatttaactgctcaagttgctgatttacaacagcgtctaaatgagtcatataatgaaaaggaaaatttacaggatggtgaaaattctaatgatgtgaaaattttagatgatgcagaaatagtaaaacagttttttgagagggtagataaacaacaaaatcaaggtgagttgatagaaaaagcgggtgaagttgaaaatgttgatgttggtgagagtgaggaagaaaaggaagttgatgtagtttttgaggaaacggaagatagcagaaatttcaatgatttagaatttaagattgaaagggtgatgtggttagttaataggatgtatacagcagaggaagattatcaggatattgctgttagtgcagaggaattttggcaaaggtatgaagtaggagaacgggattttacaggtattaatttagctggtgtagatttgagtttgctaacaataagcagggtcaattttactcaagctaatttgaaaaatgctaatctccagggtattaaaatgcactctgtaaaattagatggtgcaaatcttcagggtgtagatattagtaatagtagcttatttgattgtaccttgcatgaagctaatttttataatgccaatcttgagaatatcaaacttacctcagtcagtctagaaaatgccaaatttagaaaagcaaacctaactggagcgaatctttatcaaattaacatgaacggtgctaatttaacaggcgctaatttgagcaaggcaaatttgagaaaatcaaagctaattggagcagatttgaataacgctaatttgagtaaaactaatctttttgaaacaaactttgaaggtgcaaatcttgaaggtgtcaatctccaaaaagctatttacaatctgcaaaccatcttacctaaagattttgcaatttctcaagctggtgcttatttaattgctcctggtgcttccttgacaaacgctgacttatctggttatgacttacaacaagtaaatttaactggtgctaatttaacaaattcaaagttagaattagccaatcttcaaggtgcagatttaagtcaggctaacttgagtagcgcaaatttaactaaggcaaatttgaacagtgcaaaactacttcaagccaatctaaaggctgctaatttaagtgaagcaaatttagagattgccaacttaactgctgctcaaatgactcatgcaaatttgatgaaaatatcgttacatagtgctaatttaactgctgctgaaatgtctggtgcaaatttaataaacgccaaatttgattatgctaatttcagtggtgctaatcttagtggagtaaacttggttggtgtgactcttagcggtaatttcagtggtgctaatttaactaacacaaacctttgtggtgcatctctccagtctttaaacctatgtggagctaacctaacttcagccgacttgcgtggtgctaatttgattaatgccaagctagaaaaagcgaatctaaaaaacgcaaatattagcggtgcaaacctagaaaatgcaaagcttactggtgcaataatgccagatggaacaacccatgattagaatttaacgaggtttaccagaaaatctcacatttttactgtaggttagatttacaaacaacctaacctacaatttagaccaacttacctgcattcaaaacctgctcaactgtaagattcaattcaggaaaagtccgcgatataattttttcattagcagtaaatactgtatcttcatataatccctcttctagcaataaaacagaaatcttattgtctaaaggatctactatccaatattcaggaactcctaaagcagcatattccgatcttttataacgataatctctttttaccgattctggactgacaacttctacaattaataatggtgctgactcaaacacagcagaagcatttatcagttctttcgcatcttcttccgtcaccacacacaaatcactcaaccgcgatttatttttactcgttctcaccccagtttcccgaaaacacaaccaaggtaaacttaaagtttgaatttctacatctatatttttttccaaaaatttgcaaatcaaaaaatgttcaatcgtaggtggattcataatttctaattgtccatcaaccagttcagatttaaacccagattcatcttcataatttaagtattctttaaaagtcagacttcttactgctgtgttaaccatcttgattacccctagatgttagttgtatattaacctataagtgaaatgaaaattgtcagaacttggggatctatttgctggaatgttgtaattaatcttcatcatctgctgtaagttccatttcctcagtttcattaatatcaggagattcagcaaccatcactaattcattatctacatgatgattatgccgccattcatccaagacatctttaactaatacttcttgtacccaaattttagcaacaacggttaaaggtaatgccaaaaataatcctaaaaagccaaaaaaggtcacaaaaaacaactgagaaattaaagttactgctggtagtaaagatacctgatgcgccatgactatgggcgtgataaaattactctcagcttgttgaataaaaaagtagagaatcaagacaaaaataggtttccagggagaatctaaaagagcgatcgccattgctggaactacactcatagttggtcccaagttgggaattaaattcataaaacctgctaaaactcccaaggctaaagcagctttaacacccaacagcgataagccgatcaaactcatcaatcctactacacaaacagcaagaaaagcccctgatacccatctttctaaggaaagctcacattgatctaaaattccctctacccgtcggcgataaaatgaaggaaatagcctcacaaatactttccgataagcattaggattaactaaaaacatcccagttaaaactagaactaataaaatattaaggacaattaccaaagaaccagaaacaaaagcaaaagaatttcctaatactcgattaattaaaggttgtgcttcggcaactaaactgtttatatcaggaataaaaacttccaattgttcaggaatgtgagttctctgttcatcaatccaagtattaatacgttcaaaaccttggggaactcgataggttaattcttgaaattgttgggcgaaaggtggcacaattaaccagaaaaaacctattacacccgctaaaaaaatcatcactgacaaaaaaaccgcaaacccactttttatgcctaaattttggaaagttcgtgctaaccgatttaaggtagttgctaacacaacagcagcaaatatcagtaacagcacttcccgcagttgccacaatatatataaagagagaactaaggtgattaaacctatccattgaccaagtttcacagactaaactcccaaaccttggtgagatgaaattttagtagtcatttaacagtcagtaggggttagcactgctaaacccgtacagtagtcagaatatttgattaattggtagatgatcaaatattacgtttgcaggtgtgctttaaaaagcctacgggcgaagcattcgggcgagcaattataaatttttgtcccaggctattttccgaatgcttcgcccctactttgtttttgtgttggcattcgccaaagtaagagagttatcagaattacagtaggcaacaaaactaaaatcagcgcgtttaatgatgtacctgggattaacaccattggtcctgcatacttaatcaaaaacgagatgacagttgacaaaagaagtagtttcagcaagaagaatagttgatttttcataaaagtgcgggaatacacatttttttggtagggtatacacgaatttagacttgaagattgattctgaacattctctacaatagaaatcagacacaaaactttacttgtgcatcttcctaccgtagtagctctgaatgtaattggtagattaatacctatagctctagcattataccaattttctttgggaaatgctctagtaattctgctagttacggctatttttagattggtcagttagtttgcagcaagattagcatcaaaattgacaattgacaattgataattgtttcattcaaggtttaaaacctcctctttcaaggggaaaaagtccaagattccgctttttcaagactctgaatttaaaggagaggtaattgttaattgacaattgataattgacaattgttgagccattagcaatgagcaaattttatagaggtaaattatcatgcctgtagaaacaaataataataataaaaacaaaatgaaaacgccaaaaattcgacagtttggtggtagcttcctaattttactaactttgttattgctgctgaatttgatagttcccagtattttaggaccacgattgcagcaagttccttatagtgattttattgatcaggtaaaagcgggtaaagtggaaaaagcagttgtggggagcgatcgcattgaatacgcaatcaaaaccgaaaatcctgaaggtaaaaccgtggaacaggtatttagaaccacacctgtagctattgatttggatttacccaaaattctgcgggaaaataatgtagaatttgccgcacctccaccaaatgaaaacgcttggattgctactatattaagttgggttgctcctccattaattttctttggaatttgggcctttttaatgagtcgtcaaggtggaggaccagcagcattaacagttggtaaaagcaaagcgcggatttattctgaaggtagcactggggtaaaattcccagatgttgcaggtgtggatgaagcaaaagcagaattagaagaaatagttgatttcttgaaaaacgctgctaaatacacaaatttaggagcaaaaattcccaaaggtgtcttattagttggacctccaggaactggtaaaacattattagcaaaagctattgctggtgaagcgggtgttcctttctttagtatttccggttctgaatttattgaattatttgtaggggttggtgctgcaagagttagagatttatttgaacaagcaaaacaacaagcaccctgtattgttttcattgatgagttagacgctttaggtaaatctcgcggtggtgctggtggtttcgttggtggtaacgatgaaagagaacaaacattaaaccaattattaacagaaatggatggttttgatgctaacactggtgttattatcatcgctgctactaaccgtcctgaagttctcgatcctgctttacgtcgtcctggtcgttttgaccgtcaaattgtggtagatagacctgataaaattggtagggaagctattcttaaagtccacgcgagaaatgtcaaattagcagaagatgttgatttaggaattattgctactcgtacccctggttttgccggtgcagatttagcaaatttagtaaatgaagctgcattattagccgcaagaaataaccgtcaagcagtattaatggctgactttaatgaagctatcgaaagactaattgccggtttagaaaaacgttctcgtgtcttaaatgaaattgagaaaaaaaccgttgcttatcatgaagtcggtcatgctatagttggtgcattaatgccaggagcaggtaaagtagaaaaaatctctgttgttcctcgtggtgtaggtgctttgggttatacaattcaaatgccagaagaagacagatttttgatggtagaagatgaaattcgtggacgtattgccactttattaggtggacgttcttcggaagaaattgtatttggtaaagtttccactggtgctgctgacgatattcaaaaagccacagatttagcggaaagagcgattacaatttatgggatgagtaataaactcggacctgttgcatttgaaaaagtccaacagcagtttattgaaggttatggcaatcctcgacgttcaattagtccgcaaatgacgcaagaaattgaccgcgaagtgaaggaaattgttgataatgctcaccacattgctttgagtattctgcaaaataaccgcgatttattagaggaaatttctcaggaattattagagaaggaaattctcgaaggtggttatttacgagaaaagctttctcaagctcaagcacctgatgaaatggatgaatggttgagaaatggtcagttagatgctgataaacctttgttgcaaacgctcttggtttagtgtgcgataaatgtagggatttacggtaggggtttagcaacgctaaacccctacatttttgatttttaacggagtctttttagtgccagaaccaagacgtatattaggctcactgaaaataccacccttgacaatttctccttttccttaacttttcaccaatgccttcgattatctacttatttaagctgattaatacccatgataacttaacaagtaaagtccagactagcatcagtgatcccaactaactaccaattttcaacttctgattccgcaatagctaaagatttgttgcaactcttaatgatttatttcccttttcacgcctagaccttggtacactgtatttcatacaaatgtcattattgtccttggttcaaaattaagaaagacactcactgcaagcaaacatggtagattccctaaaaaaaccaggctttgaagaaatgcgtcctggggtgaaagtaccctctaaagaaacccttttaacaccccggttttacacaaccgattttgatgaaatggcgcggatggatatctccgtcaacgaagacgagttaaaagccatccttgaagaattccgggttgactataaccgccatcactttgtccgggatgccgaatttgaacaatcctgggatcatattgatggggaaactcgccagttgttcattgaatttctggaacgttcctgtactgcagagttttccggctttttactttacaaagaactcggccgccgcttaaaagataaaagccctgtattggctgaatgctttaacttaatgtcacgggatgaagcacgtcacgcagggtttttaaacaaggcaatgtcagactttaatctatccttagatttaggatttttgaccaagagccgcaattataccttctttaagcccaaattcatcttctacgctacctatctttctgagaagattggttattggcgttatatcaccatttatcgtcatttagaacaacatcctgaagatagaatttacccaattttccgcttctttgaaaattggtgtcaggatgaaaaccgtcatggtgacttttttgatgccatcatgagagcgcaaccccaaatgctcaatgactggaaagctaaactctggagtcggttcttcctgttgtcagtatttgctaccatgtatctcaatgatattcagcgtaaagatttctatgctgctataggtttggatgcacgggaatacgacatttatgtgattaagaagactaatgaaactgctggaagagtcttccccgtcatgttagatgtggataatccagagttttacgagcgtttggatgtttgtgtcaagaataacgaaaaattgagcgcaatttccaactccaatacacccaaattcctgcaattcttccaaaaactgccaatttacatttctcatggttggcaattgttaaacttgtacctaattagacccattgatgcggtttcgactcatggtcaagctagataactttacttaaatgtgtaaaaacaccagtggttctgttgttaacagagccactttttttagcattttgtatgtaattttagggagaaaattcgcaaaattgaacgtcagcagttgtatattaactaagaaatttagatataattcccatgcttcagagtttgactaaaaaactaccaatattagtatctttttgcttagtaaatagctattttttacctgcgatcgctgtagatgtttgtacagaaaacctaactaaaggagaatataaatactataacaggaggcaggaggaaaagccttattatatctaggtttcaaggattaataatgtcctaattattctggctacagctataataaaattagcgatcgctatcatgactcagatcgaaaacgagatgttctttaggtgaacgttctgcccaacaaaaattaaggtggcaaggttcaattcggagaaatagataatgagtaaataaatcagttataatcagttattcactcttagaagatttactttgttcgccaactatttggtaaagaacactaccagttaagtctagcaattggtcgagaaaaacaccaataacagcgatgtagagtaaagcatcaatgatgtatcgtgggttgttgactttataaccattccaaactaaaaagcccaacccttttgaacctgcaagcatttctgtagcaatgactgtaaaccaagctatccacatacctagtcttaaagctttaaatatgtaatgaatagctacgcgagagttattatcttgttggcgaaatttatgaatacctgtggcagtttccacaattatcgcccaaagaacaccaacaaaaactacaaaaatagctgccgtttcattttctttaaataaaatcagcgcaataggtaaaaaggcaatagaaggaatgctatttgggatttggaataacctactaaatagctgataaactatgccattaataccaataacaaaaccaatgaatatccctaaaataacggctgggatataacctacaaataaccgttgtaaagtggctacaatgtctactaagatactattttccattcctcagttatgatttgaaacgtcgtgaagatgaataagtagtaatgctcaatacctgtggaagggaaacagaaaaatctgataaaaacatctaactaattagagtaggagtcaggagtcaggatcaaaaccagctttgtgtataggtttcaatttaaattatgtacctaattgatctgcgctctgctgttaaatctaatttaaatctagtgaaaatctttcaaaaaatcaagttgtaatttctaaattaaatattttttcaagaattaaattttatgctgtaaattatcaagagttaataacatattaaggatgaaattataacatttaaattccatcctttatgctaaatcatttacccatgttgcgtttcatttgttccaactcatcttgcgtttcccaacgacgaaacttttcttctaaatcatcaaactggctagaataactactagctggagtttgccaagtattggtttctaaacgttgctgagtttgggcttgtgcgcgtgctttttgcgcttctgctgcttttgcttggacctcttgacgacgctgttgaattttgcgtagtaattcttgagattgggtaatgcgttcttttaaaccttgcatctgtccccatttttgatttccttcccgcaaaagtgcgtcttctcttgcttgtgctggtatagctaaatcttctctacctgcggacttggctttttgcacacggatatgccagcgttgtatttcctgtgctgtttctagtatttcatcttgcgatcgcttttcttgtaattttaaatctgcaatcaattttagtgtatcatcttcttgctctcgtagctgttctgacagcatttctaactccagatgggggttatttcgcaaaaattcttctaaacgtgcttctaaaaaccgacttaaatcatcaaataaacccactgtgagaactccaaattaaagtggtgtgattattttattgtaataattattatctacaatggcatttacaaaagctatcagtaatcagtaatcagctattctctagagagagattaagttaataacaaggatgctctcggtttgtcaaattacaccagtgttaataatagcaatttacaacctattattgatggttttagggtcttgctgatagctgaatgctgacgattagttttacacttttatcctattttaatcacagttttcgctagtacagtatcaagggattccttttaaacttaataaagattatagaattaggagtatagcagttaccagaaaatgtaggatatgcgctatcaagttaagttgaacaaaatagatcaagtctatgctatttggtgtcctgcattacccggatgctggactgtaggtgatacagaacaggaagcattagaaaaaatcaaatatgtgattaaagactacttacaaggatttgatgaaattgctaaaaatgccgatttttattatatagatgtaccgtgaaaatctcattagtattttgatgtttgagttatgtttgagttatgttttaattatgttttatttacttaaattggtgtcaaccaataagtaataccgcttattattttttcctgtaaaccaaattttggtaaactctcttcatcccaacccagataagtccagtgaggtacatcttttgcaacagtttgaaaccaaccattttggtttaatgcttctctttgttcttggttagatactcttaaatcaagtgctaaaccccagagatgttgtgaagttcctggaggtgcaactacactgagaatattagtttcttttccttgttttacttgttctaaagtttggttatttgtatatttctgccaaaatcgtaaattggtagcaaaactacgtgtacaatcaccagaataaccagattttaaaggtatatctatgatatttctggcttgattaaacgcatctgcggcggctttctgcaggtaacattcttgtgtaccttcaactagggttagttgtagattatcctgaatttgtttagtatcctgttcattatctacaatgacttttggtggcagtttaatttctggattttgattaataaatattgcaccataggcacgaagtaagatatattcataggtgttagtttggggaagattttgtagttggtaatttatagtatctaaaaactttttttgtgcgtcaaattgctgatttggaataaattttgatactgatgactcaggattatctttgcggatggtgatcaaattcggcgatggttggttatatctaagatagaggatagtaaaggtactagaaaatagtaagataatcagggtggttaatgaaatttgtattaaatattttttggttttaggttggagtctcatggttgaagatatttttgatatttattttgatattgatgattttagcctatatcaaaaatatgttagttcaacattaactaaatcaggaaatcaggatttattgttggaatttttactattgtaataactttaacctgattaaactacaaaattctataaaagtctgaaatgtaggaagatgggtattttcagattttatcctatctattagttgctgtaggtagaattgtttgactacatcaccaggatttcttttagaatagtaaatattttttactcgaaatagttcttttaaatatgcttcatgaaattgagcatgagtgttaaaattttgatattgtcccattagttcaggacaatctatcgaaacatcataataacgagtatattctaataatggtttatcctgcgggtttctagtgtatattttacgatttcctaaaaaccaagtttctaaacaacgattttggataattattaccatttcaatattatccatgtctggtttttctcttttcagaaaatcgtaaatttcttgtttaatttcactaactgtattttcttccgcatctaaacaaagcacaagatagttatattttccattttcttgaatatctaaaatagcattaggaagatgatcataaattatggaaggatatccattagcactgaacaaataaaagttatttttatctacttcatcaaaatttttaacctgttgtaattctggtaaaagatgttttaaccaagctggataaactttgttttctgttcttttaccttctacaagaaaataaaggttcattatgctgtaattccttccttgtattcctcaagattcattaattgcataaatgcttgatgtctagattttcctaagtttaaatctttcgcatctctagcagttactaccccacctttgcgggtgatgattttccaatgttccatcccaatattattgataatgtagggatggtgactggtaatgataaattgcaagtttctattttctaaaattaattcagtgagaatatcaatacaattaacgcctaagctattttcaaattcatctattaaaattactgttcctttcgcagataaatacagttcactgatgtgcattaatgttctcatcattcctgaagaaatttggtgctgattaatccatctattaacacctttttcttgtatattaaccaaaggatattctgctataactttaggtaaatcttcgtcttgatctggttctaattttatatcttcaacttggacaaaaatatctctaaagttgtctttgatttgattgaatacttctggaaagtgattgtatgctaacgctagtttaatttgagttggtaaattactttcttgaagatcatctaaattcaaagatgaatattttttggttaatggagcatacttgataaaatgaaatgtatttatagaaattgattgatcactatatattatactattaaagctgtcttgtacaggcgaaatatcttcctcttcacttaatatcgctactgcactttgaaagggggataattttggtaaagttaaatcatggaatttaatttcttgatgatctctttgaataatcttcttatcatttgctaatagaacctcactgatgattctaaatttattttctttattctcttcatcatctaaaagagttaatgaaatctgttgtgtttcaaattctccactccaataatattctataccgttattggctgtaaaataaatttgccacttgacaccattcaatgatttgccattagctatattttgtaaagcaatgatagattgtaatatttgagtttttcctacacctgaaataccaactaaaagcgttaaatcagaaaaagtaattggttctaattgccactctagttcacggtcatagtagcttaattgattaattttcatgatttcagttgattgtacatacaaaagatatcatctaaatattatcggattttatatgaacattccagaactacatcctgtaaatccttaaatcctgtacttcagcttcgctcagtaaccagacatcctgattctgacaactaacccaaatatacgctaaaatacccacagtaactaactttttaaacatttaacttttaattcctaactacttatgaccatgcaaaatgctgttcaattccaagacgcttatgatgtgattgtagtgggtgcaggccactccggttgtgaagcagctttagctacctcccgcctcggttgtcgcactctcctgttaacccttaacctggataaaatcgcttggcaaccttgtaaccccgcagtcggtggacctgctaagtcccaacttacccacgaagtagatgctttgggtggggaaattgggaaaatggccgatcgcacctatttacaaaaacgcattctcaactcttctagaggtccagcagtttgggcattacgggcccaaaccgataagcgcgaatatgcagcagtcatgaaaggaattgtcgagaaccaagaaaatttgacaattcgtgaaggcatggtgacagatttaatcttaggaaaaaatgatgaaataataggtgtagaaacttattttggtgtcgcttttgaatgtaaagccgtaattttaaccactggtacatttttaggtgggagaatttgggtaggtaacaagtctatggaagctggccgcgcaggtgaatttgcggccgtaggtttaacagacacccttaaccgcttgggttttgaaaccggaagattaaaaaccggtacacctgcaagggtagataagcggtctgtagattacagtaaaatggaacttcaaccaggagatgaggaagttcgctggtttagttttgacccccaagcgtgggtagaacgggaacaaattccctgtcacatgacaagaactactaaagaaactcatcgcttaattgaagaaaatttgcatctatccccggtttatggtggatgggttgatgccaagggtccccgttattgtcccagtattgaagataagatagtccgctttgcagataaagaaagtcatcaaatcttcattgaaccagaaggacgggatataccagaattatacattcaaggtttttccactggtttaccggaaaatctgcaaatcctgatgctgcggagtcttcccggtttggaaaactgctttatgttgcgtcctgcctatgctgtagagtacgattatttacctgcaacccagtgttatccctcattgatgaccaagaaagtagaagggttgttttgtgcaggacaaattaacggtacaaccggttatgaagaagctgctgcccagggtttagtagcgggtgtaaatgcggcgcggtttgtccggggtcaggaaatgattattttcccacgtgaacaaagttacatcgggactttagttgatgacctgtgtaccaaggatttgcgtgaaccttaccgtatgcttacgagtcgttcagagtatcgtttattgctgcgttcagataatgccgatcaacggatgacaccattagggcgggaaattggtttaattgatgacagacggtgggatttatttacgagaaaacaagagcaaattatagccgaaaaagaaagactgcattcgactagaattaaagagcatgaagacatagggagagcgatcgcccaagaaactcaacaagcaatcaaaggttcaatcaccctcgctgacctgttacgtcgtccgggaatacactatgtagatttagaaagatacgcactaagtaacgtcactctcaaccaagcggaaaaagaaggggcggaaatagatatcaagtattctggatatttagccagacagcaaaaccaaattgagcaaatagctcgtcaagccaatcgaacattaccagcagatttagattatgcagcaattgataccctttccaaagaagccagagaaaagctggcaaaagtaagacccttgacaattgggcaagcagcaagaattggtggtgttaatcctgctgatatcaatgctctgttaatttatttagaaatccgtaaaaacaaggagcagaatgagttttccttattagcagatacaaaaattcattaaggatgggtatagtatagggtgggggatcagtatgatgaattacagagattttggaagtaaaattctgaatcatttataaatcacagtaaaatttaataccactgccaaattactgccaaattaaggttagtggtgtaatttaaagaaagtgatttcccggacatcattgggtttcctttccctttctagcagccacaaagaaaatgtctatgataacagaagccagcacccatctaatgatttctgaagcactagaggacttactccccagtgaagccctgtcgatagagacttacgctgaaggcttaatagatgaactcttcaccgatatcgacaacatactagattgtggtagaaagcgccctgctaaaaccatcagaacagaatatgtaccacataagcaaacagtggcggtgaagatgcaagaagttgttttgacacagacagtacaccgaggaaccaaagcgatcgcgcccatccaaaagccgcaaccaagtacactggttttaaatcctccctctgtcactgcaattaggaaaaggaatcaaaagcacagcggtggattaggcaacctgctcgtgttaggcttaaccttaagtgtggcaatggttggttcagtctacctagcacagccgacattattcaccaatatcactgcccaatttactccacatataccaccaacagatcaggtaaaatcaccagtaactgtacaaccagatcctcatggtgaattagttaattatatgttgcaggctttggcagtgatagaccagcaaggctctagcaatgatcaaacacctgctaaatctgggttaagtgatgttaatcgccagcaaacagacgctttgcctttgcccagtaaccaacctattggcactttaccactaccaatggcggctaacaatgccccacctgctcccagtcgagtgacaaatgtggtagagagaatatatgttcatgttcctgtttatcaagcacctccagctatacgcccattaccagaagtttccccaatgtcagcgcaggtatcaccacctgagtttgtcaaagattcccctagtaatgtgcaacaagcaaccaagcccctaccagcaaaaaattcacccacgacaactgtgaagcgggcagatgcttctaaactaccagctacagcaccaccaaaactacctgcggcgatcgcaactgcatcattaccgaaaccagaaacattaccaactacacccacaactacccaacaggtgtatttacccgcctattcagccgagttggaaggattgttagagttaggtagcaaatctgcggctttgttcaaaattgatggtgtgactcgccggattaacctgggagaaaatattggtgctactggttggacgctagtagacgtaagtaacggtgaggcaattatccgccgtaatggtgaggtgcgctcaatttatgcaggtcaaaagttgtgacagataacaagagacctgtcctgggagcagttacctgatatagttgaaaaaaaaatgctgaatcttgcaagagggagaacagcctggcgcagaactattgcttcaaaccaaaacacatttgactggagtaagcattgacattaattgacaaatgtcaacagtaagtatcaagttaatgcttattcacactagcctcaagagtttttacctgagtttgtaattcttctactacttgtaaatgcgatcgctctaataaataaccagcccaaacaaagctgccagttaacactgtcactactaccactaaaacaccagttaacaacttaacttgagagcgaagctgtttgacttcatacatctgattttgagcttgatcaagagaatttaatttagtccgttggacttctactactatctctacttttggggtttcaacttttttaaactgaatttggcttcgcaaccaatctgtgatcaatttagggcaattcttcttaaaccattgccaagcaatcatcctgaatgcaggtttagacattttggaaatccatttcagggttctattgagagtgcgagactggaacttttggttaatcaaattagttgacccagcatcatagagacaattcaagatcagcttaactgttgcttcctctctgtaaaccatattttccaacaaaagcaggacatcttgtataagttgttcttctctttcggcttctgtaggcaattttgttaaatcacttgatggaggcaattgtttagacatattaactgtataaattcttaatttttcattagtgctttcctttaactatactgacatcagaaagtatttgctatttcctggatacgttaagattcaatttcttcacaatggattaataaacgttccaaaccttcagccaaagaaatcaaatcttgccaagaggaaccattgactagattttgagcgtgtgctaaacggttccgcaaattttcagcagatttgagaaagcgttcaccagatcgttttgactttaaccccaatttatcaaacagttcaggttgatttaataccaattcccgcttgtcgcaaaattgcagataatctaataaatctgtggcttcatttctttcttgactttcacgccataatttttgagcagcttctaagcggtcaggtttaagaactttttgccatgaatcttggggataatacagccgcaccagtcgtaacaaattcatttctagcagcgttaccaacccaaacagcaacattctgactggtgctttctgcaaatcaccacaagtaataatgccactaacattattacagtctaatacaaataatctggatttttgttgcagaattggcaacaacttcatcaagggtgtagacatagcaatgagttcttgaggatgaaacacttgttgatagtcgctgcattttcccgattggttttctcgtaaattttctcttaaagtagaacgttctacataacctgtaatactatcttctgtttccactccgacaacatcaaaatcctgcaactccatccaatttataatttctctcatatctgcatcacctttgacggctttgagaggttcggctacatattctatggtaatactgttgtcaaataagctgcgtaaatcttgagaacgtgactttagctgtttcatttgtcgttaacaataagacttgaaactagtatttcatgaaagtctgcattttgactgttaacgatattgcaggagtcgtaggggcagtcaggagtcaggagtcaggagtaaaactctgttatttattcaaaaactacggttttattaccatagactaaaacgcgattttgtaaatgcgatcgcactcccctagctaaaacaattctctctaaatctttaccttttctaatcaaatcatctacattatcccggtgacttaccctaactacatcctgttcaataattggaccacaatctaaatcaacagttgcataatgggcagttgcgccaataatctttacacctctttcaaaagctcgatgatagggattcgcaccaataaatgcaggtaaaaatgagtgatgaatattaattatttgcgggaattgctgaataaaattatcagttattatctgcatatatttagccaaaactaccaaatcaatattgtagtgacgcagtaattctaattgctttatttcctgttcttgtttattatctttagtaatgggaatgtgatgataatcaataccaaattgtgctgcaacttcctgtaaatggggatgattactaataattaaaggtatatctgcattaaattcctgtgccttttgccgccaaattaaatctaataaacaatggtcttgacgacttacccaaattgcaattctgggaacagtatcagaaaaatgtaattcccatttagcgcctaaaggttgggcgatcgcattaaaagcagcaccaattaaatccctgggtaaattaaaaccatccaacagccattctatacgagtgagaaataaaccagcttcaaaatctgtatgttgatcagcatcaataatattaccaccattagcataaataaaattagcaaattttgcgactaatcctttttgatcagggcaagaaatcagtaaagttgctcttgggttcattttgtttgggtgatgggtgatgggtaataggtaatgggtaatgggtgagagtagttaatattaattattaattatttagtatgggcaggattaggatctatgggtattggtacaaggtctaatttagtatcttgttcagcttgtttagcaccttccgcactaggttgtttaccagatttttcagtgttttgttcattaggttggttagcagatgcttgagatatttcttgccattctgataattcccgatttacagcattagcaaaatctttagaaactaataaaacctgaatatttccattattgtcgatcacaggatcagcttgggcgtataagaaagtattgttaaaattaaatttccctaaaattacttgatgcgttttttgatttttcagtttaatatcaatagtcgcttgaggtttatctaaaccaaattcactcaattgattaggtgaaattgatacactactttcacttttacctttaaccaataaatccgttaaataagaaactatagcctcttttgcaggttctgggttaggagattttggtaatttaattgaccattttggcgcttctagtttctgactccgttctaaatttaaagtgtagtccttcgttttaatatctatagattgaacatcctcaacattaaatgagaaaatctgttgtttagtggtctgagtttgttgattttgctgatttacctgatttattttattgaggtgattttgtgcaaattgttgtggttgatttttccgtctaatttcatcaaaatagacaaaaccacttaaacccaaggctaaaattactaaagttaaagttgtgcgtttcatttggaaataggtgacaggtgacaggtgacagagaagaggaagcaggtgaaacaggtagataaattcataattatcaattatcaattatcaattatcaattaccaattatcttcttttccaccaaataatagcgccagtagctaaaccaatgaaaggtaaaagcaacaaagaagaaatacttaataaatttgcttttgcagttgacatggtgatgcggcgatttgtttgttctttgggacgaattgacagcggttgttgatcttcttgacttaaccaagttactgagttgagaaatacatctccatttaattgttgctgaaataaaccatctctagcaaaatctgagtttccaaacactactaagcgagattctttgctttgattttgagaattttcctcagttggggaagcggtaggtgtgggggtaggtgtgggaaatggggaagcggtgggagatggggtagatgtgggagatggggaagcggtaggtgtgggagatggggatgatagctttctagttaatgctacacctaaagttaaaggaccttttaaatcttgaccttcattaaactctaaattttcgttttgttggtcactttctgcccaactattaggatatgatttagttctgagtaaaggagtagattgaatctcaggaattggttcaatgagaataggacgtgcgaggggatagaaagaaataccattaccaaaatctttagtgatgggatgttgtccatactctgtaacagcaggtgcagcaggtcctagtcctaaagttgttccagaaacatcaacagctaaacgattatctagttttacaccccaatcttgcaataagtcatcaatttttgggtcagtattagggtcaaccattaacattaaattaccgccacgattgagataatcttctaaagctgtaacttcacctgctaataactctcgttttggaccagcgacgacaacaacagcagcatcttcagggactgtagtttgttctgttaaactcagaggtaaagctgtaaaatttttgtctgctaatccttgaatagcttgagaaatagcatttttagcatctgtaaattctagttcaccgtgaccttgcagaaagtaaactttagcggtattgttactagttatttgttgtaaacggctagttaatcttacttctgatagacgttcatattcattgacagtttgtactaattggcgcttattatcaaattctagataaacttcgccaaaagctttcacaccaaatttttctgctagtcctggtctggtttgagggtcgatatattcaaagttaaacttaggagtttgacgacgataattttctagtaattgttcatcttgcaaattttgttctctggtaaataaccagacttttgcaggtttgggtaaggtacgcagtaattctttagattggggtgcgagggtaaataattgagtttctgttaaatctaatcttaactgataccgtgtacctaaaaaattgattaatcctaatattgttaatactgccaaagttgccactaaggcgttagttgtagatacggtagaacgttgtttccaaaattgatttttttgggcttggaaaaatacccaaccaatgcaaatcaaaagacctgctatgataaatactagaggtaatatatcccatttatctaatattaccccgactgttaaacccagagttaataaaaatggaccaaagaaaaataggagattagcgaaattttttttaggtatttttttcattattggtgattggtgattggtgattggtgattggtgattggtgattggtaattggtacaaacttctttactgtcacctgtcacctatcacctcctaactattgacgttgaaaacgcagtgcatctattgattgggcggtgaggaaaattcctaaaataatgtaactaacaaataaaattaaggcgctactatcaaaaattccttgaattaatgtgttgtaatgtttgagtagggatagatgagctaaactgtctcccaccggaccgggtatagctttggatatggaatctattaataatagtaatataaccacaaaaaaggtaagtacggctgataaaagtgtgctgtctgttaaggaggaaatgaacattcctaatgataaaattgctgctgctaataatattaatcctacatgaccaagaataggaataactggagacatgggaggattagaaccgctaatggctagggtttcaaatccaagtaatggtaataccattgtcataaaaaatgttaaaactcctaataatttacctacggctacagcccagttagtaactggtgatgtggctaataattctaatgttccccgtttgcgttcttccgcataaagtcccattgaaagtatgggtaaaataaacaataataaccaactgattctatctaaaaatgcccggataaattcatagggtacatctatgggggggacgggtactcctaattgttgtccttggatatctaaatctgcaactgtgggcaaaattccccctggacctattaaaatcatcaccaaaaataagccagaaataaaccaaaagataccagctataccataagccaagggtgatacaaaataactttgtaattctcggcgataaatggcaattatattagcgatgacgatacccattttatgcgttttctccttctgtttctggtgtgttttctaatgtgttttctagtgtagtttctggtgtttcttttgctgggggaagtaaatttttctcttcggttgttagttgtaaaaatacatcttctaaactagcactaacccgccgcatttcatataaatcaaatcctccccgaattaatgcggctgcaatatcttttcctggttctgtgcctggttgagatataacacgcagtaggggacgatgatcatgacttatcggcattgattctaccaaaattacgtcctttacattttgtaatacctgttttgctagggtaacttctccagaaatttctaactcataacccgaacctccggttaactgtgtcattaaattttctggggtgttggtagctacgactttaccacggttgatgatggctacgcggctacaggtcatgctcacttctggcaaaatgtgggtagataggatgatggtgtgtgtaccggctagacttttgatcaagtttcgcacgtcgataatttgccgggggtctagtcctacggtgggttcatcgaggataatagctggaggatcatggactattgcttgtgctattcccactctttgccgaaaacctttggaaagcttgcgaataatgactttacgcttttcttgcaggttgcagcgtttcatagcagcttgcactttttgggggcgatcgccagcagatacccctttaattcgagctacaaagtgcaaaaatccctctaccgtcatttcggggtataagggcggtgtttccggtaaatagccgattttttgccgcactgctaaagaattttcatggacatcatacccggctattttggctgttcctttggtcgctggcagataaccggctaaaatccgcatggttgtggttttacctgcaccgttgggacctaagaaacctaaaatttctccaggttctacgttaaaggtgacatcggttatcgctgcggtagaaccatatattttactcagatgttcaacttctatcattgggatattattggtgtgatatgtgtgatatgtgtgatatgtgttagcgatctcggaatactaggaaggaatttcagttaccaacgtaaataatattgacattttctctagattattggggacttgtgaaaaatataatacataatatatattctcgatctaagtttgaacctttactagttacccaaaccattaaaaatagtcactttacgttttataaaattagataaaattagaattgttgtcatattctctatttgctaaagtgtctgaatctttacctttgcgcgatcgctacctggctttaattgatcaaatagtcgaaaccaccctcaaaggcaaaattagctccgtagaacaagtgtatcaactcttacttcaaggcattgcttccggtacgggagaagtgtttgagttagctttgagcgatcgcttgaataccatccaaacaaaagtagacagcgaaacagacgaactcaaaaaagccaaagccacccgtagtttaagagcagttaaaactattcaaacacaatggcaacgctgtcaagaacaaaacaaaaccaccgaaatcatagcttcagcagtacgggaaattaccattgctagtaatgaggagcgtttagccgtattcctgcgctacaccgatcccaatcaaaaatatcccttaaatttatcacaactacaacaaatagccaaatccttacagcaatttggtacagctaactcagatttaacacagatatccacaggtataactcaggcgatcgccgcttggcaacgcatccaagaaaacctcctcagttggatgtatgaacaaaaaacctctctcggttttggtggtgtaccaggggaaaaaggaccttgggcaagttgggcgaaattagtcaaaagcgaaataccgcaatcattttttcagactttagcaatagaacaatctccaatagaatttacccaaaaacaacaaaaccttagcgtcagtgattgggtagaattaacaatagttttgcaattcttacaacgaggtttagttagttggtttgataaacaagcttatgatattcaagcaggtcccaaattatcaatttccacatttttaacctttgccgtcatttggagtcaactagcaaacggttggcaaaatcaatcaataatatatagtaatggtgcttcacaaataatgttacaaattttgcgaacctttgcccaacgtccctattttcccatgtatggtggaatttttgcttctttttctggtagttatttacgagatgcactcgattatttagatgaacctctacgttcggcagcaggaacacaagaaaaagccagaattttaacattattaggttactctcaacgagctttaggcaattatccgcgctcaataaatttccatcagcaagctttagaaattgccagaaatgctcaagatacaacttgcgaaattgctaatcttaaccacctcagtcgtacctatgtccaagaaaaaaattatgctgaggcaataaataatagtcaaagagcattaatattaagtagacaaacaggagataaaaccggagaaactaacgccctggtaaacttaggttacagcgaagtaatgcaagcacagcaattagaaaacactgaaccagaagtttatgaatctgctattaattatctagcacaaggtttaaaattagccgaaaaaattggggatattcaaactcaatctttatgttttagtagtttgggaattgcctatttagtcacttctcagtatgaagaagccattaaatatttagaacagggttttagaactgcccaagtttccggtgatttatatattcaaggtcgaaatttagcttatttagcagaagcttattataacctgatcaattttgaaaaagccatttatacaggtagtttgggaatgtatctattagagcaaatttcatctcaagaatggcaacaacccgcaggtttattaaccacaatcaaaagacaattgggagaagataaatttcaagttttattgcaacaaaaccgccctaagatcatttctgttattggtgtagacggttatgattatttacctgatttattagcaagatattagttacaccatatttcatctggatgaggtacaccagggcgggcaggatgcccaccccacaagagttttatttttacagttattttcaggtaaataaaccacattttgatttaggtttcgcgtcaacaatgtaggcgcgttcgcgaagcgtgctggaagcatcagcattcggacaattaattatcggtttttacttaacatgaaactaaaaaaagttggggatcttatcctttaattatttttgggaagccagttaatatcaagtaattgttcgagagtataaggacaactttctggaaatgaaatgttataacctgtcttttgtcttacatatttgagtgctttttcataaattatggattgattttcctgtaaatgatttttgaagtttttggttaaatcttcattgagttgagtcctaaaactcaaaatttctgcttgccaatgattagcattataatcatattcattatgccaatattgcagtagcagtaaatgtctgataatttgttcaagaaatctttctaatgttttcttttctcgccgactcaattcttctaattcctcaattaaatgatccttgtctaatttttcccattggttttgttttaaaaatttaatcgtttgttctaaccattgatcatattcaatctcataaagagatgctaaatcatctgtgattttcattgctgatctctacctaatttgcttcttctactttcaattatttattaccttcttcaacaactgaggaatttgagcaggatattcagccacaggaacttgtgcagcttggaaagccgctaatttactttgagtcgtgccaaaattgggatcacgtttcacaacggttgctatatttcctgtttgataccaatatttgtttggtggtgcgtgtctacctgcaatataagcaatgactggtttatcaatagcttcagcaatgtatcttgcagcattttcttcactttctccccctggttggccgactacaactattgcttctgtagtttcttcctcatccagaatttgcaaccattgagaaaaggaagaaccgacaatagcatcactaccaatactgacactaatcgactgacctaaaccagctttcgttaattcccaggctacctcataagtcagggtactactacggctaacaattcccacagatccaggggtataaaattcactaggttgagtgcctaagagaattttaccaggaacaataattcccggactgttaggacctactagcaaaatttcatgactttctgtagtgcggagtaatttcaccatatctaaaggtggtacaccagcagaaataataattatctgtctaatattagaggcgatcgcttctaaagctgcatccaaaacttgataaggatggacacaaataatggttgtatcaatttggccaaattttgagatagcttcctctactaagtcaaaaactggcaaactgtagattttctttccaccacatccaggatcaacaccagctactaaattagtgccataagccttcatttgagcaatatgagttgctgatataaattcacaaaaaccctgaattaaaactttactgtctggttttaagttcataaaatttagttattgggaattgggaattgggaattgggaattgggaacagggaacagggaacagggaacagggaacaggaaaagagaaatttttaatttttaatttttaattgctttgttacctgtcacctgttactacttcttgtaagctggtaacttagctagacggactgcttgttgaacagcctcatctaaattttctactactatcagcgtctcagtttcagctttgagttcagctaaatatctcctagcttgttcaaaatcagcaccagcaagacggacaaccaacctgggtaagtttttcggtttatatttacttccgttagacgtataagatttgagttcttttggatctagttggataaaattagcaattacttctggcatctgagaaacttgaggaatagaacccaaaaagttaatcagaatcacttgaatgcttttatcagcagccaacatttttaaaccactttccaggcgatcgcaaaatgtcgtcggttcagtatcagtcaagaaagaatgtcgtaaatttaaagatacacctggtttaccacccgcattaaaaactgcatccaaggttgtcaacaccgaacccgtaccattgcccaatatacctattttgccgtgtatttctaacccatcccaattacccaagatactgttgatcttgctatttttatgacggccaatcatttttgccgccattttggctatttctggatgtcggttaattgctctttcattaactctaactttaccattgagtgccataatttgcccagaaacactaacagctagaggatttatctctactaaatctaagtccttctgcacaaataacttatacattttttctacaatatcacttaccgactgcatcagcgcaccctgtaagcccattttcaaacccagtcttctggcataaaatggcgaaaattcctgttctaccaccacatattgcattttctcccctggagattcccaatcaatatctggttctttgcaacctaaaagcactggacgacagatagcggtatctaaaactacggccagataaaattcatccttggcatcatacttagtttctgccagtaaaacctctggcaattctcccccaattggtaaattaaagatattttgggcagctgcgatcgcatcaatggtggtttccacaattctgactccaccagctttagccctgtcatctgcgtgtacttgcgatttgagtacaatcggatagctaatttttaaacgttttaaatctgtaggatggtcaattcgttgagatggtaaaacaggaatgcccatcttatcaaaccattctttaacttggtactccaataaatccattggtacacaccttgtattaacaatttcaaatctaatttttattgctgtctcatcgttcccacagcactttatttatataatcacgcttcggttggctagaaaattgatttggcaagaatcaattttatcgaattaagtataagtaatagtggtacactcaattctcaaaccccaactgctgctatttggttgattagaccttttgatcctccttggtcaacttgccagtctaaaaaattacttggatcttcttgtatattttttcctggataatttatactcgcatttgtattgtctaatttatgatctagtagtataaaaaagcagaatcctaaaccattgctgctcactcgctttctagtaaaagatggaactttgtgttcaaaactagttctctgggacaggaaaccaaggttcagccttgagcaaaatcaaatacttatatattaaaacaccagtatataattgggttttgtcaaacagttagtaaaaccatctattctgaatgtgacaaagaccagaactttatttcatctactccaagataataaaaactataaaactatatacaacattagcagtagacattatgaaagataaattcccaaaagaagatatccagcatttaaccagtattttacaagaaaaactactggtagaacttccatctctcccagttctccaggtgagatgcgctgtccagaaagacgaactgatgattttaactcagcacgctccaggtatagcagttgatagccaaaaaatctttgccatccttgaggaatcgctccagtggcaatctcaatatcatgatcaaagggtgcaattttatgtcagggtttcaggagaaaaactaccctatgctaaacattcaatcactatcaaggctaagaaaatacagaaagaccagcaaattacgtccctggaaacaagcaatggttttaataacggtgctgctaaaaaccagctaatttttcccccactggaaattcctgatctctcatctcctgtaaccgatgttcatatatcggatcatccatttgcttcactaacagagaaccatatcttggatcatccattgagttctcgaaccgaagaaaatatttctgattctacctttagttccgatctttcatttggctcagataattcattaaattcagataccatactaagatcagaggcattatttaactcggatgctacatttagctcagatagctcattgttcaatgagagtgagaatgagttagccgaagaagaaaaatttgacccatttgcagggacagaaagcctagcaaaacccaaaagacagccgatatcattaccactcccacctttacccatcctcttaggaggagtcttgggagtgactgtcatttgtggaggcggtgctttttttctgaatcgtgcttgtgtgattggtgaatgcaaagaattacaaacagccgatcagttaaaaagcaactctcagcaatcaatccgtacagctaaatctacacaagaactaatagcattacaacagcagctggataaagttatttctgatctcaaagtaattccccaatggtctccacgttatcagcaagcgcaggaactggctgccagtttttctaaccaattaacaaaaattaacttagtaatcaaagctttacaagccgcagccgccgcagagcaaaaaattcaaactcccgcaactagcttagatgaacttcgcagcagacaaactttatggagacaagcaattataccactggaagctattaaacctagtcatgaactacatagtttggtgcaggcaaaattacccaaatatcaaagcaatttaaaagcgatcaatcagaagttacagaatgaagaatcatggcagaaaaaacttaccacagccaaaactgtagctaattcagccaaccaacgtcaagctactgctaaatccggtaatgattggcaaagagtacaatttgcttggcaacaagtaattaatgatttgaaaagtattcccgccaccagcacagcaaatgaagaagccaaaaaactgttagcggaatatcaaccaaaactcatactggcacgcaaccgcgctaccagagaaatagcagcagcctccacttttcaacaagctaccaactttgcaaatcaagctaaagtattcgaggcgaaaaatcaatggacacaagcaatagcatcttggcaagaagctatacagacggctaaacaggtttctcaagatagttccatctataatcaagcacagtcgctcattcaaacctattctactagtttagaacagacactggaaaaacagcaactctatggtaacttggcacaaagtcaggctgatttaagcaaaacctgcgtcagtggcatacgtttatgcactttcataattgaagaacaacccaaaggacgtattattgtccgtttaaccccggagtatgaccgaagactgcaaactcctactcctgatatacaaaatcacttccaaactttgcaacaggctttaggagtcatcagtgaaaatgccaacctccccctatttctctacaattcccaaggacaagaaaggtatatgaagaatccacaatagggggactggggactggtgactggtgactggggaagaaaattttagattttagattttagattttagattggaattgacaaaaacaatccaaaatccaaaattgaattaccaattaccaattaccaattaccaattacccatccctaaaaacccaaataattttgtaaagcttggcgcatttcggttacaggaatttcttcattttgtaaccagatttttaatgctgctgcaccttgttgaactagcatttctaaaccatcaatgggaattgcaccttgtttttctgctatttgtaaaaattttgttggtttgggaatgtaaattaaatcataagcaattgcacctgaaggtaatttaaccatttcctctgcacttaaaggagattcattgacatgaggatacattccgatgggagtagtatttactaacaaattagcttggggaattaagtttggtaattcttcccaagtatgaacttgaaatttatctgcaaagggtgaattttgccaactttcattaaatgcttttaacttatatatgttccttcctactatatgaattgctgagaaacctagttgaatacaaccagcaacaaccgccctcgcagcgccaccatttcctaaaattactgcggttttctgactccaatcttgatgataggtggtttgtaaaggagcgataaacccttctacatcggtatttgttcctacccaaatgtcaccttgacgagtgacggtattaactgcacctatagattgagcgatggggtaaatttctgataataaaggtattattgcctgtttatggggaattgttacactaaaaccgacaacaccaatagctgcaaaaccagcgatcgcaatttctaaattttctggtgcaataggaaaaggtaaataaacataatctaaccctaatttactcaaagctgcattgtgcatcattggtgacagggaatgttctacaggatggccaataactcccaaaagtttagtttttccagtgattttctgaagataattattctcttgctgattcataaacatcatgttttttaaaaaacgtattgcaattatacttatttttggtaacttatttttggtaacttccccaaaaaaataacccggttgcattaaacaaccaggctaaatgccagatattaaatgagattaaatgagattcaattaatacatcaacccaaacaacacttcacacttccacttgatcactgatgatgaaatagtcaatacaaaagtaagggtaattcatgaattacccttacgcaagaatcaggtcttgagttcaatcttgcgtaagtcaagtcctaaaatatgttgactcttgtaggggtttagcagtgctaaacccctactaaatccttacctaaatcttaattttcacccaagtttattttcacaactttgttcttttcttccaccaatttgggtaaattcagatgcaaaataccatctttataatcggcggtaactttggtattttgaataggtacaggtagaggaattacacgctgaaattgaccataataaaattcacttttggttttagctttatcttcttctttgtgttgaaacttccgttcaccgctaatagaaactgcatcttctgtaacttgaatatctaagtctttagcttccatcccaggaacttctaacttgagaattactgcatcatcagtttcaattatttccgcagcaggaattttcggaacattagttaactctttcaaagtattaggtataaatccttctactaaaagattaacgcgacgttctaaggtgtcgatttctgtccaggggttgtaacggataactgtcatatacttttacctctatattgttggttgtttcttcgtttgagttgtttttatcaactctttgattattatcttagtgaggttcaaaaataatgtaaatccggtttttatcacttattaaatgatgattaccgaaccgatattttcgattataaatattttcggtttacgcgaatatttcaggttcggtttacacgacaaatatcaatttaaaattaaccagatgggtagctttgatcaaaaattcacctcaatacttttccgttaattttcagttaaggttttaatccccccaacctccctttcaaagaatgcctaaaaatccgtttgtttccccttttttcagggggataatgggggatatccaatatttacaatacgtcagtctcgttaaccgaaccgtattgctgtgagcttaattagtttattgattgtataaataaataaataaataaataaattgactgttaattatcatacctgatatattatacaagtgcatacaattttattgaatgattacgaaataaatcaaaaaataaaacacataaatttatacgttttaacaccatgctacctataattacggaatttagcattttgactttagtcatatttttttctctttccctgcgatacctgattgtatctttcttgttatattggttgctgtggattcgcagaccaaagtcttgggaaaatcgtcgtcttcaagatatcaatagacgtaagaacaaaatctccactgaaattaaatggtcaattttatcctgtcttattttttcacccctagttgctttgacgatgaaaatcatagaaactggacataccaaagtttattttgatcctctaggatatgggtggttatatttacctttaagcctgtttatatatttgtttttgcacgatacttatttttattggacacatttctggctacataaccctaaaatgtatcggcggtttcataaggtacatcatgaatctattaacccaacaccctggacttccttttgctttgatccatttgagagcataattcaagcaattattattccgattttgcttttgatcattcccattcacattagcatggtagttgtgttattgatattgatgactttatttggcgtgattaatcacacaggttatgaggtttacccaagttcctggatgcgcggtttttggaatcaatattggattacacctacccatcacactttgcatcatcacaagttcaattgcaattatggtctttattttcgcttttgggataagttgatgaaaacagatgtgatgaataattagtattatatactataatacgtaaaacctgtagaaatttttattttatacagtaaaatgaaaataaatacatcaaaaaacacttaactttaatttagataatgcagacaaatatagcaccctctacaaatccaatttccggaaaatactggcaatggcgaggacacaatgtatactatgtacaagcaggagaaaaacaaccccagcgcccctctttgcttttagtacatggctttggtgcttctactgatcactggcgtaaaaatattactggactttgtgcagattttcaagtatttgctattgatcttttagggtttggacgttcagcaaaaccgaaattacagtatagtggggatttatggcgtgaacaactgcgagattttattagtgaagtcattggtgaaaaaacagttgtagcgggtaactctcttggtggttatgcttgtttatgtgtgggtgcaaaatatcctgatttggttgcgggggtagtattacttaatagtgcgggtccattttcgcaaacggaaggggaacaagtgcaaatgcaacctgcacaaaatcccttacagaaattaattggtaacactgtcaaatggacttttaaacaacgtttatttcaagctttattatttcaatatgtgcgtcaacgttgggtaattcgtcgtaccttagaaaaggtttatttagataaaactgcaattactaatcaattagttacagaaattcaacgtccagcttatgatccaggtgctttagatgtttttgtgtctgtttttagcactccccaaggggaaaaagttgatgttttactcaagcaattaacttgtcctttattattgttatggggtgaagctgatccttggatgaaagcgcgggaacgttcccaaaagtttcatgaatattatccccaattaacagaatattttatcagtgctggtcattgtccccatgatgaagcacctgatcaaataaaccctcttttacgcgattgggttttatctattactaattgataattgataattgacaattgacaattgataattgacaattgattcattcagggtttaaagcttcccttttttagggtaacaagataaaagcttgccatttttccattaaatcctcttccttctagaacaccgattcattaatcataagggcgaagcattaggacagaatatgaactggtttcagcgataggttatcactcgaatgcttcgcccctacaaggtaaaaacagattgcctagcattactgaatcgacgttctagggaaagttaattgtcaattgtccattgtcaattgtcaattgtacattgtcaattgataaaaacctaaaaacctgatcagggttgaccaggttctagcgaattgattagtttcaaatttttgggattcagtaagtgattgaaattcaataactaggggtggacaatctcacaagtttagcattttcctgtttttccgcttagggatttggcgcaactatagataatagtcggaatgccactttaagttgtaaatcctaaaacttgtttgggcttttgacgggggacacttatgccattgcccgatggggttggttgttcttgttctgtgtccttctgaacttatgaatataatctagcattctttttttctgatgtaatgacttgtttacgaaagttgatattttgtttcatttagcaacattgggagtaggtgacaggtgactggtgactggtgactggtgactggtgacagtgtaagagggaatagggaatagggaatagggaatagggaaggttaataaaccaattaccaattaccaattaccaattacccattacccattaccaattacccattaccattcccacataattccggtattgtcgaaatggttggttacaatgcggccaatattgtctatttgggctatttcttcagcagaaagtttgacttctgcggctttggcattatcttgtgcttgttggggatatcttgcaccagcgatcgcattactttggggttgggctattaaccaggctaatgctaactgcgctaaactacaattatgtttttcggctactggtctaagtttttctaaggcttgttgagcgcgttcaaaattctctccttgaaataacttattttgcgatcggttatcttctggatcaaatttatgtcctggggcaaatttaccagttaacaatccttgtgctaagggtgaataagccaaaattgaaatattattttctacacaataaggcatggcatcggtttctacattgcgccaaaatagagagtaagctggttgtaaactatcaattctgccatattgggcagcttctgccagttgttcacgggaaaaattagaaacaccgatggcgcgaattttaccttgttcttttaagtgatttaaggcactcatggtttcctctatggaaacgatttcacttttaaaagaaccagatggccaatgaatttgataaaggtcgatataatcagtttggagatttttcagggaacgttcacaagcttctatcacttgttgatatttgagatgattggaaaaaactttagtagcatattccacgcgatcgcgtacatcggacaaagcttgggctacaatctgttcagaatgtccatcaccataaatttcagcagtatctatagttgttattcccgcttcataagcagcgcgaatggttttaattgaatctgcatcttctattcccacccacattcttttccctgcttgccaagttcccattaaaatgggtgtaattttaacggtggatgtacccagtgtgcgtttttccatagttttgccgtagttttgctgtaattttgctgtaattttgctctaatttctgacaaaatctgatattgatgaggaaaccattaaacttttaacttattacctgtaacctgtcacctatcacctaataaaagacgctcatggaactgactaccacttttcacgctctcaaagaatggtctgtagctgtaaatgctttagaaagtggacaaacaattatgttactacgtaaaggtggtattcatgaacggggaggacgctttactgttgctcatgaacaggttttactgcatcctacttacgagcatcaacaatcttttatgctcaaagctgaatatgctgatttggtttatcccgttacatcaggatggcatccagaaacaactcgcattggtagttgggcggaaattacggatattttacctgtagcggatgagtctattgtgagtaaattattgccttttcatatttggaacgagtattttattagcgatcgcctgaaatggaaaacacgtcaacctttatatattctgttattacgaacttataaactaccccaggtgcagtatattccttatttgcctgaatatggtggttgtaaatcttggattgatttaaatcaacaagtgcggttagaaggttcaaaagcggttttatcagatgatgtttatggtaagttagttaaaactattcgtgggattattggcgatcatttgtatgctacatctttataggtaggagttaatgatttacaggatgtggtgattttgaggattttggattttgtctgaatcaggatatccaggattataggatttttaggatgtgggttttttgtggtgattttgatgagttgggattttggtgatttcatgatttacaggttatttgattttgttaattttgtaaattaattaatatttaagttgactaattactaaattttgttattataaaaaaatacagaagtgttgaatgttaagattttgaggattttgtccaagttgtgcattggtattggtgataccaaatttgagcaattaatgactctattctcaatagacaatggattttacctgggtaaaacgaaaagattgtaaagttttattgcaggattcaacacttgtgaaaaaaatataaataattgagcagataaataaaatattaaacaccaataaacaactaataaactacatcctgtacatcctaaaatcctgaacatcctgattcagaaaaaatcaaatctcaaccaccaataaacaactaataaactacatcctgtacatcctaaaatcctgaacatcctgattcagacaaatagaaatcttaaacaatcaaaaatcatcaatccaaattctggacatcctgactcctagtatacaatgaaaataaatcaaccagaggtaatctaaatggcaacccaacttagtgaaccaacaactgcaccgaaaacagtcaaacaactggtaatcacttgggaagctttacccgatgattttcagttagaggatgaaccggtggaaaatacaggacaaccgcttttagcaggtgcattacgggaaagtttagaaatagcaggttttatcaaaccagaaatgttaatagtttctaattttggactttgtgcgacagttaatggtgaaattgttgttaaagcaccagattggttatatataccatccgtgaaagaagttttaccagaacgtagaagttatacatcatatttagaaggtgaatttcccttaatagtcatggaatttttatctcataatgatggtggagaatattctgttaaacggagttatcctccgggaaaatggtttttttatgaacaggttttacaagttcctatttacgtgatctttgaacctgatggtggtttattggaattttatgaattaaaaaacgaccgatatcaattgacattaccagatgaaaatggtcgtcattggattgaaaacatggggttatttttaggaacttggcaaggtgaaaaagaaggtagaaacggttattggttaaggtggtgggataaagatggtaatttgttaccttggggtttagaacaaattgctaaagaaaaagaagttgcagaacaagaaagacaacgtgcggaacgagaacgggaacgtgcagaacaagaaagagaagaaaaggagagattaatagcttttttagtttcccaaggtattgatccgaataatttacctacttaaaggtaaagtaaacatttgatagatcccggacttctttaagaagtccgggatctgaatcttatacatgaaatgtcagattttttatcaaagttgcaattttactagcaattcaatataaaatctaagattcaaaatctaactatcacaccatgacaaatctcactcctaattctagtttcagtgtgacactacgcttacaaattcccaaccgggtggggatgttagcatctgtaacacaggcgatcgcttctagtggtggtaatctcggacaaatagatttaattgaacaaaaccgccaagagtctatccgtgatattactgtagatgcagcaagtacagaacaagcggaaactattgtgcaagcggtaaaagagctaattgatattaaagtcatagatgtttatgaccggacttttaatttacatcggggcgggaaaatcagtattgctagtagaattcctttaaaaagtgtttctgatttagctatggcctacacaccaggagtaggaagaatttgtaaagcgatcgccgaaaacccagaggaagtttaccacctcaccattaaacaaaacactgtcgccattgtcactgacggtagcgcagtattaggtttaggtaatcttggtcctggtgctgctttacccgttatggaaggtaaagccatgttatttaaagaatttgctggtatagatgctttccccatctgtttggatactcaagatacagaagaaatcatcaaagcagtcaaaaatatcgcccctgtatttggtggtgtgaacctcgaagatatagcagcaccccgttgttttgaaattgaaaaaagactgcaagcagaattagacattcccatttttcatgatgatcaaaatggtactgcaattgtcactttagctgctttactgaatgctttaaaattagtcaataaatcaattgcaaatatccgtattgtcattaatggtgctggtgctgcggggatcgcagttgctcgtttactcagaaaagccggtgcagaacaaatttggatgtgtgattctaaaggcattatctctattaatcgcacagatttgaacgacgaaaaaagagaatttgcagttaaagcacaaggtactttagcaggtgcaacccaaggtgcagatgtgtttattgggttgagtggacctggagttttaacaccagaaatggtacaaggtatgacaaaggatgcaattgtgtttgcaatggccaatcccatccccgaaattcaaccagaattagtacctaaaaatgttacagtcatggctactggccgcagtgactaccccaatcaaattaataacgttctggcttttcctggtgtatttcgtggagcgttagattgtcgagcaaaaacaattacaactaatatgtgtttagaagctgcaaatgcgatcgcttctttagtcaaaccttctgatttaaatcgagaacatatcattccttctgtgtttgatgagcgtgtttctacagcagttgctgctgctgttaaacaagctgcacgggaagaaggtatagctcaaggttaataaaatgacaaacccacttatgtgggtttacaattctcatatatgttcacgacaaaacagccatgaaatactcaattattacaggtttattagctggaacgtgataaatttataatacaccaattttgatttatttcaaaatagagatgatttacacatcatctctacaggattcattcctgatgcaaaaactccaaatatcccttactcaactcctccacagctacatcataaaattgtttaccatgttcaggagtcgctaaatcaggatttgaacccatgcggccatcaggataacgggaacgaaaatcaacagcaccataaattttatgaccacctgcaacctctggagataaaggagcttttttaatagcttctggatagacatattgagttacagcaacttcactaggggtagcatgagaaccttcttgatccccatacaattctttcgctagtttatatacagaaccacacataaaccaattagcaatttgacattgtactttttggtagttttgaatttgtaaatcttctaaatgtgcgtaggtttcagaaaaagcagcttttacagtagcaatatttccaccatgtccattaataaaataaaactttgtaaaaccagcttttgctaaacaggtaatgtaatctttgattactaaaattaaagtgctaggacgtaaactaatcgtaccggaaaaagcagtgtgatgtaatgccatacccacattaatagttggtgcaaccatagcttgtgttgtttcccccacaccacgggatatagcttctgcacaaatcgcatcagttccaattaaaccagtaggtccatgttgttcagttgaaccaatgggaataataattccctgagattgttgtaaataaatttcaacttctggccaggtgctgagatgtaataacattttgtgtaaatcttatgtaaataggaaaatataattatagcagctatatatatcagttcttcctgattgatgaatatttttacaaatgatttttaagctttaacttttaactggtaattgtaattgtaattatttgggtaattatttgggagtcgcaacaagtgatgaaaatattgaacaattaacaacttgaatttacaatttgcaaattattgcaactggagttgatcaaactcgttgcgaatctccagacaagacttactccaagtaaatgatgaaatgtttgttttgtaaatcgtcaactataccaggagacaaagatcataaatcttgactcttggtgcagaagtgccgaattaattaaaggaataatgtttttttacgtccttgataatttcccatgtacaagacatcccagcagtaaatgttactaaatctcctttacccatttgcactggttgtccgccatcaggggtaacaactacatcgccttctaaaaagtaacaagtttcttcagaatcataagtccaagggaatttggaaacttctttttgccaaattgcccatttgtatacacctaaatgattgaggctctcttgactcggttgatgctcgatcttaatttccatttgttgttgtatctagggtgatttagcagtaggattgaatatcttcgccacattcatctactaaataacacaatgcgcgaaaacgcaagcctacaaattgttcgtataggggattaagtttgcacatagggggaatgtgggcaattttgcgaccgaaaaatacaatatcacgttcaaagggacattgagcaggaatcagtttagcgatcaatttcgctagttgacgattgtgaaatttgatttcatctaaccattgacgtattggttgtagtaaatcagatttatgacttgtttgttgggttgcttcgatctggctaatcaagttagggaaaatgatagattgagaatttgtggtgatcatatttctacatcctgttgtctttaaattgataaacttgataaacttctgccattttggctgatgaccatgcaaaatcttacagaaatctgcgttgccttagtaattctagatcaaaaaattgcaattggaatatcttacaagtaatgggcagataaattccttaattaattgctatttaaactcacggtgtgttgaataactgtcccgttaaatacaaaatagcaaagaaataataaaaatggtattaccttaacttattaattactgatatcgaatattgtgatcccatatatcaatcccaaaagcttggtgggaaaactatacagtgttgcaaattgtcactgttctcatcaaaatataggttgagtgttgctataacgagcgtctatcaatattcagcaatgaccttaaccgattttcaatcaaattctagcctaaaaatgttatatatgttacatgaattaacctagatattatctaactagtagcaagaaattctttgataagaacaaactaacagactggtaaaattagtttataaaacacaaaatatgttatgatggatgtaaaaatttagctatcagtaatctgtaaatggggtagcaatttactgattgctgaattattactatgaatcatctagctttttgacgttgacaagctttgcaaaatataactagataactcaaaaaatcctgctccttcagccgcattagttacataagtaggttgatactgtaactgattggcatatttcatcacatttgccacacctacagaaataggaaaataacgactatcaaataaactttcatcattgggactatcacctacagtaacaacttgttctagtgaatattctgggaagtattcgcgtagcacttgtaacagtcccgcagatttattttgtgcttgtggtttaatgtgacattggacattactataagtaaatccccaaccctcaagttgacaaagattactgagatattgcaattcatttaatgtcaaatcagcaacatcaaatgtccaatcagtgacacgaaaccgattgtcagcagattcctgaatttgcggaaattgactttgtaatttggtaaaagttgtagctaagtcctgacgatgttgagctaaatcaggaataggtgttaaagttagtggttctaatttaagagatgaatagaacaaacccccattttctgctaaagcacccgcaactggcatcaaactactgagtccactgacccaaccagctgaacgaccggtgacaatcaatactttaactcctgtggctgctaaattctccaaagcttgcaacagtgaagaggtgaattttccctcttgagtcaaagttccatccatatctgtggctacgagacgtatattcttccactcatgagaattgctaatgtgtctgtacatagaaaaatgacaatcaaggaatatgatgtaaaaaaagattgataatacagtaaagtgataccaaatatttgggcatcctaaacattatcagtaaaatatttgaatttgctaaccatgctcagtaccatctttctagcccagtcttcaaaggctaaaactacaaaggcaattcaacaagtaccagccaatgagtctccaacatcatccttatttatgtatgccagtggaggactgctgttaggactaatcggtgtaattatttatggcaaagttttagtccataaatatgaaaaaagcgtcaaatttgaaaaatttcgcacgcgagaactcgaaaaaaaattaaagttggcactggaaaccattcgcaacatggaaaccaacccagatttggtccactcgcgggactttaaccttgattatctgcgaatgcggatgtcagaggaagtatttcattttgcgattgttaatcaaattaaaatcaaaatcaaagataaaatttctttagcactgcgcccagcccagtctcaacagggacaagtaggagttgcaagcagcactggtagacagatagacgagctttttgatgttgagtatgaaactggtgtaccacctaatattgtcaagcgagtattgtttaggattcaaattcggttaatgaagttaccaacacaggcaacttctacaactattagccaaattatggactgtatagaaacttatctgagtcctagagatgatgacgactcatggcagccaacgattcagggtaggattgtctatatgcactgggatcaaaaggctaaacccactcctttgctggttttggaacaatcgaatgaaggggtaaatgttactttccgtactactcgccaaccaaatgttgctgcaccttcagagggtccaacaggaaagcctcatgttcctccaccaccaaaaaaaacaactggaaaagctaaggcttgactcagtaaacagtttagttagtgagactctgaaacttgcgtccctaccttgtggctgataggtatattttgatcatcacgagttaacagaccatcttccatttccacgatacgatcagctatatctaggatgcggttatcatgggtaactaataaaattgccgttccttgttcttttgctagacgctgcatgatttctaccacatcacgccctgattgtttatctaatgctgctgttggttcatctgctaaaactaatggaggttgattgactaaggcgcgcgcgatcgctatcctttgtttttgcccaccagataaattgtctgggtagtagttcatcctttcagctaaccccactgcccccaacatagcttctgattttttaatagcttggaattgagaaataccctcgtttaattccactgccatttgcacattttgtctagcagttaaaaaaccgagtaaattgtgagcttggaaaatataacctatattacgccgactctgtaccaattgactttgactagagccaaatagttccttacctaaaaatttcaggcttccttcttgtacagaccgcaacccaccaatcaagctcagtaatgtggttttacctgaacctgatggaccagtcataatgacaatttctcccggatatatttctaggttaatatcaaataaaatttgttttctcagcgcccctcgaccataataatggttgatatttttaatggcaattactggttctgaagtgttcatcataggtgattggtgattggtgattggtgatcggtgatgcaatgaaaggattttggatgaaaggattttggattgtttttgtcatctgcaatctaaaatctaaaatctaaaatctaaaatctaaaatctaaaattttcctctcctgtcttccactttagaaaatatcagcaggatcggcagaacgtaattttctcatggctattacaccagaaataaaacacattaaaatagttaatattagtaccataatagcccgataagaactcataaaaactggtaaaagtgtggcatctctagcaacttggtagagaaataaagcacaagcaaatccaggaatgtatcctaaaactgctaacataaaagcttcttgcagaatgactgttaataaataattttgtgtataacctatggctttgagagtagcatattcagataaatgatctgttacttctgtatacaaaatctgataaacaattacagttcccacaataaaacccataattgtccctaaagtgaaaataaaaccaatcgcggtactcgttgcccagtagtttctttcaaaatcaataaattcttgtttggtgaaaacattcacatctgtaggtaaataagtccgcaaatatgcagccacttggttgacatctgaaccaggttttaacctaattaacccaatatcaattaatcccctttggcgattattaaatatccgcaaaaagttaacatcactggtaattaaattaccatctgcgccaaaggatgctcctaaagtaaataatcctgctactttaattcgtcgtcttctcacttctgctgtgacattttttccctgttcaaaatcactagcaattggtccatattctaccctagaagaacggtcaaataataccacatctggcattttcaatttattgatattttcttctactccgggtaaatcaaaaacattaaattctgggttgaaggcaaaagtcaggatactgcgagggcgaccagtaataggatttttccaagtggtatagtctaaataaatcggatgcactgattccactgctggcacatctaaagctttatataatcgcctttgggaaaaaggtttcattgctaatacagcattagattgattgttaattacaacaatgtcaccctttaaactgctgtgcattctgacgttactgtaatatagtgcatcccgaaaacctagctgcataaacatcaagatatcagcaaaggcaatacctgataaagccacagctaggcgagttttttctcttgtcagttgtagccaagatagaggtattttttgagtcatttaattttggattggagatgttggatttgggattaattaaatgaatcaattccaggtattatggaaatatcccaaatgtggaagttgatttttatctaataacagaaaattatcccatgaaaattattccaggctgaatttgattgaaccgcaaagacgagccagtgcgttgggcggctctgccgacttgtagcaactggcgtgcaaagtacacaaaggtaagagagttttagagagtttttggtatggctgcattgattttttctttcatggggatgctcccggtgttattaccatcaagttaatttcaaattacctggttttggtgatgtcatctgtgttaatttccacaatcactttagcgttagttaaaccagaaacttgttgactatctgcgggagaaagagcaattttgacttctacgactctggcatcaatatctgcggctggatctgtattcagtacatcttttttaccgatttttcggccaatttctgtgatattgcctttgatttgcccgctaaatgcgccgttatcactggtgatagtcgcactttgaccaacacgaactttagcaatactatcttcgggaatttcggcaatgacaaacatttgatcggtttgtccaatttctgcaatgccatttgcactcatgacttccccggatttggtgtgaacttttaaaatttctccaggggttggggctttgacataacttagttgcagttctgcttgggcttttctgacaaaggcgatcgcattactaatttgagcttgtgccatttgtacatcagtaggacgcacatctaataacctgcttaatctcgctctttcctcgtcgatttgcctttgtaatgtggacacagttttgtcgcgggtggccgtagcctcgatcagttgctgctgtaaagtagcgatagtttggatttgagtagctctagcttcagcaatttgttgttgtagtgttcctagtgcttgtctcaaactagcttgagtttcccgcagttgctgagtagcggtgacagcactcaaacgtcttctatcccgttcttgctgggaaatagccccctgttgatataaaaactcatagcgtctggcatcaacttgagcattgcgttgttcagcttgtacccggttaattgtggctcttaaactatctctttgtccactgagttcggcttctagacgtttaattgtggcagtttgggcgattttttccccacttaactcagcagcgatgcgggcaatagtcgcttgttgggcttgtttttctccttctaactgtgcttttaaacgagaaatgaccgctttttgagcttgaatatctcttggtgaagcagcttttacttgggctaaattagcacgagattcttgtagtctggcttttgcttcttcgactgcggccatgttgctgtcgcggctgtctaaaatggcaataacttgaccttgctgtactttttgtccttcttttaccaatagttgttgtactcgtgaacctgctgatagtcctgagttgggagcagctattttaattacttctcctcgcggttctaatctacccacggcactaatgctactgggagtaggggctacagatacggaggaagttagtttttttaattgttcaattctggctgtacctagaacaccagcggcgatcgctactggtaaggctatagcaactttcaaccaaacttgagatttttctagtgccgattctgttaactttggcttttcagtcacccttgacatgatatgttgcccttttatctaatttgtgatttgtgaaagtaaaaaagcaaattagcctcagttgatttggtaaaatataagttgtgattgcacgaaaaattaaagaaattcacactgttgaattcaccaaattcagcacccagataagcaaatattaagcaaatattttttattgctgatgatttatcccagcaatatggaataaatgcgctaataataatcacgcaaaaataaattaagaattgatattagaagtcggggatctgggtatgaagaagtgttacatacccctatatcaaatagaaaattcctaatatcaagattttcttaactgaattgttaacaactgaattgttaacttgtgaaccaatttatttgtttacatctaacaaaacaacaaatatttttggtaatttcctgataatatatgatgtgctacttttatttctaccgattttaaactcccatttaactctagttaaataaattctacatttattagtgatgaaaaaacgtaacgaagcttacagatagggagtcttaaaaatttttcaattacagctattttcaggtaaataaaccacattttgatttaagtttcgcgtgaacaatgtaggggcgttcgcgaagcgtgctggaagcatcagcatttggacaattaattatcggtttttatctaagactatcatccgaatgcttcgcccttactgtggtctaaagacatgaaaactgctgtaagcattcatctgtcagcagtcaatgatccacaagaacctgaaaacaatcaatcatagtctgtaaattgctctgattaacactggtgtaatttaacaaaactctgtatccttgttatactgtttcttgatgagtctgcgctaaattctctgacctctttctttgtgttctttgcgttctttgcggttcaatcatatcaagcgaggggtaattttctattgtttagataagaataaacttaaaataaactgacacatttgggatgctccctgctcttactgctattggatgataactaataactgattactgattactgatagctgaatactgacttattctggtaaatcaaataataccctagtcatgtaattttctgcccaatcttcaccaaaagctttttctagaactcgtcgggttttatcattttgttgttgttttgtacaataattatgttgtccagcaataattgatgctactttttctggtgctacgggaatagatgcgatcgcttgactacaatgaatatctaaaaagtcttttactcttcccaaaaataagctttcttcttctaaagaactgggacgaataaacaaacaaaagtcagaaaagatatttccccaatctggtaactcacgggattgggaaaagttaattgttgttaactggctgagttgggaattataaccttctggtaaaatccgttctaagttaacaggagaaaggtcagcgatcgcagcactaatttgacctctacctccaactaaatcgcaaccaaacataggtatatcatattctggacggggaaacatcacacaatgcaaaatatctaacatatttcccactcttgctagttccaagtgcattttacgaaagtgggtactttgataacaacgattttctataattagtttttccccttctagtctaccttctacatatcctaattccgcaggtaaatgatagggtgataagtctaggtatttatgccaagctgcttcaattgtatcagctagtttacaaatcaagggatgttgttgttcacgtagggatgggctagaagtagaggtcatattttttatgtcaacgatgtaatttatgatctagtttacaattagtcaggttatttatttgtattaagaattataaataaatcatcaatagcattatatacataacattttgatgatttgtggtaatttagttgccacagacagtaaattcaagctagtatcaaattaatcaaaaaacacaaataaaaaacatagaacataaaacatattagatatgagttacgacagcactctgaaatatttaattgaagaatatccgcaagcaattgttgaatggttgcttggtgctaatatttccgaaacaccagaactcttaaaaacagaattaaatttagaaccaattcgggtggatggactatttttcttaaaaaccagcagtaaaatcattcatttagagtttcaaaccattccccaatcaaaaccacccctacctttacggatgttagattattgggtgagattatatcgtcaatataatattgagattgagcaaattgttattttcttaaaaccaaccacatcagaagatgtatttattgatgagtttagagctaccaatacttttcaccgttatcgagtgatcagaatttgggaatgtgaacctgaaccattattagcaacgaccgaacttttacccttagcagttttagccaaagctgataattctagtataatattagaacaagtcgcagctaaagtaaatataatagaagacagaagacaaaaaattaacatttccgcttgtgtgcaacttttagctggaattaaatttgatacagatatcatcaatgcttattttcgggaggatattatgcaagaatctgtagtgtatcaaaaaatagttagagaaggtttagaacaaggaagacgctcggaagtgaagttaattatgcgtcagcttcagcgtcatttaggaaaaataggtacagacattcaaaatcaaattcaagatttatcttttacacagttagaagatttgggagaagctttattagattttcaaaatgaaactgatttaagaaactggttaagtgaaaattgtgattaaggtaaggattcaggagtcagaatgtttgataaatctctggattttggaaggtaaaggaatgaggtaaattaggaataatcattactcaattattgccaaaaatctgtaacttcataacccaattctgctaacatttgccgcagtaatggtaaactcaaaccaattacattactatgacaaccttcgattttttccacaaataaactaccaaaaccttctaaagcaaaagcaccggcacatttaaggggttcacctgttttaacataagctgcaatggcgcgatcgctcattttcccaaaataaaccctagtaatttgacatttgacaacagtgagattttgggtattatcaattaaaacatgaccagtatacaaatcaccaaaattaccttgcattaaattccaacgagcgatcgccacttctgcattttctggtttaccataaatctgtccatcaatggctaaaaccgaatcacaacccatcaccaaagcgtagggaaactgaggtgcaatagtttcagctttacacttagctaaaatttctactaatgtttttggttcagtgacttgaatttgcgactcatcaaaatcactagctttaacaataggttcaatacccacagtttgcaacaaacgacgacgtgcaggagaagcagaagcaagtataaaatcaggaatattcataagtaattggtaatttgtaatttgtaatttgtaattgggtattagattttaaattttggactttggattttacttacttcatttccatctaaaatctaaaatctaaaatctaaaattgatcatcccaatcacataaaattaatagacactaaaagaactaacaacttcatcaatagtacgttgcagttttttccaacgtctttcaggtacagaagcgttaaaagtaaacaacttaccacgactcacagcaacactagctatattgtggcgtttttcacggttaggaagttgaacttcatactctagaaaatagtaagttttaccatctacttctttttgagcaacattaactaattctgctgaacgtccagaaccttcaggagcaagagcagcttttcctaatttatatcctacttcggtgggtgttcccaattcagtcaaacttttaccttgaggaacaggactaatcaccacagagacattttctgatacttcgattaaatcatgaaataccacatcaggaccgtcggtaactttaacttgcaaccaaccattaggatataaaaactgataaccatcagcagtatctacaaagcttttgagtccagccgcagcagcaacatcagggttactgaaactgatactgaacactaaaaccaagattaacgcaattcgtttccacattgataaaaattcctttcggtgggaagcaatacaagacaaggatgattgcaagtctttattttctcattaattggtacgttcagctaaggacgattttaccgcttcaccggattgaactgcacgcttctagggttttaggtagttcagccatattgaaaaatttgatacacggaaaaaatccgcagaattaataaataataaatattttttgtgatcaatatcactaaaataatgtgatgaaaaacacacttcattttaagttatatgaaatataattaacatcaatccataaacctgcattagtatccggtccatagattatgactgcaaatagtttatcattaccacaagcaaacctaaaaatagctttatggcaaatagaagctgattctatgagtagtagtgatttatatgtatggattgctaatagtggattgccagatgatattgctatcagattacatgaattagcaagctctacgaaaaaggtaggcaacaaagttatttctataggtaaaataatcttaataaagattatagagtttatcaaagcgcatccttatttatctactggtgttgctttaggtgctgctgttggtttattagttaatgcaattccttttattggtcagtttttagcgcctttagctactgtgttaggtattactattggtgctatagcaggacatagactagacaaaagaagacaaggtaaagaagtatatgatgttggtattttaggtattacagaagaaataatagaaatagctaaagagttttttcaattattaattgaagtttttattcttgttttccaagaaataacaactacataacaattatgtcaacattagttaattatttagaggttacaaaaatgtcttcagataaaactccaagtaagcaacaactacttaaaactttaaaagaacttgaaaaaaatcctaacgattctgccagaatactaggtgaaattggaattgctgtttttgctggtggtgctgttgctgttgctatagctgctattggtgttcaagtatcaattcctatagttacagcattaactggtatagttctggtgggcgcagcacctgtcggtttggttgttggaggtgctgttgctggaggtgctgttgcttggggactaactcaattagtcaaacacggctctaaaatggaagctgcaaaagctaaaataaaagaggatatcaaaaaaaatattaaagatattgaagtcaaagaaagagcatctaatgttcaagcaaaagatttaggttatttttatggtgtgttacataaagctttagatgctaatttgattagtaatcaagatgtttttaacttattacaagctatttccaatggtcaaatgtctttatctgaaggatataaattaatggaaaatatacttgggatagcataaaagttgaaccattaattgagtaatcattatccgttcacagtttctttatttccattatctcataaaaaatcctgtaaatcctaaaatcctggacattatctcgacttcgctcgataaccacctgattctgacaaaaaatatcatataatagagaataaatatttacctcaattaactatgcaaaccacagaatcacccttacaattgcgactgtggactgttgatgaataccacagaatggctgaagcaggaatatttgaaccaagtgaacgagtagaattattagaagggaaaataatttgcatagttgctaaaggaacagtccaccggtcagcagtaggaagaacaaataaattattacaaaatcgtttagaaaatcaggcttggatagctattcaagaccctgtaaaattaaatgaaaggtctgaacctgaaccagatgttgctgtagtcaaaatagatcctttagactatgcagatcatcatcctacaccagatgaaatttatttcattattgaagttgcagatagtagtttaaagctggatacagaaataaaagctaaagcttattctcaagcaggaattaaagattattgggtgttagatgtagtcaaacgcgaattaattgtatttagaaatcccacaccagaaggttatcaaaatcaagaaatttccacagaacatcaaaaaatatcacctttagattttcctgatttagaaattatggtagcggaaatgctaccacttgtctattaaatatcaggttcaacacccagctttcttaactgttctatcaacctttctttctgttccattggagtcaaaacccaattaccagaaacatcataccaccttaaccaaggttgctgaatattattataaattccctcccaaacacccaaacctaactctatttctggtatccaaaaccgataatttaatgatgataaatcaatttctgcataacgaccaccatctaatttaaacattctaaatttataggtataacggtcaaaaatcgcatagtaaggaatccttaaaatctgttcataaacttcccacttggttggtggtttttccacatctcgcaaagtctgtcctaaatcttccttttctgttcctggtgaaagtaattcaactattacaaaaggagtaattccttcttgccaaattacataactcagtcgtaaatcaccatttttataaaggggagaaacacccacagatagaaaccaatctggtcttttataccatgtgggatgattgggatcataatataaattcatatcactagcggtaaatattttgtcgctaggataaacagaagatttaaaagtttcgtctaataaacgaggttgtaataaatgaaattgatctggcaaacctttttcctctggatcttcacttttaagatcatacatcgttggtaatacttcttgaggagaacgtggtggatctgtttggtacataattggtaattagtaattggtaattggtaattggtaatttactcgttcccatactctgtatgggaatgaattattaaaggctctgccttttgtcataaaattagagtcagagactctatgatagcattcccagtcagagactgggaacgagagacgagagagactgggaacgagagaaatcctgtaaatcctttaatcctggacatcctgattctgacaaaaaattctaacaatcaactcctgactaattccacatttaccaacctctgcaaaacctgtttcaaaacgatcgcggtccaatcaatatccgcttccgttgtctgttttcctaatgttaacctaattcctcctaaagcggctttttgagaatatcccattgctaataaaatcggactaggatttaatttaccactattacaagcagcacccgcactaataccaattcctgctaaatttaactgacgaactaaagttttaccactgattttttccccatctgcatattctaaacaaaaactcagatgatggggtaaacgattaatcatatcacctgtaggaattaaaccggggacattttctaacaaagaaaagaggcgatcgcgcaattttattaatcttattctttccccttctaactcttttcccgctaactccgcagcaaccccaaaaccagcaatagcgggagttgcttgtgtaccagaacgcaattttttctcttgtccaccaccacccaaaagtggtattaactccacccctggacgcacatataaagcacccgcacccaaaggaccatataatttatgactagaaatactcaataaatcaacaggtaaattattcacatctatcgctaaacgtccagcaatttgtactgcatctgtatgaaataaagcatcatgtaatttagcaatttttcccaattctactataggttgaaccgtccccacttcgctttgtccataaatcacagataccaaaactgtgttatttcttaaagctgcttttaaatcttcaggattaactctaccttgtccatttacacctaatcgtgtgacatcccaaccccaactttctaacattcgcaccggttcagaaatagcggaatgttccacactagaaataataatatgttgtggtttagaataacatcgagctacacccataatagctaaattatccgcttccgttcccccagaagtaaaaataattgattcaggaatagcattgattaaacctgcaacttgcatccgcgcagtttctaaaattaaagctgcacggttgccccattcatgtaaactagaaggattaccccactgttgagttaaaactgattgcataacagcgatcgcctcaggacgagggggagtagtagcactgtaatctagataaatttgcataaaatcaataattttgataatttagcacgtattatgggcaataataaattattaggagtcaggagttcaagcagtcgtaggggcgaagcattcgggcaaccaattatcaattttatgaaaaggctattttcctgtaagggcgttcgcgaagcgtgctggaagcatcagcattcgggcgataaattatcaattttgatcacaggttattttccgaatgcttcgcccctacttcgcccgtacaggagtcaggagtcagaattttttactttctgatcactcatacaaaatctttcttaaaccctctttactttgcgtcctttgcgtcctttgcggttcattcttccatgacttatacataactcctaacgtccctaattatcccttatttatttgtatcagattctcatgtctatttttcaccatcttaaattttcatcttatatatttttattcttatttaccctcaccagttgtcaaaaagtcaaatcttcaaatcagcgtttagcaccattaccccaagaaccattaattcaagtttacttcaatcattcccaagcttcagaatatcaagaaacctaccgaaaacaaacccgtccaggagatgatttagaaaaacagattattgatgttatttcccaagctcaatctaccatagatatagcagtccaagaattacgtttaccaaaaattgcccaagcattagcagaaaaacaaaaatccggtgttaaagttcggttaattttagagaataactattctcgtccttggagtagtttaacagatgcagaagttcaaaaactagaaccaagagaaaaagcaagatacaacgaattgagaaaatttgttgatatcaaccaagacaatcaaatcacaccagaggaaataagtcaacgtgatgctttagtcattatcaaaaatagtaaaattccctggatagatgacacagcagatggttctgctggtagtggtttgatgcaccataaatttatcattgttgataatcgttttgcgataattacttctgctaattttactttcagtgacacttcaggagatattagcaattctagcagtttaggtaatgcaaataacctattgaaaattgatagtcaagacttagctaatttatttaccgaagaatttaatatcctctggggtgatggaccaggaggaaacccagatagtaaatttggtgttaacaaacctatacgtaaaccccaaacaattactttagtcaacaatctaattaccgtcaacttttcccctgtttctcccactcaaccttggaataattctagtaatggtttaatttcccaaaccttagataaatcaagtaaaaatatagatatggcattgtttgtattttctgatcaaagaattgccaatattttggaaaatcgccataatcaaaatgtaaaaattcgcgctttacttgactcacaatttgcctatcgttcctacagtgaagctttagatatgatgggtttagctgtaattgaaaactgtaaatatgaagttgataaccgtccttggaaaaatcctattactagcgttggaatacccacattagcaacaggtgattctttgcatcataaatttgggattattgataacacaacagtaattacaggttctcataattggtcagaagcaggaaatcataataacgacgaaactttgttaattattgaaagtcctacagtatctgcacattttcagcgtgaatttaaccgtctttattctacaatacaaccaggattgccattaacaattcaggcaaaaaatgatgctaaaattaaacaatgtttgtaaataacaactcaatcatctatctgattttaccaatcaaaaaattaatctcaacacagcaacacaaccaaaatcataaaccattactagtaaggataattattacccgtcaacaataaaaatttatatatttataaaacttataataaatactgggtattagtcctaaaatgtaattaataatggtaatataatgtaagttagtaagctgatgtgcagctagactgtataattacaaaacctgaagttacagtagcacaagcatcttgcttgtattaattatttaagttaaaggcataacagcttagtagtattaagtaaataaacgtttaaaaacttgtaaaattgagtatgaatcaagtaattaaggcgttaaaaatgattgtatagtttgtatattacctgctattaacatcaagaaaaactaagataatttatataaacataatctatgctaattatcaaagaggaaataaaaattcgtcctatggaaaatcataaaaatgactatttattaatggaaaaatggcgcaccgatgaaaaagtattacaattctacggaggaagagatgaaccttatgatttagaaaaggtaatcaaaacctataagcccagaatattaggaaaagaatcacttattcccaggattttctcatatcaaaatatagacattggttatttacaatattatgaactgaataaactaccagaacatcttagcaaaatgtattctttacaagatacaaataatgtctatggcattgacttatttatcggtgaaactcaatattggaatcagggaattgggacaaaagtgttatctttagcgatagaatatatatttaacactctgcaagcgttgaaaatagtaattgatcctaatgtaaaaaatcaccgtgctattcgctgctatgaaaaatgtgggtttgtgaaaattaagctgttaccatgtcatgatctacacgaaggtaaatatcaggattgttggctaatggcaagagaacgtaatatagcaggtgacaggtgacaggtgacaggtgacaggtgacaggtgacaggtgacaggtgacagtgtgaaaagtcttttaccttatggcttttgatataaattgcgtatctgattcaagtccagatcacaataaatcattacactaagaataacactaaaaataaatcaacctgctagaatttagcctctgagcaaaaccatgacacaaacaactacaaaaacaactacaaaaatctgtatactaggtggaggctttggaggtctctacaccgccttacggttaagccagctaccctgggaaaatacacccaaacctgagataatcttagtagatcagagcgatcgctttctattctctcccctactttacgaactcctcactggcgaactacaaacctgggaaatagccccaccataccaagaactgctacaagggacaggagtacgttttcatcaagccaccgtctcagaaatcgacaccgacaaacaacaggtacaattgcaagatgggcaaaaaatcgactacgatcgcctagtattagcattaggtggtgaaacacccctagatttagtacccggtgcagtcaaccatgcttaccccttccgtaccatcacggatgcttatcacctagaagaacgcctgagaattttagaagcatcaaatcctgaaaaaattcgtgttgccatagttggcggtggttacagtggcgtagaattagcttgtaaactagcagatagactaggagaaaaaggcagatttcgcctgattgaaatcggtgatcaaattttaagaaattccccagaatttaaccgcgaagccgccaaaaaagccttagatgctagaggcgtgtttatagatttagaaaccaaagtattatcaataggagaaaataccatttccctggagtataaaaatcaagtagatgaaattcctgtagatttggtaatttggacaatcggtacaagagtttccccagtggtaaaaaatctacccctcaagcaaaaccaacgcggacaaatcaccactacaaccacattacaagtcttagaacatcccgaaattttcgctttaggagacttagcagactgtaaagatgcagaagaaaaacaagtacccgcaactgcccaagtagcatttcaacaagcagattatacagcatggaacatttgggcatctttaaccaatcgtcctttacttcccttccgctatcaacaactaggggaaatgatgtccttgggagtagataacgccaccctcacaggtttaggtgtgaaactagatggttctttagcatacatcgcccgtcggttagcttatttatacagattaccaaccttagaacatcaattaaaagtcgggtttaattggttagttagtccgatcattaaaacactttctcagtaaaataggtgacagggaatagggaatagggaatagggaacagaaagcaaaaggcaaaagataaatattcttccctgcctcctgcctcctgactgctttaactcctgacttcttgaatttctgactccttgaactcctgactccatgatcgccttgatctccttatgaaaaacccaatagttatttttttagatgctgtaggtacacgattt

SEQ ID NO: 21 - DNA, 72395 bp, Sphaerospermopsis sp. LEGE 00249
  LEGE00249_33
ttgtatgtgtcaacaaattagttatgttcattggatggaagatatcatgagatgttgacattttcacccttaataggactactataactgaatatgtaaacttttgtaacgacattcaacatttctgagttaaaatctattgttgctattagctgattagtgatagctgaatatttaatcactaaatttaaatccccgacttcttaaagaaatcgaggattttaaacacagaatattttaacaggatgatttattgtatttaaccccaagaaacggttaatgttcctggtttacttaaatcacctgttaacaccacaccgcgattattagcatgaagatgacgcagaattttataaattgcttcaacttgttcagcagcaccagctttatcagctatttcggtaatagaaagggctttcttttctgtttgcaatactttgattactttttgttgtaaatcgagaattgcagcggcagcttttttaccagcttctacaccaggttggtgataagcattaatattaactaagctggcataaaatcctacagcccgttcatataatgcaattaacgctcccactgtgcgagcattaacttgaggaattgtcactgtaatagaatcgcggttattctcatacaatgcttgacgagttcctaataagaaacctgataaataatcaccagatgtgacaccaggatcaatttcaggagatgcaccttgacgatcttctaaaacttcaattaaagttgcaaagaaattgggtacaccttcccgcaattgttgtacataggcgtgttggtctgttgaacctttgttaccataaacggcaataccttgatatacagttttaccgtctaaatcttgttctttacccaaagattccattaccaattgttgtaaataacggctaaataataacaagctgtctttgtaaggtaagacaaccatatctttttcgcctttaccgttaccggagaaataccaagataatgctaataatgctgctgggttatttttaatattagcaacacgggtggcatcatccatttcttttgcaccatctaacatggcacggatatcaataccctgtaatgctgcgggtaataatcctacggaagacatttctgaagtacgcccacctacccagtcatacatgggaacagttgttaaccaaccctcagattgagccactttatctaagttactatctgtgctggtgatggcaactgcatatttagcaaagtctaaatttttggcagcgtaggcttttttcacctcgatcatgccgttgcggggttcgggtgtaccaccagatttagaaatgactaataccagggtagtagccagtttatcgtcgatagaggagagaacccgatcaataccagcaggatcggtattgtcgataaagtgaatgttgaggggaggaaaatcgggtgcaagtgcttcagcgacaaactggggacctaaagccgaaccaccaataccgatagaaataatgtcagtaaagcggctttctttggggggatgaactgccccggtttgtacctgatctgcaaaagcttcgatttgttctaaagtttgaactatttcttgttttagttctggagagggtgctaagtctgggttacgcaaccagtagtgtcctaccatgcggttttcatcaggattggcgatcgctcccttctccaaagcggccatatccgcaaaagccttatcaaatttcgactgcaacgactccacgaaagcgttatcaaaccgcatccggctgatatctagatacagtcctaatccctcgtggtaatataaccattcttggtatcgttgccaaagtgccttagcatccatcatgagggaattctcacatatacttgatcaaactccagtttaatctatggttttggcgatccctgctctgtcttatacagtttgtaatgaggaggcaggaggcaggggaagaaagctcacaagggtaggtattttacattgtcgtcagggcaagacttggtggacaaggtggacaaggtgacaagggaggaaaacagtacaaagtctgtacttttagtcacaaaaatagtccgtcaaaaaaccattgtccgtataaaatcttccttgtctactttccctccttgtcttcctagtcctgcctcaacagataatattaaaaacctacccctgtgagggggaagaaagggaggttaacccagtcaccaatcaccaatttacacatctggcattggcacaacacgcaaaaacttgactatttcacctgtaatttctatcgtggtgactggggattggggactgggtaaaaataactaatgactaattatgattgaatatctcatttttctggctatttctaccgctacttttgctttgttcgcattagggcttaatttacagtggggttttacaggtttgattaattttggtcatattgcttttatgaccttgggtgcatatactacagttttattaggtttaaaaggtgtacctatattattttcggcgatcgctggggcaattgtctccgctttgttaggtttggttattggttttgcaactctacgcctccgggaagattatctgggtattgttactattggtactggggaattaattcgtttggtggtgaataaccaagatttaccagtaggtgatgcttggatttctggggcgtttggtgtccaaagttatgcgattcctctatcaaccacgcccaatttatttttccgatttttgatgattggtgtactttctttacttgcaattgttactttattttctttgtggcgttgggtaacaactgctcaacaatctgtcactgtttccattaaaaaagaattttcttcccgtttggtagtgggtataattttaggtttattgtcagtcgctatttatgttgctggtgtagtgggattgtataattacaaccctaaagcgggtttaatgttattggctttgttagtattagcttttgttttttggcgcttagaatttttagtcaaatctccttggggtcgagttctcaaagctatccgtgaagatgaagaagtacccaaagcattaggtaaaaatgtcttttcttataagttacaatctttgatgttaggcggtgcgatcgctggtattgctggtgctttcttcgcttggcaactgagcgccatttatcctgataattttcaacctcaactcacttttgacgcttggattatgataattttaggcggttctggtaataatatcggtacaattttaggggcagtaatttatttcgcttatgatgccctcacacgggaatttttaccaaaaattgttcctttagatgtagaacgtatcggtgcttttagaattatgtttatcggtctaattctcatggtactgatgatttggcgacctcaaggtattctaggtaaaaaagaggaacttactcttggtaaataataggttataggtaacaggtgagaggtgtttgtcatggcttatagtgatttcaaattacaggaagttgtgaataaattcagtttaaaaattattgaaaaggtagatttatttgctaacacaccagaaaaagaatgtagtgtaattttagatacaatactcaaaactaatgttcctttagcattggcaattaacacagaaaaagcccgctcagaaatgattatagctcctgtgctaattgaaataaaaaatcagtttacagaagaaattagtttattttctggtgtagattttaatgtagaaccagaacaaggtttaaatggagtttgtgattttataattagcaaatcaccagaacaactatttattaatgctcctgttgtcactatcgtggaagccaaaaacgaaaacattaaactaggtttaggtcaatgtgtcgcagaaatgatcgctgcacaattatttaatcacaaggaaggtaattatatagatacaatttatggagttgttaccacaggtaatatgtggaaatttctaaaattacaaaatcaggaaatttacattgatctcagtgaatattatattaaagacatcaaaattatcttaggtattttgatccaaataattcattgtaatcactaacaaacaatcactaataaatcatcatggtaaataatattgaatctccccaacttcccctattagcagctaccggactttgtaaaaattttggtggtattcaagcggttaaagatgctaacatcgaagttactcaaggtagtattactggtttaattggtcctaatggtgcgggtaaaacgactttatttaatttactgtccaatttcatccacccagataaaggaagagtgatttttgatggtgaaccgattcacaatttgcaaccatttcaaattgcccaacaaggtttaattcgcaccttccaagttcccaaaactctatcacgtttatcagttttagaaaatatgctgttagcagcacaaaaacaaattggtgagaatttttggcaagtgcaatttcaaccgcacattgtcgctagagaagaaaaacaaaataaagaaagggcaatgtttttgttagaatctgtaggattagaaaaaaaagcaaatgactatgctggtggtttgtcaggtggacagcgtaaactattagaaatgggacgcgctttgatgacaaatcctaagttaatattattagatgaaccagcagcaggagtgaatcctagattaatagatgatatttgcgatcgcatcctcaaatggaacagagaaaacggtttaacttttttaattattgaacataatatggatgtaattatgtctttgtgtgacaaagtttgggtattagcagaaggacaaaatttagcagtcggtactcctacggaaattcaaaaaaatgccaaagttttagaagcgtatttaggacaataaaatcatcagcattcagttttcagctttcaacgctaaaatacaaagtggaaatttcctcaattaatgctgctaaatctttgtttttgctgttataaactgatagctgaatgcttacatctatttttgccaaaagcgaaaattgaaactgccagaagcgcgacgataacgacgggtagatattctttttctgcctctggtacttttctcgttgggttctgggatttctgcttcttctaaaatttcatctgataattgagtttgagttgcttctttacttctccaccaagcaataatccaaccaccacctacagctgctattcctccaaataaaatacttattggtgcggaataaccaagaaacacaaagctgaacatgaaaaataaccagtatttcagtgctgcatcaatgccatcattagaagctacatctggtatttgggggttattttcgttgacgtttgtaaaccaccctaaagcaacaccacccataatccccacaaataaactgagaattaatgaagctcctgcaaaactggaaataatagctaacagaaaaccaaatacaagttgagaaaaaaagttgggcgaagaagacaatatttcgctgagaatatttttgttagatgccatattttcagaaattcaaaattaggtaattggtaattgataattggtaataaagaataatcttggttatccttgtcaatataataaccgtaaatttagaaacttaattagaaacttaacatgaaaaaatgaggatatgcctcaacatatccccattatcttgggacttggatattaagaaatgtcttgtaactcagcagtacgcacagaaagcacctgaagttgatttcctctttgtactttcacctgcaccgcttcacctaaacgactatcttctacaactctttgcaattgttcagcagtggtaattgtttgactgtcaatttgtaaaatcacatcaccgcgtcgcatacccgcagtagcagcaggggaattaggtacaactcggatcactaaaacaccattcacttctggtatttgaattgcagagttaggatcagtgttattttgtcttgctaactggggtgttaatgtcaccatctgtacccctaaatagggatgagcaactttaccgtttttttgtaattgtgcagcgatcgccttagctttatctatgggaatagcaaacccgattcccattgcatctgcacgaatagcggtattaataccaattacttctccttcagcatttaacaacggacctccagagttaccagggttaatcgctgcgtcagtttgaatgaaatctaaacgtttatcactaattcccacctgggcgctagaacgttttaaagtgctgacaatacccaaagtgacagtattatcaaatcctaacggattaccgacagcgatcgcccaatctcccacctgtacactgctagaagatcccaaaggtgcgatcggtaaatcgctaccagcattaatcttaactactgccaaatcagtaacttcatcaatgccttttaccgtaccttcataagtacggccatctttcaagcgtacagttactttatcagcttgatctacaacatgggcattagtcaaaattatcccacttttatccagaataaaaccagaacctaaaccccttaactgttcagtcggtgacatttgggggaacccatcaccaaaaaaccttcgtaaaaacggatcttccaaaatgggatcaacaggacgagtaatagttttttcggtatcaatccttaccacagcagaacccacacgatttaccgccgcagtgacaaagctactgttaccaatagcagcagatggtttttgagcaaccacttgatccggtgctgtttctgcgtgggaaggtaaaactgacacacaagaaaccgttaacaccactcctaaaaaaatcgctaaaacacgggtactgagtttacgtataaactgaggtagttgaaaaatttgcataatcacaacctaatctagaagcctaatgtttgctatctatttacaaatctagctacaattatttttatagctggtttacaaatctgtgctgattgaagtttttacccaacttgtgatctaacaacttctgtcatcaagttaatggaacatacaccaaccaagctattatggacatttaccctgactcagtacggtttttccgccaatctcaaatcactctaggctaggatctaattaataccaaaccccacaggactcatgacagcatcaaaccgattagctgaaacatccttgccttcatcacagcaagcagaacacacacaccaccacaaccacgagcatacaaatcataattcagaaacagtcaactcggttcatcctcatgttcatagtgaagaatctttacggcgaattgttaaccgactatcacgaatagaaggacacattcgcggtattaaaacaatggtgcagcaaaataacccttgtcctgatgtattattacaaattgcagctgtgagaggtgcattagataaagtagcgcggattgttttagatgagcatttaacggaatgtattgctagagcttcagaaaatggcaatattgatgtagaaattgaacaactcaaagcagctttagatcggtttttaccatagagttgattatctatggtttggtaattgataattgataattgataattgataatgggacttacgcactgtacaaatttaccatgatgtgcatgaacgaaaatccgtcatttcaggcttttggcgattaacttccgatcaatagcgaactgcttgcagcagcgcttcgctatcgctcaaaaatcatcaaaaaatcacgttaaaatgcatgaaacccatacctcatatttggttgatcctggcgtaagtcctagataattgctttttttccctcattttcctgatctcccaaggagtatattagggtaattttttaaagtttcttagttacagatgcttctaaaactggtttttgttgattagttttttcattgatggtagctttttgattttgtcctgctaaattttcccgttggttaattaaataaatactgattaaagtcagcataactcctagccattgaatgggggtgagaacttctgcaagaaaaagatgaccaaatattaaagcaaaaactggtgtgagaaaggtaagagaacttaaactcgttagatttccacttgatgcaaaataaaagaataaaccataggcgatcgcactaccaaagatagttgcataacccaaatttaaccaatcggataacaccagattttgccactgttggttttctacaaccgcagaaattccccacagaggcaacccccccaaaattatatgccatcccgtggctgtgaccggatcagcatatctacaaacaaagcgaattaataccgtacctacagccattgataaagctgccagtaacattaaccattcaccactgttaaataattgctgccaattatcagtagtaatttttacccctgaatcgagaaggtgaaaaatccattcttcttgtaggccaattaaactaataccagtaactcccaatcctaaccctaaccatccccaaagaccaatatgttcttgaaataaccacagggacaataaagctactgctaaaggttgggagtcaatcattacagaacctaaacccgcactggttctcactaaaccttctgctaaaaaaccttgaaacagggtagcatcaactaaagcaaagatgataatccataaccatgctaaccatcctttgggttggggtctacccatgaaagcagcagcgatgagaattaatacccccgcaggtagtaaacgtactcctgccataaataatggtgtggtatgaggtatgactcctttcattgctaccattgctgtaccccagaggaaaaagggagcaattaataatagggaagctagggtagattttgatcctctcagttgcagttgcattagttgtattggatttttgttaaattaagtgtaaatattactttacctaattttacagaaacattggtttttctgtttatgtaacattgttaccgatcttttttgcattattactgtcacctgtctcctcatcttttgatcttctctagctcctgactactctgaacaatgggaatagtgaaatgaaactgacttccctgctccttaccttgggactcagcccaaattttcccactccaaccgttgactatttgcctacaaatggctaaacccagtcccgtacctcccgcagtccgtcttaaagctccctcttcttgataaaaacgatcaaatactatttctaagcggttgggttcaattcccctaccagtatcagctacaatcacttctacctcataattactattttgatgagctttaattgttatttgtcctgatgtgggtgtgaacttacaagcattatctataatttttgctaatacttccacaagccaatcaccatcagccctaactaaaggtaaactttcggcaatttgtgttttgatggttggtggtttttctgccgtggagcgtgtacgtaggcgactaagggctaaatctacacattcttgtaaagtcaaagattcgggatgccattccacacgcccgctttctaagttagaaagagtgagaaaatcctgtaccagtttccgcattctttctgaatcagaaagtgctgtagttagcattacctgttgcaactctaaaggcatatccggttcactggccagactttctaaacacacttgaatggtggagaggggggttcgcagttcatgaccggtgatggcaattaaattactgcgggtacggtcaagggcttctaattgtttgtttagttcttctaaattggcaaaagcttcagcttgaatcaatgctgcacctacttgagtagcgatcgccttaactaaatccaattctccagcttgccattcatgggcaggtaaatgacaaaaatgtaactctaccattcccagtagtcgtccctgggaaaatacaggttctatcaaccacgaatgaatagtaaaccttttaacaattaaagaaagtgcggtagaactagtaacgcgataatcagtaagagtatcagtaatacatataccttcacccagttgggtaatttcgtgaaataaaggattttgtgccaaattccaggtttgtccccgtactgagacaacatcaggacttaaaaactcatgttcaattattgcttggtcatcagtagattgagcgcggtaaatcagacaacgatcagcttctagatgttgacccaactcttgagcagctacttgcaaaactgcctgtggatcaagcgatcgcctaattgccatactaatagaattgatcaacttttcttttctagcttgagcagcaatagaacgataagctttatgcagcttatattgactagcttgcaaataagttactaatcgctgtacaaaagggtcagtatcaatactaaaagcggattcattaattgattttggttgggacttgagtggtactgaaccgataccaaacctctgacgtgcctggttaattttgcccgctaaatcgggtctataaacttctattctttgcaatatcaattctgcggccttgagactaactcctctgtcagaagtccaaattccctcaaatctccgcgctgtgtctatatccagactagaggtcatttctggtaactgctgatttttagcaattgacctcacactttctcgacatactaaacaagtagcataattatccgcgattacaactaaatgccattctttacttaaagcatcatccggttcaaaagctaccttttcatagtcatccgaactattagcaaactctgtttctggtgcagataatacgtatatttggtcacttctctcggcaaggcgttgatagcgatgagcttcttgacgataaaatcgctctcgctgaaaactagcaataataagcggttgatccaaggaagtcgccaaaacctgatcttccattgcatgggagagcgcagttagggaagccttgaaatacaactgagtccgcaagtaaggtagtgactgtagcaaatcactcagcacagaagtcgaaatgctcatgaatatctttaaacgcccaatctagacctttagaaagcacctgtccagatattaacccaaaaactaccttggtaagtttgatgactgttgaccattgacaaaactcaaaatttttttaactaaacattaactaaacattaactaaacatatttatgagtattttctagttctagtatctctcattgctgatcaaagaataaaaccctagaaaatcctcagttttcagccttgacttcagatgtaaaaggtatagatttattggtgactggtgattgggttgttaatcttcccttaccccctgctcccttgccctgtgcttccctgcctcttccccagtctcgcgtccagtatagggaaatttggctcatgacaccggatatgttgatgaccccagagaaaatcgtcctcgatggcaaaatttttattcctgctgaacaagtacccattccagaatggccttgcgttgtcagtgaaagaccacaacccactttaacggttaaagatgatgatttatttttggtgacagatacaatggggaacatttccggttgttccctagaagatgggaatcccagtgtgggtttattttgcgctgatacccgatttttgagtcgtttagagttacaaattaataagcgatcgcctgttttattaagcagcactgctgataaaggttttgctctctctgttttatgcactaaccccaaaattgacaattacctaaatgctgatactattggcattcgtcgcgaaattgtccttaatggggcattatttgaagaaatagaagtcgctaactacagcacttctagcattacttttgaaattagtcttagctttgatgctgactttgcagatttatttgaagttcgtggtttttatcgaggaaaccggggtaaattattacgattatcagaactaaaaaactgttcagaaaacctcagccttgcctatcaaggtttagatggcgcggtgatggaatcccggatacaattccaacatcaactaccagattattttcaaggttataccgcaatttggcgtttagaattagcttctcacgaaaccaaaaaactcggttatcggttgcagagtttaaccaataatcaaccgatttctaatgtgaatgctgccacaactttggcacaagcaaaagcttctgaattaatggaggagcaaaactgggtacaacaaattacgcgcattcactcagataaaagtctttttaatagagtgattgaaagagcagaacaagatttgtatttactgcgccaatcttttggcaaatataaaactgtttccgccggtgttccttggttttccactttgtttggacgggattctattattaccgcttcccaaactttgatgttaaatccccaaattgctaaagaaactttaatgatcttggcagaatatcaaggtaaaaaagaagatatttggcgagaagaagaaccaggaaaaattttacatgagttacggtttggagaactagcaaggtgtcaagaaattccccatacaccttattacggaacagtagatgcaacgcctttatggttgatcttgtatgctgattactatgcttggactcatgatcaagaaaccctagaaacattgtggagaaatgctttatccgccatggattggattgatagaaatattcaagaaacaggctatcttagctacaatcgtaaatcaaaaggtggtttagttaaccaaggttggaaagactctggtgattgtattgttaatagaaaaggtgagttagctaaaggggcaatttctttatgtgaagtgcaagcttatgtctatgctgcaaaaatcaaattagcagaaatagcgaagatgaacaagcggctagatttagctgaaacttggttagaagaagctaaaaatctcagagttagatttaacaaagatttttggatagaagatcaagatttttgtgctttagctttagatggggaaagaaatcaagtagatagtattagttctaatcctggacattgtttatctttgggaatttttacccccgaaaaagcctacagtgtagcagaaagattgcgagcgccagatatgtttaatggttggggaattagaactttaagtagtttgtcacctgcttataatccaatgggttatcacattggttcagtgtggccacatgataattctttaattgcgatgggactgcgttctttgggtttaattgatcaagctttggaattatttcaaggtttgtttaatatgacttttcagcaatcttatcaacgtccaccagaattattttgtggttatgaaatgaatggagataatgcacctgtgcaatatcccgttgcttgtagtccccaagcttgggctacaggtagtatatttcaattattgcaaatgatagtgaatttagtaccagacgcacagaataattgtttacgaattattgaccctgctttgccagaatcaattaatcgtttatcgttgcataatttgcgtgttggtgcgacgattcttgacttagaatttgagcgggtggggagtacaacttcctgtagagttgcgaataaaagggggaatttaagagttgtaattgaagcttagattagtgcacagatcccggacttcttcaagaagtccgggatctggatataatcatattgtccaagttgtgcattggtattggtgataccaaatttgagcaattaatgactctattctcaatagacaatggattttacctgggtaaagcgcaaagattgtaaagttttattgcaggattcaaaacttgtggggtaaagcacattgctaaacccctacagattcccaaattataaaaataattagggcttgctgaataaactcaaaaccttgataaatcaagggtttcaggtggaaaatcaggaaatcagtgcaggattttttaggggtatactcctaaaagcgtgcattttccgggtgaaatttcaaagaattggttactaacagatcacccaaactcttgcctattccctattccctattccctgccttaacgaagagactttttcagcaaaccctaattattgaattacagcagattgcagataagtgaggtacagaatctaaattgaaacctatacaccaagccagttttactcctgacccctgactcctgactcctgctgtaattaagcatcttctgaacgttcaattttttgaccaggagaagattcatataaagcatccaactgttgacgcgcatcatccacattaatagaacgcattaccaaaagcggttctttaattaaattaccggaattatctaataattctggatgaggtacagattgtctttttgctccataataaccaaagctacctttattccccgcagaggatgtatttggataaggtcgctcccgatcaaaactgaacatgactaggttacgaattaaattactgacagcaataaacgctaaaacggtaaaagctaaaacgtagagcaggtgtaacataaaattatcctccaggggcaacaaattttacaaaatctaaagttttatatcgtagtcctcaacttttctttacttgcaatttacagggaaaacaaaagttaagttatttatttgtgttgtgatattttgtaatcttattcagattaacgtaacatggtatacattatttttttatgaaaataatgttaaggtttttgtcctaatgttgagatttatgaccataaagatcactcatgctgtgattgacggtaacgcataccaactttccaacattcgcctaataattgatgccaaggcattaatgtagccatatccagtcccacttttttaccagttacagcaaatagcattttagaagtgtttaattctgcttgtgcttgcgtaactcggttgagtaaatcagactgttcctgttcactcataaatgagattttctcattttctaataattgacgtgatcgcgcaaaccaatattcaaaatcctctaacagcggctccaagactgactttagcaactcagcacttggtgaatttgagtcacccatatataagaagcatatttcctaatgtcttattaatattaacgctatttacgaaacttaacaatcgcctcataacttacctgccaaaacaaccaaaatttgtaatttgttatacaatacacaattgtataattttggcaagaggtttgtacagttccttacgactatgttttgatctgtctaaaggaatatctattgtgaacattttagagataagaattacaaaaaactgttagggagcaatgcaattttgtgggatgacccaacaaaattgcattactcccagatcaaaatgagtgactggcctgtacagatgattgatcttaccaatgatggtaactatgatgtggttttgactatttctggttcagctattgcttctttgactccagatggaaatgaaaatttagtaaatgaataagagcagaaacttccccgaaccatgattttttccgtccgaaccatgattttttctgctaattgtcaggttatctatactgattttactgataaatcaccacaaaatctgacagcgatcgctcaactccacagtgaccaatctctagctttgctagtggaaactgctgatatatatagctttaggcgctggtcgaaaattaatcagcgcctggaatgatgacctcgctggttaatttattattcgtggctagaagtttctagtctttggcttttgagattctgtaactgttgcagcagggaatctacttctgcttgcaggtcaataaatttttcttgttgttcgtcttggtagtaagccttggtgagcttctttaccaattcactatgagattcgcagctggcaacactggatgataaagttgacatagttatgttctttccgaaactaaactcacaccattagagatattataataaagctatcttaacctttcttaaaatcaagtatacttttaattacatactctaataggtttcctgctaaatcataagtgactgcgataatagtgagtgtgttcctcggtggtgattggtgactggtgattggtgactaggaaaaatctttcctcccctgctccctgcctgatctgttgctagatatcgccatttgcatggtaaagtgattgacactatcaaaaaaaatctatttttctcatctcctaatccctagttaagaagtttagaatcctgtgactttgagcttgtctgttgctaaatctcatcgccaaccttggccggggctaatagaagcctaccgtgaatacttgcctgtgagcgaaagtacccctgtggtgactttgttggagggtaatactcctttgattcctgtaccagcgatcgctgaacgtattggtaagcaggtgcaagtatttgttaaatatgatggtctgaaccctactggcagttttaaagaccggggtatgactatggctattaccaaggctaaggaagctggtgctaaggcggtgatttgtgctagtacaggcaatacttccgctgctgctgctgcctatgctaaacgcggaggaatgcgcccctttgtattgattcctgatggttatgtggctttgggtaagctggctcaagctttgttatatggggcagaagttttagctattaaaggtaattttgaccgggctttagaaattgtccgggaaatggcggatcattatccgattactttggtaaattctgtcaatccttaccgcttggaaggtcagaaaacaggggcttttgaagtggtggatgcgttgggtaatgctcctgactggttgtgtattccggtgggaaatgcgggaaatatcacagcatattggatgggtttttgtcaataccatcaagcgggaaaatgcgatcgcttgccaaaaatgatgggttttcaagctgctggggctgcaccgttggtaaatggtcaaccagtgctacatcctgaaactatagcgacggcgattagaattggtaatcctgcgagttgggataaggcgatcgctgcccaaactgccagtatgggtagttttaactctgtcacagatgaggaaattttggacgcttatcggttgttagcgtcttctgaaggtattttctgtgaacctgccagtgctgcttctgtagctgggttattaaaagtgaaagatcaagttcctgctggtgcgacgatagtttgcattttaactggtaatggtttgaaagatccagatacagccattaaacacagtcatgctcagtttaaacaaggtattcccgcagatttgcaagcggtagctgaggctatgggtttttaaataatgctggtgactggggactggtgattgggaaaatacaaataattacccccctgcttcccctgcttcctctgattttaattactatctatgaaacgagaatatcactgaccttaatcttaatttctggcaatacttcacttttaattaattcatcacctgtataaataaattcttcatacaatccttctactaaagataaaaccgtaattttgttttgtacaggatcaacaatccaatattcagaaattcccctagctgcatactcagaacgcttgaagcgatagtctttaacttcattttcagtaccaggtgataccacttctatagctattaatggtggtggcatttcatgggtaatagttcctctttttgtcgcttctaaagcggcgcgacattcttcacccaagattagtaaatcagggattcttaccttagctctacgtccacttacttcaatcataatttctttatattttaataaatgaagagggactattttagacaattccaacaataatcgcattgatatatcagaattaaaaattgattctggtggcattaaaactaattctccatctactaattcatagcgatttccagtgccatcatcataggcatagtaatcttcaaaggaaaaataattgattggtgcttgaggagtttgaaccataaatataattccataattccattcgcttagtacatattaacccaagttgataactaggtacttacgttatctcccacctcccctgcttcctctgtctcccctgttgcctttgtggccgctctcaactgtgtcaaactatcaatagcatcacctaaagctgtagtgagatttttacgggtttgctcgtggttttcctgttctgttttgaatgcttgaatcaggtgatcgcgttcttgagtcacagcgatcaatttagcttttaattcctctatagatgtgtcttcagttagttctgactcaatagccgttgtggtagtttctgtaattgtatcagtgttaataccttgaagtttccaaagttcagcttttaaagatgcaatttcttgttgatacaacttggcatcggtgcgacgttgttctgattcagtgttatagatttgtcgccatttttgtgaactttcccaagcttcatcacgtttttgttgcagttgagccatctgctgtttgaggctttgaatttcggataaccatttttgtgttaaatcttgagtcatatcatgtccggttgcacaattatcatatctgttgaggctggtaattggtaattggtaattgggaaaaggcaatttctcatgaaacagctatatcgtaagtgattgggcggacattatatcatagtagcttttatgtataaattttgatataaaatctgttccctgttccctgctatatattgacagtaaaactggactctcatcaaaatttaaatatgttcagagacaaatttacagacaacctgggaattagtcaagcccgcaaagaacaagtattgctaccttgggattagtgttgaacagtccagcagtaattattggggcaatgttaatttctccattgatggggagtattctagttaaccaggaagttaccgaagcacaagatataattcagaagcgatcgcaagctattacagaatacctacaattaaaatggcaagtcagtgatgctcggatcagcacccaaataggaacagaagtttccccacaagatacgcgccctttttggaaagctaaactcatttctttaggattaaaaattggtactatctgacttttaatgctggcttcttttctggtatttattagtgatttacttttgggtatgctggtgcgtggtaatccttatttgggattcttattacctctttggaaattgttactttggcctttagctttaatgattgttgctgctacatttagcttagtctatcgttatggaccaagtgtgtggaaacgaggtacaccattaatgccaggagcagttttagcagctatcttttgggcgctggtttcggcattatttcgcctttatgttaccaactttggaaattataataaagtttatggtacggtgggaacttttatagtattaatgttatggttatggatgagtgcctttgttctccttgttggcaaccaattaaatgtaattgttggtgactctatgacagtgaaaacaggaaactaggaaggtaaataacccaattaccaattaccaattaccaattaccaattaccaattatataaaatgtctaactctcacaataaaatttacattgaatctgatggttatgcaacaacattaaaacgtttacaacaaattagtaaactgttagataatgctattaccattccgggaactccagtaggtattggtttagatccaattttgggattaatacctgttggtggtgatgttttgggattgatattttctctttatattatcattgaatcggcaaagttaggtatatcaaaagcaactttaggcagaatgattgtaaatattatcattgatgctttagtcggtgctattccgatgttgggagatttatttgattttgcttggagagcaaataattacaacctgattttattggaagattacttaaaatctcctggtgaaaaaaagaaggccgatcaaggttttattattgctctttttgcagtgttggttgtacttggtattgttttaattgcattacctgttatttttataggaatgctatgtaaagctttaaatggcgggtaaattaatcattaactaagctcttatgcgtttaatttgtataagtggaacaggcatcttgcctgttaaacaagagttcagaatattaggattatacaatttagttgtgtaacagcttaactcaaaatatcctattccctattccctattccctaactaataatatgaaaaactggtggcaatttcattttcctcaaggtcaacaaaatataattattactgatgcgtatggctatcctgtaaaaattgcttatggcgaaaaaggtacaggtaaaccattaattttattacatggtttgggcagttggagttataattggcgatatagtattgaaccattatctaaatattttcgggtaatttgttttgatgctaaaggttatggtttttccgaaaaacctatttaccgtagagaaaagagtggtcatcaaataattgaattagaacggattattcaatctttatgtgatgaacctcccgtcattgtcgctgagtctttaggtgcgttagtttctttagcattagcggctaaaaatcctcaattaattgggagtttagtggttatgaatgcgcccatttttaccgaaaccttacctcattgggcaatgggtttattagcacaaacaccattagaaattatccacacaattgattttttacgtcttgcttttgtgtttgcacctctagttagggaagtcatgggtatggaaagacgaaaagtgttatttaatcctgctattctcacggaggaagatgtttattggatcacttatccttttattgaaattccaggaactttagtgaaagttgcggaagaattacaaatagcagctagagaaattgagaatttacaagctaaaaaaccaaatatgttaactgaaattcaaaatagtctcactgctattgaatgtccaactttaattttatggggtgatcaagatagttggtttcctgtgagtcacggtgaaaaattacatcattatattcctcattcacagttaaaaattatagaaaattgttatcatgacgcatccacaggtgctaatgatgtagtgaatagagaaattatgaaatttttgcaggatacgaatttctgttaaactgtaatttaagccattgtcaatcatcaattatcaattaataattgataaaagaagagtgggagaaggcataccaatcgccttttttctcccactctacatttgctgctggggcgttcaggaatatgtgttaatagacgctatccgttatttagggggctatgtatttcaacgatagtgtctagatgatgtgggtattcctgttgcagcaaatgttaaacctgatttctttttgatttctttgattttttattattttttgctgaactaatagcccaacaaaatattagtagactgctttttttgttcataattcaaacttgtgaaacagcctttttaagcagaagctattttatgtagtaaccccagataacaacattattgaagtcgtttatcttttaataatttaactgggttgtttagtgattggttgccaagttggcactttttgttatttgtttttagccattagtcattagtcattggtttattaaccatcacatcgccccataaccctataccctttcttaaatacgttgtggaagtttaagtatgcgataaataacccaacaaccagatgcacaactgagggcgatcgccaacattaaccataaaggtgtaggattattgatattagaagatagtacgttttcttttttactgactacttctatgggtttttctggttctattttgggaacgtagccaatataaattagctggaaatagccaaatattcccactcccaggggaataactaacaaccccacaaaccataaccaaggatactttaggcaccgtttcttaattagagatgtattttttaattcttctgaagtgctgtttacagttgtggttagttctggttttgcattgtgactgttcatgattcatttccacttgcatcctctagtagtttattatactataagatacaagccctatttaacagtaggataaagggagttgaaagtagtttttttggcaaaatagcggttttttaccaaaaatttccaaaaaaaattggatattatgctactttttccccattatttgcaaattactttactgaatcttctaatttagaattggtatgtctttcaatggcaagttgaattaattgatctactaattctgtaaaagaaataccagtatttgcccaaagttgcggatacatacttgtagatgtaaaccctggtaaggtgttaatttcgttaatcaaaatttctccagtagcttctacatagaaaaagtctactcgcgctaaacctgcaccatcaactgctgcaaaggcttgtaatgccatttcttgaatttgttgagttactgtttctggtaaaggtgcaggtattaataagtctgctttaccctcagtatacttggtttcataatcgtaaaaatcgctatcaaaggtaatttcaccaataacggaggctttggggttgtcgttgcctaaaaccgcacattctacttctctggcaactactccggcttcaactatgatgcgtctatcataagttgcagcgttatctaaagctgtttctaattcttgacgcgatcgcactttggctattcctacggatgaacccaggttagcaggtttgacaaaacaaggatagcctaatgttgcttctatttcatcacacaatttaggaaatatacaagggtttgaccaaatttgcgctcttgttattgctttatactttacttgtggtaaacctgcttgggcaaaagcggttttcatagcaattttatccatcccggcggctgaacctaacaccccagaaccaacaaagggaacttgcattaatgttagtaaaccttgaattgttccatcttcgccattgggtccgtggagtatgggaaaccacaaatcaatttctgctgtttctgcgggaaattgccataaattagggtttatagcgggattttctgtggctaaaccagattttaaaacttgttgtgcagtttctcccccttgccaaacaccatttttttggatgtaaaaaggcacaatttcatatttctgactatttgcttctgcactcaaagcatttgcgatcgcccttgcagaaattattgatacttcatgttctccagaacgtccaccaaacagcaaccccacccgcagtttagacatcttccttacctcgacactatctaaaggtgatagcgtaccacaaggaatgttattaggagttaggagatcaaggagtcaggagaaagataaatatttcctgtttcttgttttcacagtcaccagtccccagtcaccagtccccagtccccagtcaccagtcaccagtcaccagtcaccagtccccagtccccagtcaccagtcaccagtcccctgtacttcaatttttctttgctaatgtcaaaccatcagctatgggaactaaactcaaggtaattcttgagtcttgatataatttttgattaaaggcgcgaatttttttagtttgattatcttgtatttctggatctgctactttcccagaccataaaacattatcaatggcaattagtccaccgggtcgaattaattgcagcgatcgctcataataattttcatagtttcctttatcagcgtcaataaaggcaaaatcaaaactttctgcttctcctgctgctaacaagttatccaaagtttctaaagctggggcaatatgcaagtcaactttatctgctattcctgctttttcccaatatcgtctagctatgctggtatattcttcactgacatcacaggcaataattttaccatctgctggtaaagccaacgccactactaaggaactataacctgtaaatactcctatatctaatgttttttttgctcctatcaatttaaccaacaatgccataaattgtccctgttctggggaaatttgcattatggacattggtagctgggcggtttcttgacgtagttgggttaaaatttctggttcacgtacagaaacagaaagtaaataatcatacaggttctgttctaagcctatagtttgttttgccatgactgtgatgctaaatttattgaactaatatatctgtatctcagtattttttattagacatctccagaaaagaaattatggaacctatttatgggggcagggcgaagcatttgggatatctagatgtctgatttttccgttaaattatcgtccaaatgcttcgcccctacaacttatgacaaattaatacattctattgtggagatttctatttaactaggacttacgcactgtacaaattcaccatgatgtgcatgaacgaaaatccgtcgtttcaggcttttgtcgattaacttccgatcaatagcgaactgcttgcagcagcgcttcgctatcgctcaaaaatcattaaaaaatcacgttaaaaagcctgaaatccgtacctcatatttggttgatcctggcgtaagtcctattaacttaacatattttttccttatgacaattataaatgcgaattttacagtttttgaatcaggataagagcatgattatgttgagagatgttgcgagaaaagagaaagctggaattttttaactaatttgccactagaatgaataaacataagtaaaaatgttctccagaaacattattaagtaaccagcttgtattcaagggggtaagatgagtcgtccaatcattcttggtattgttggtgatagcgcagcaggaaagactacgctaactaggggtattgctcaggtacttggaccggagaatgttacactcatctgtaccgatgattaccaccgttatgatcgtcaacaacgggcggaaattggtattacagccttgcatcctgactgtaattacttagatattatgcagcagcatttatcgctgctacggactggtcaaacaattctaaagcctgtttatagccacaaaacgggtcaatttgagcctccacagtacattaaaccgaataagtttgtcattattgaaggtctacttggttactctacccgtgctgctcgtgatgcttatgatgttaaggtttatcttgctcctcctgaatcactacgggcaaaatggaaggttaaacgggatacagaaaaacgcggttatagtgaagaacaagtattagcagagttagaaaaacgagaacctgactcagaagcgtttattcgtccccaacgtcaatggtctgatattgtggtgagtttctatcctaccaatgaaaatgaggatgaaagcaatggacatctaaatgtacgtttggtactgcgtccaactattccccatcctgattttagtcagattattcacccagatgatgatgattctgaatcagcggtgcgtttgggactaggtagggatatgggtaaaccggtggatgtgttggaagttgatggacacgctaccttggaacaggtgaataagatagagcatatcatgtgtaatgatctgccttatttaaagaatatttgcgatcgcgaaatcaatcctgaacttggtaaaatcgctggtacaacaggggaaacattgcaaagttaccccctagctttgacacagttgattattacctatcatatgctcaaagcaacgcagattcatcagtaaataggactgctgattggtgactggtggttagcagactaggcagacatgataagtattaaacttaatcataaaattcgtaactaccacctgccaatttacaaatattgatatcatatttttccactacatcaccatcagcaaatttggcttgaaagtcatagatacaagttgtgcgctcatcattgaaattaatttctatcgcctttccagagcgtaaaacatcatcacctaaaatatcgttttcccaatttttaaccccactaggagaagcgtaaaattctgtcatatttgcccttgttttattttctaacagaatggtaatgtcttcagccaaaacttttgatgtatttgctaatacactgggaataaccaaagcggttacggcaacactggtcaaaaaggttttcagttgcatggtgacaactctttaatttaaaaaaaaaggatactttaaaagtatgtgttaaaaaatagctacttgtcaaataaggataccttatatccagcaagtcctacttaccaaaattcccggctatttagtcataaaccaccccaaaaaccccaaaaccaacaacaaaggcatcaaccaatcaccccaacgcacatataaagtctgactttgccgaggataaatagtttcagcgtgggtttcataaatattataccctgatttccacaaagttctcccatgaggatcgacaaaagcagaataaccggtatttgttgccctcacagcccatcgatcagtttcaattgctcgcatgatatcctgggcatgatgttgatctgccattgctgccgtataatgggcatcattagaagaactcaaaataaattccccaccattaacagcctgatatctaaagatttccgaaaaagcagactcataacaaatacccacaataacccgccccaaaggagtatcaaaaacttgattttttgccccatgtacttgatgttcatccaaaggagataaccgttgaactaacgccccaataacttcttcaaaaggaacaaattcccccaaaggtacaagctttgacttatcatatctactagtaacttcccctttaccatttaccccaaataaactattagtataacttctccccctttgcccaaaaccacctatccaaactacaacccctttatccttcaccgcatctaacaaagcagtattttgaaaattacgttcatataaaggtaaagcaccttcaggagttaataccccatcaacaccttgatttactaatgttaaatatccattagtatagtttgtaattgctcgtctaaatccttgaggaagcaacttaatttcattaggaatattaccttgaacaatacctattttcaaacctgaattttcacgattattcaaaggttgggaataaacaacaaagcctaaaacatgggagataattaacagtaaaacagcacaaaccaaataaccattaaaaaaccccttccttaaactccttttctcctctgcgtctctgcgtctctgcgtgcaaaaataaatccaagactccgcaaccaacccattaaccgccacaataaccgccgttaccgtattcggtccagaaaattgccccaaatgcaaaattaccaaattatgcggtgactgagtgtaagataaagaactccaccacaaagatccagaactccacaaactttccaaaccacaccataaagctgtaccaattaacacccttaaccaaggctgttgcttatctaggttaaccatcaaaaacgcccacagagagactaacaaacctccccacaggctaataaatgaccagcaaaagatggtaataaataaacttggccaccagggtacacctaaccatttcatggggtgaatacctgtgatccatgatagggctattccatgataggcgatcgcccaaataaaggcagggggcagggtgcgggggacaggggaatttttttctgttgtatatttaacaactatcacccaaaggggtgcaagggcaacccaagccaaaaaccaagcacagacaggggcgactgtcacccccatcaatgccccactagttaaagctaccaggtaaggaagcaagtattttaacttgtcccttgttcttttactcagaatcttcaccatctccagcatcggggggaactactgctactccggtaatggcatcatcttcatcgagtttctgtactcttactcccgttgctgtccgtgattgtacagaaatagcgttaacagattggcgaataataatacctctgtttgtcgccatcatgatctcttcgtcagggttgactattcgcagggttgctagttgatccttggttttgcggtttttgaatttggtagcggtgataccttgtccagcgcggttttgtagtctaaattgtcctacgggtacacgctttccatagcctcccatcgtgatgattaatacccatggtcctgtgctgtttggtgtttcggtggtttcttcgctattttctgcggtttcttcaatttcgatggtttcttcttctagttccgcttctgtttctgtgtttaaggtgtcgagaatggccgcaggaagaatatccattcctaccagttcatcaccgggtttgagtttcattgattttaccccacgagttgcccttcctaaaggacgcagttgatcatgggtacaacggaagtgtatggccataccatgacgtgaaccgatgatgatactatcttctactttggcacgtctcacccaacgcaaatgatcgccttcttctaaggatatggctattaacccgttagcgcgaatgttgctaaatgcttctaatgcggtttttttgatgttaccgcctttggtgagcatgactaaatattcttcgctgctaaattcgtctacaggtacaatggaagtgattttttcttctttgggtatgggtaacatctggacaatgggtgtacctcgactggtgcgtgaaccttctggtatttgatatgctttgaggctgtaaactacgccgcgatcgctaaaaaataagacgctatcatgatcacagcaggttaaaaaatgctcgatggtatcatcttctttgactttagcaccggcttttcctctggtagcccggttttgagcttcaaaggtattcacgggcatccgtttgatgtaaccttgttgtgtcaccaaaattaaaactttttcgttagcgatcaagtctatatcatctatttccccttcggcgtgggtaatagctgtgcgtcgcggtgtggcaaactgggttttaatttgggtaacttcggtttcgataatttccagtaccctttcccgtctatccagaatatcccgcaagtctgcaatttgtacttgcaattcttcatgttctaagcgaattttatccgcttctaaggctgttaaccgccgcaattgcatttgcaaaatggcatcagcttgcacttcggaaagtccataattgctaattaattcacctttggctgagggtgcgtcgggggcgtttctaatcaggttgataattgcatctaaatgagagagggcaattaataaaccttgtaatagatgatctctttcctctgcttttctcagttggtaacgagtacgtctgttaatggtttcaatgcgaaaatctaaaaagacgctgaggaagtttttcagggtgagtatttgtggttccccgttcaccaaagccaacatattcgcgccaaagttggactgaagtggggtttgtttataaaggttatttaaaacaacacggggataggcatcacgttttaattctatgacgattcgcatcccgtcgcgatcgctctcatctcggatatctgcaatgccatcaattttcttatcattcaccaactcggcaattttttcaattaatgccgctttgttggtttggtaaggtaactcggtaacaattattgcttctctagctgggcggttgcgttgttcaacggtttcaatagttgccacaccccgcatggtaattgaaccccgtccgctggtgtaagcttctttaatggctgatgttcctagaatttgcgcccctgtggggaagtcaggaccgtgaacatactgcattaattgagtatcggttatttctgggttgtgaattaatgccactaacccatcaattaattctcccaaattatgcggaggaatgttagtagccatgcctaccgcaattcccgaagaaccattaagtaatagttggggaatacgggaaggtaatactgtgggttcttgttgagaaccatcaaagttatcaataaagtctacagtttcagcttcaatatcttgcaataaggaatgactggttaatgcttgtagacgacattctgtataacgcatcgccgccggtgggtcattatcaatagaaccaaaattaccatgaccattaattaaaggcgatcgcatggaaaagtcctgcgccatccgtaccaaagcatcatataccgccgtgtcaccgtgggggtgatatttacccaaaacttcccccaccacacgggcgcattttctaaacgggcgatcgtgcaacagccctaactcgtgcatagcatagaggatgcgacgatgcacaggttttagaccatccctagcatctggtagcgcccgaccgacaattacgctcatagcgtattccagataagattgtgacatctcttgtcgtaaatccgtcgggataatcctctcctgtgaggttgtcataacctgcaaaactccaaaaaacgtagattttagcctttgtacttgacaaaatacaaaattatgtcaaattaatcttgaaaaattgtcatattttcctacaattctaacatatattgaccccgtttgtggtaaagacagtcaaacaaaaagatcatatcagagaaaagtaagaatttaggagtcaagagtcagaataattatcaaatcataaattcacaaattcaagattttattaaaaaaatgcagctaataattgaggattcagaattaaaaattcaagattgaggattgaggaataaaatcagtttgatgtttgatagtctacgccacggtgacaggtgacagtttcaagaattggataggaacgattttttctttaattaggaattacagctatttttaggtaaataaaccacattttgatttaggtttcgcgtcaacaatataggggcgaagcattcggatgatagtcttaggtaaaaaccgataattaattgtccgaatgcttcgcccttactgtcgtctaaagacatgaaaactgctgtaagtgcaggttttttcacttgccacctcataaaagctggcactttttgcaagcacttcggcttacttcgactgcgcccttcgacaccgcccttcgacaccgcccttcgacaccgcccttcgacaccgcccttcgacaccgcccttcgacaccgctcaggacaggctcaggacaggctcaggacaggctcaggacaggctcagtacaagtcgctcagtacaagtcgctcagtacaagtcaaaatagctaaaaccctttacctgtaaatttttcggatttatatggctaacgccacgctacgctatcagcaaaccctacttactttaaaagtttccaagaatgaacagggaagaaattgaagctatgtttgaattaagtgatttaaaacaaacacgatttgatcaagaagcgttagaagaaggtagagaagaaggcagagaagaaggagaacttaaagctaaattagaaacaattcctcgcttgttaacattagattgaagtacagaaaaaatcataactggttacagcaaggaacagtcaggctagaattacattcagtattttgctattcccgcccatgctaccagtcatctattctgacgaatttctcgaacaccaaaccggacgctaccacccagaaaaaccagaacgtttaagtgctgttgtcacggctctaaaaactgctgactttgcccaaaaaatccactggttaacccccacaccagttaaacaggagttaatgtcttggatagaaaccgcccacactgcaacatacattgaaaaactgaaacatattgcaactactggtggtggttatttagatggagataccccagtttccccccgcagttatgatgtagctttattagctgtaagtgcttggttagatggggtgaatgaggttttaagtagagaaaatcccgcctttgtgttagcacgtccccctggacaccatgccgaaagtgatacaggaatggggttttgcttattttctaatgcagcgatcgccgctttatatgccttacaacaaccaggtatcaaccgtgtcgccatcttagactgggatgtacatcacggaaatggtactcaagccatagtagaaagttacccagaaattgtttattgttctttacatcaatacccagcttaccctggtacgggaagagcttccgaacaaggcttttacaaaaatgttttaaatttacctctaccccctggcagtgatatcagcgtctatcaacctttgtggcaatacaaaatactaccgtttttaaacaactttcaaccagatttattaattgttagtgctggttatgatgctctagaagccgatcctttagcaagtatctttttgcaacccgaagattttggtttatttactcaatattgtttaggcgtaactagaaaagtcttatttggtttagaaggaggttatgaattactatcattatcaaaatcagtaatttctacacttcaggcttgtttgtaagtaggtaaacagaaaaaagcgcactatgtaacgaaaagtaaaatatccaaaaacctattccctattccctgttccctattcccttgtcatataggtttttactaaatctgggttaatttcctcaaatctttagctagaaaattttgtcatggggttttgaaatagctaaagttttgttaagatggtattgctaggaattaatcaccgaaattgacttatcagggtgtgaagaaagaaattacactaaataacactagtagccgcttaaagttcagaaggtgaacacatgaccacctacattttttttgacgaagccctccgaatgctgaccagtgcctatctgatctcagcagtcctgttaattgcagcttctggtataggtttagcagttattgaaacaattgaaaaaacaggagaacactaaattcacacctttgggtgtctttcaccaaagcaaaagttttaatttttaattcgggtttaattcggggttgctgaaaaagtcctttcgttagagctaggagtcaggagtcagaagtggtaggggcgaagcattagagcgactaattatcaatttttgtccaagcctattttccgaatgctgatgcttccagcacgcttcgcgaacgcccgtacaggagtcaggaggagagttaaaaactttttttcatctctggctacctacaaaattgcaaggtttcgcagtgagcatcagccatacggtttttcagactcaagacgctataaccttgcacctactgtctttcttatgagcctctaacctttgatttataaagattgaaaacgtacatcctcccgaatagcatcaaaatctgagtcagtttttacccattctttaactgtctcaggacgcaaattaattgctgtttgcagatttgcaattgcttgattaatattaccttgtagagcataactacaagctttgttgtaccaagcttcatgtttatcaggtttaaattacagtgctttgtcgtaggatgcgatcgcctcttcatacctacctaaattatctagggaaataccccggttgttccaagcattatgtttatcaggtttaaattccagtgctttgtcgtaggatgcgatcgcctcttcatacctacctaaattatctagggaaataccccggttgttccaagcatattgatcatcaggtttaaattccagtgctttgtcgtaggatgcgatcgcctcttcataacttcctaaattatgtagggaaataccccggttgttccaagcattatgtttatcaggtttaaattccagtgctttgtcgtaggatgcgatcgcctcttcatacctacctaaattatctagggaattaccccggttgttccaagcttcatgatcatcaggtttaaattccagtgctttgtcgaaagaagaaattgcagcttgataatcttgtttaatattttgtaaataacctaattcaaaaaacaatttagctttttgttcattatctatttcatcatgttcaataatttcgataatttctagaattttctgattggtttcttcaggagttaaattgacatacttttcataactgccttcctgaataatgcgatttgattcttgttctagggttgtggagtctaggggaaaattaaataaaccagaacgccaatcaaaaaaatcaggggcgcggtgaataaaatatttaattgcgaactgtggtaataagaatacaaaacaaattttaaattgatctctaaatctttctcgctgctggttaatgttaattaaaattggtggtacaccttcccagctataatgatgggtttttcgactactccaacctgctaaagttttggcttcttcatatttatacaatgcagattctaaacctgtaatgaataaaatattgatatagtttttattaggtaattgatcaacttctatatataaattagtaacatttttatttaatttgagaatttctatacttttatcactaatatcttctttaactttactaattaattgttcaccactagcaggagaacagcggacaaataataaagcaaaaccttctgtaaaccgcagtgtccgcagaaaggcttgatattcttcgtcttgttctatgggtaaatcattatcccattcacttagttttagaggcatagttttagaggcatagttttagaggcatagttttagataaataagaatcataaatataggttgggttgagtaaacccaacatttccaaaactgctgttattctgttgggtttcactttgttctacccaacctacaattttttattcaggatataacaggatataattgattataggcatcttgaaattctttgatccctttaatcagaggatgaatatcataccaaaatttagtttctccatcaggttcttgataacgatattctaaaatacaacgattaaacaataaaccccgatatagtttatcattaactatctcctttgtatgatgaacctttgccagtgcttcccattcattaaagtaaatggtatttttataggtatttcttaactcgctaattgaccgttgtaaagcctttttagaaatctgtaaagtattggtgtatttgagagcttccttcattaataataataaatttcgcacatgaccaccactcattaaacataaattttctaaagattccctgttgtcaaataaatgctcaatagatttactagggtctatggtagtgagtcgtttttggagaacttcaataactttattaattcctggtggatagggttcatttttaggagtttgtaccataatcattggtaatacttggggagtaccatatatatctactaatgaagatgatctgtcagaataaattaaagaaattggtactgtataaactaaatgacaatctaaagctttcagttgttcattgcgatctataaaaatttgatcatggttgctgcggtcttgtccttggataacaggaacaattctatctaaattatcagcaattaaaactaatttgtcatatcctgaaggtagattttttttgacatcttgaataaattcatttaatgcctgagttaaagtagtcgtatggggattaattaaatcgcgaattttgcggcgttcattgggttcactgcggatttttgtagtgattttggcaagttgtgaaacctgtgcttcaattgataattcatctaggaaaatttctgtttgtaagaaatcttttaaatcctcaaatcgtccttttaaccaatttaatatagctggtgaattagtttgatctttaaatgctgctaaaatattgcgagtgcaagctaaaagaatatctgtatattgaacatcctctggatcaatatctttttcatctgccggaaaatagacgacaaaaaacccttcttcatctaaaaattgttgtagtcttaataattctgtagattttcctgcaccacgatgacctgcatacagttgacaggtatttctatcagaatataaaatttcctttcctaatgcttccaatatatccccatctccccgcacttcctgacagtcaacataagcaggatctcccgcaggtaaaggttgaaagggatcaaaagcgttatatagctgtttaagaaagttaaaatctgatgtcattttagtagaaaatctcaacaattggcggtattttaacacgaaaatactgagattcatattttgaattacagctattttcaggtaaataaaccacattttgatttagggtttgctgaataaacctaaaaccttgatatatcaaaggttagaggctgataaacacagaaattagtgcaagggttttgaagggtataccggaaaaagtgtgcatttttggggatttcaagagatggcaaagaaattttcaaatctcctcctgactcctgtacgggcgttcgcgaagcgtgctggaagcatcagcattcggaaaataggcttggacaaaaattgataattagtcgccctaatgcttcgcccctaccacttctgactcctgactcctatgccctcacggaaagactttctcagcaacccctatttaggtttcgcctcaacaatgtagggagtgtcaattctgtcctcaaagattgtaggatttggtaattaacttttattaatgatcagtatgtctgtttcggctactttatcccaattggttgaagttctatcagcccatcctgtaaatttatctgcatctgcattagctgaagtaagcaagggtatccaaacagacaccaggattttacaaccgggtgaagtgtttttagctttacgtggtgaaaaattcgatggacacaagtttgtacaaatggcgatcgccaagggtgcaattgccgccattgtagagtatactgatgaaaaccctgacatacctgtattacaagttcccaacaccctgaaggcatatcagcaaattgctagatggtggcgggattcttttactattcctgtcattggggtaacaggttcagtaggtaaaaccacaaccaaggaactgatcgccgcagttttaggaactagaggacaagtacacaaaacctatggaaatttcaacaatgaaataggtgttcctaaaacgctgttagaaatgggtgcagaacatgattttgcagtcatagaaatggccatgcgaggaaggggacaaattgcggaattaacacaaatagctagtccaaatatcggtgttattactaatgtgggaacagcacatattgagctactaggttcagaacaagcgatcgcagaagccaaatgtgagttattagcagaaatgtctgatgctagtgtagcaattctcaattatgatagtcccctattaatggagatagcaaagaaattttggcagggaaaagtgattagttatggtttttccggtggagatattcaagggaaattagttgacaatgaaactatagaagtagcaggaatggatttaccattacccttaccaggtcgtcataatgccactaattttttagcagcattagcagtagctaaggtattagaaattgattggcaaaccctaaaaaaaggggtaattgtgaatatgccaggagggcgatcgcaaaggtttacattacctaatgatattgtaattttagatgaaacttataacgccgccccagaagcgatgttagcagctttgcagttattagcagatacaccaggaaagcggaaaattgccgtattaggagcaatgaaggagttaggagacagatccccacaattacatcaacaagttggggaaatggtgcagaaattgaatttagatgggttattgattttagttaatagccaagatgcagaaattattgctgatagtgcaaaaggaattccttgtgaatgttttgctactcatagtgatttagtaaccagattaaatacttatgtaaaggagggcgatcgcttattatttaaagctgcccattccgtaggattagatcaggttgttaatcagtttcgattgtcaattgataattgataatttgcaatgagtcaggagtcaggagtcaggagtcaggagtcagaaggaagaattagaagcatctgacaattacttctcctgacctgaaagtgagaagattgggaaataggaaattgtttctttttttctttttttctcatagaaaggagagattgtaaacctggaagtaaacagtgaattaaacaattgtcgtaaggattcaggatacagaatacagaattaataagagttttcgattgattcttgataattaatgaaaaaactttctcctgtaaattctggctacaaacaaatattgttcctcctgactcctgactcctgactcctgactcctgactcctgactcctgactcctgactcctgactcctgctgtaaagtataaattattaattatgtattataaatcctgaattatcaattatggctgttgcgacactccatgtaaatcccgtcataggtaacgatgctaatacaggttctcggttaagtccgttaaaaagtatcacccgtgccttaaaagccaccagaaccccaggaattattcagttagcaccaggaacgtatagcacttctaacggagaggtgtttccgctgattattcctggggaaatgctcatagtaggtaacgaatctaacaaaggtcagggaattattatttctggcagtggccagtatcaaagtcctacctttggttggcaagatatcacattgctgttgttaggtaatgccagtttgttaggggtaacagtgatcaatcctgtttctaagggtactgggatttggattgaatcaacagcaccgactttagctaataatacattcagtaaatgtggacgggaagggatatttgcaactggtaaggctaaacccgccattttagataatgtatttattcaaaatgctgccagtggtttaatgatggcacgttatagcaaaggggaagtgttgcggaatgtatttgaaaataaccctgtagggatagctattagcgattttgccgcccctctagtggccaataacaaacttgccaataactcgataggtatagccctttctcgtgatgctagtccggtattacgacgaaatttgatttgccaaaatacccaaggtggtttattggtaaatggtaatgctgttcctgagttgggtaaacccgaagatccggctgataatatttttcgtgatcacaaaaattttgatattcaaaatatatcatctcaaaaagtgatttctgtaggcaatcagttaaatcctgcccaagttcagggagtagtaaaatttctcgctgctacagccgatactcctagtcaagttattagtaccagtttttcagacttagatggacattgggcagcggcgtttgtagaagctttggtgaataaaggttttattagtggtttccctgatggcacatttcgacctgctacacctattacccgcgctcaatatgctgccttaattactaagacttttcaactacctgctagtaataacctgaatagatttaaagatgtcagaactgatttttgggcagcttcagctattgctagtgcggctgatgccggttttttgagtggctttcccgatggtacttttagaccaggacaaaatttaaccaaagtacaggcgatagtatcaattgttaatggtttaaaatttacaggcagtaatcctaacgggttaaatgtgtatagcgatcgcgcccaaattcctagttatgctacaaatgcagtcacagttgctactcaaaaactgctaatagtcaattatccccaaatagaactattagaaccactcagagaaattactcgtgcagaggtagcagcattaatttatcaagctttagtttccagaggtgaggcacaagttatttcttctccctacattgtcaaaccagatacagaaattccctcattttctgatttggtaggacattgggcagaagcatatattcgggcgttggtgagtatgaatttaactcaaggttttgctgatggtagttatcaaccagataaagccatgactcgcgcccaatatgcggctttaatagccgctgcttttaaccctacacccaaacgtcaaggaatagaatttatagatgttcccgctgatttttgggcagctaaagccattcacatagctgctagaggtggttttgtcggtgggtttagcgatcgcacttttcgcccagatcaaaatgtgcaaagaatacaggtgttagtttccctagtcaacggactcggactaccaccagctaacaatgctaataacaatttattaactgcctacactgatataaaatcagtacctgaatatgccagaaccgcgatcgcaaccgccaaccaacacaaaattattgttaattatccagatcccaaacttcttgcacctaccagacaagccacacgggctgaagttgcagctatgatttatcaggcattagtggcaattaaacgggttaaaggtatttagttattagtaacagggaataggaacaggataaaattcctcaactcttgctgtcttgcttgttgccttgttataaagaaaagttttaacactcaccaacttagtgtaatgcctagcttaaaaatttctcagactggattgcaaattactaaacaagctcgtaaagaaaaaggttggacaattgataatccgctttggttagaacaaaccagtcaaattattgaacctaattgtaactgggaaaatgccgaagtatttgcagcaggggtatctttagcgacatggaaacgcttccttaaaggtgatgccattgatgcctcagtatttaaagcattttgtcaggttttgggtttaaattggcaagacttagtggaacgtcctctcaattcttccatagctaatacaacccaaatcccctatattcccttattctttggcagacgttacgaactagcgacacttagccaagcaatagaacaaagaacacccctgattgtcatcacaggaataggaggtattgggaaaacagctttagctgtaaaattagcagaaaataggcgatcgcattttcaaaaaactctgtggttttcctttcaccacaacccaccagcaacagataaaccaccagatttagcaccgcaaaccctactaatttttgatggttgggatgcaattttagggggtaaccgcgggggacaatatcgtgcaggatatgaactatatgcagactttctccgcagtgttgtccaaacgtctcatgatagttgtgtgatgatcactagccgcgaacaaccagagggactaaatcttttaagtgctgcgggtgcggtgatttttcccctgagtggacttatggaaggtgcaattgaacttttgcagcatcatcaacttacctttgatgctcaacagtggattactctagttaatcaatatggtggtaatcccttatttctgaatatggccgccaatttcatccatgaattatttgctggagatgtgggagagtttcttgcttctggaacattagtctctggtgaatttgctcccctggtaacacgatggctagaacaaatttctcctttagaaaaaatgattatggagtttttagccactaaattacaaggattcactcgtcaagaaatactcttaaacctcaaaaataatgctgctaatggcgatattttagcagcactcttatctttaaaacgacgagcgttgatagaaacaatcaaaaatgaagcaatggaaagattttatctacaacccgtgattcttaaatgcgtacagcgattatttaattgttaatcaaacgacaactcaataattgagattttggataagttttctgtagctgagattgtcgttttaaatttgggcgaccgtaggtggataactggctaattactgatggttgcggtggaagtgagaatttttcttggctcaaatcatcaaataaaattactgtatgtaattgggaagtttgatatttttgagcgtaggtttgtgctactttctgccattgttcaggaggacagtaacttttatcaataagtaaaattgcacgtggagaaatttgtgcgatcgccactcccgcaatcaaaaataatccccaaccccatcctaaaattttgaacaaagaacgattcatacatttacaaattattcacaagttggtgtaattcttctctgaagaaatcagatccccgacttctgtccattagtcataatttattggacttatcaaaagaagaagtcggggatcgaccttattgattaaactacctgaatccttacaagttggtttgcaacagttcggtgaatagtgtttgtagtttttgcggatcgctggatttcacagtagtttctcgcaacttcgcaatttcttgtaattcattttgattaacttctccataaccgatgggatagaaacgcacaccactatatttgagaacattggcgatttcgttaaaccgtaatcctgtattcacttcaccatcactcagcagtagcaaataaaatcttccattaggatcagttttttgacgttccattagttctgataaaccgactatcatcccgtcatacatagcggttcctccatcagcgatgagggaatcagcggccgctaacaaacgtttgtgttgttgtgtattaaaaggagcaaggggaagtatttgttgagggcgatcgctaaatgcaactagtcccacatagttaccaggattaattgactgtgcagcaattcgcagactgtttttgacagcttgtaggcgatcgccttccattgaaccactggtatcaataaccatcatcaagttaactgtccgtccgccgtctttacgctgtttccaataagactgcgccgctttcagaactgcaccattaggaatgggtggtaaaacccgacttttgaactgttcatccgcattaaagccttgtgctttggctaactgctgcatttctggagataaagcaaattcactaaatcgccgtaaaccttcattttgggacgcagtattccaattaaaccccaccaaaggattatcattagctactccaaaggggataaacaccacatcttcaaatcctggcagtttcttcaaagtttggtaactttgatattgtagaggaaacgcttgtagtttttggttgtcgcggataaaaatatctttcaattcaagagttgtcagcgttgtaattaacacctgattttgaaatttatcaaataccgaatttacctgtggtgattgtaattcagaggtagtgagaggtttaccatcttgatcatgtcctgcactccgccaaaataaagtgtacagtaaatttaaagatgtactgctactgtaaggattgggatagccaacagtgattttacccgataaaatggcatctagtagtttttcaaaggtgacatcaccgttttttgctagttcttgattagctttcccatccaccacaaaaccaacaaagtcagatactaatttgggagtaataattgaagttgtgactccttcagatgccaaaagttttaacaatagctgattagaaggagaaaacccagccggacttgcttttttagccgctaaaattcttgtggcagtaccagagggaatattgcgaattcctacctgaagaatttgcccagaactattagtaatttttttggcattaaaggcttctgcaacatccaccagccaacgttcatcttgcttttgggcattggatttttccgccgaaccaaaaatttcaacataagcaatattactatcagttgatggcttggcaccatagagaggaaaatcttccagatttggtaaaggttctgctaattttttaatactgtaactttgggcaactgcatcagaaattgtagctttttcgatgctaatttgaggtaataaagattcttgtacaacccggtaagcactgtcaaaagaatctacttcaggggtggtaaagaacaatattgatgcgctaattacagacatccacaaaaacaagacaaagatgtgttttcggagttttctaacaattttcatagctatttttagatgatagaattttaacacgcaaagatgagaatatgtttagtggagggcggttttatttgctgtaattatcaattgcaaagttttgggaagattgatattaggatgagtatgattgaggtgggagagtaggatttgatcctgtaattgttgtaattcgtcgtgtgtttgttggaggcgatcgcaactaacttgtaactgttcctttgctaagggacgataggtggaagattgcacttgattaactgttactaaagcgaaaactacctgctgcgtcagagagattacggtatacaaagcctctaataattcgggaattaaactaggttctatttgagcaatttgagtagcgaattgttgagttgcttctgcccattgataagcttgtcgccaagttgtttgagaacttttatctatctgggtttcaagttttttcaaatgcgccagaaaagtctcgcgttctaatagattgtgtgttgattttggcaaagattggttcacattccaacaccaaaacgctatcattcctaatgcgatcgcaccaccaacaccaatcactaaccgagtcgttcccaatatcaccacaaagccaacgtatccgataattgccccagctacaagccagtaagtttgctggtagcgcgtcacattcaataaatatccagaaataatgcgattcatcttacccctgcatttaaaaactctcattctctctgcgtctttgggactctgcgtgagataaatcatctcccaaatacggaacatattcagaattatttaccaatttcaatttgctgtttttgaccatccaacaaacaactaataattgattagccattaataagcgccaaggatgacataatttcgctacggtacgtaagctttttggtacttttgcgtaattccatttaaaatatctgtattatttgcttaattatttgcttaattatttggttatcgtcctgagtttatggcttattgcatcaatcccgattgttcacggcgcaaaaatcctgataattgtgcggtatgtcaaaactgtcaaacgccgctgatactacaaaatcgctatttaattaaacatcccctggaagctgaacaagataactatacaaggtatacagaagtatttgaaattcaagatttagttaacccagaaaagccgaaagttcttaaatctctcaaagaagtctcaccagaactagagcgactctttgagcaagaagcatcaattctgatcagtttacgacatcctggtttacctgttggtgaagtgatatttccgcttgttttaaatacaaatcgccaattacgctgttttgtcatggagaaaataccaggacaagatttacaaatttggctatctaaaaataaatatttaacatcttataaaatagcattaaattggctgaaccaaataacggagattttgcaatttgttcatgagcagaagttattccatcgcgatattaaacctgcaaatattatgcttcgtcctgatggcaaattagtgttaattgattttgggactgcacggaaattaacccaaactattgttaacggtaagcgtcttacagttattcattccattggttacactgctcccgaacaacgtgacggtcacgctgttttacaatcagatttttatgccttgggtcggactttgatttatttactaacaggtattgaccccgcaggcgataactatgaagatttacttaattggtctaaatatatcaaagatccaaaaactccgaaaaaattaattaccctaattcaaacgatgaccgttgctgactgtaagcaacgcccaaaaaacacgcaagttattcttgagcaaatcgcgcagattgaaaaacatccccacctgcaatggcaaaaattattattaacaacaacttgtggtgttttgctgctaattggtggtaaacaaatatatcaagaaattgccatccctcgcacttgtgaccaaacactagacgatcatctcagttgcggcgaagaaagtctgattcctagtagtttttggggaaatggtcagcctccaccagccaaacaattagctattgaaaaatatcgccagcaaaattttgcgaaggctgtgaatttatttgaagccgctttcaatcaagaagcagatgcagaaactttaatctacctcaataatgccaaaattcaaatccaattcccagccaataagatttatacaattgccgttgcagtttccctagaacgttctactgctatgggtctacaaatactcaggggtgcggctcaagctcaaactgaggcactagaaaaaggtcagcctctgcgaattatcattgctgatgatagtaatcgtccaaatgctcaaggtacaatcgtcaatactgccctcaaagttgccgagcgtttggtaaagtatcgtgatttactagctgttgttggtcactataccagcgacaccactaacctaaccttgcctatttatagccgagaaaaattagtgttagtttctcctactgcaacctcccataatctcaaagggcccttttttttccggacggtctctggtactgccgttgccggaccaagaatggcaacttatgtattttccgaactaaaacaacgcaaagcagcagttttttatagtgaaggtagtgagtatgctgaatctctagccaatcagttccgagcatcagcaaggtcgttatctggtcatgtgattgaccaccaaccagcttttaatctcgccagcaataaatttaatgccaagacagcattaaatcaagcgcaaagccaaggagcaacggcaattgtcctgattcctgatgctggtgtgggattgcgtgatagcattcaagaagccttagaggtcattcaatcaaacgtcaaccaatcttggataattgcaggtaatagtctctacaatcctgatttattaacatcagatcagattacatcttcaccaggaattaaacgcacagtttgggcaataccttggcatcccatgaacgaaattaactccgcgtttgcagagcaagctcaaactttgtggaaaatcaataatttccccaccaacacagagattacttggcgcagtgtcaatagctatgatgctgtgttggtattaagtaaagctttagagcaaaaccctacacggaagggtattcagcaagtgttgtctagctccaacttttccgttgcaggtgcgactggagtggtgcgttttgttggcagcgaacccaacaatgggaaaatcacaatggtgaaactacaacctaattgtcattccagtggttttgtatttatacccactggaattaagcaaagacactcttgctccctttaattatttttccctattccctattcccagcatttaatggtaattttgtccagaggttaagttctactatatcattttgcataatagcgattgacaagtagaataaaagacactaactaacaaatttgcggcttgtggaaaaaattcatgtagctaaaaagacgttaggctagatgcgatgggtgaaatatttatacctattgcctggaaataacaacccatgctaacaacaacaccaaacaccagcggcgaattagccaccaacttattagtccattatagttttgacctgaatgggtatgatgccagtgagttaattaaccattggcgaaaagactacccgcttaattggctacatttagcagttattgaagctctgtatcaaggacgctataaagcgatatcagtacaacaaatattaactttttggcaaaggcgtgggcaggtgtctcatcatttcaacatggaatttgaacggatgatttgtagcaaatttccagaaagtctcaccaaaacatctgcacccattttaccagccataccacaagcaacgccaatgcacccagccaagacaactcaaaaattacctgctcagcctagtaattattacatggagagtcacactgcatcagaatatgtagcagatcaagaacaacaagttagagcgttaacaaccccctcgtttaaagttgctatggataccagcaagagacagttagccgcatctgtgagtcaaaagctcatgactcagggaagtttatcaacacctaaggaactaccccaattaatgccagcaaatgccaataatcccccaattggacaatttactcctcaaaggagcgatcgctctgattcctttacatctaaactcaaagctatgactagcgaacagccagaatttgctatttaggggactggtgattggtgactggtgattggtgattggtgactggggaagattaataacccaatgcccaatgccccatgcccaattaattaaaatgctggataattcctctcaaacccatgctactcaaggtttgaaccatttgattagcactatcttgactgctaaaaacgcccacttgcatgactctgcgaccttgtaagactctagaaaaagcatcaggaactattgaacgcactaattcctgttgtgagtcactgataattggcactaaaacccgataacgtacacccggacgagtatttgtatagcttctgggtgctgtggctattctagaattactaatagtttttgggttatcgggttgttgatttctcataagttgaggtgcaataaactcaataacccctggttcaacctgcacataatttaattccgatgtgttttgggaatcatttctgggcaaagaaccctgtccattaacattggtagttggtagctgtggtaattgactatttgggcgtgtatttcccctactcgataaaatcacgccagatgggttaaatttttggggaatgttggcagcagcaaaaactatttctggttctgtagctatttcctccacaggtacagaagtaagtggagaatttctgacgattggtgctgttgtgccgctagtatctacattgccgctaatgcgatttttattgaggttattgccagcagcataaactacttgtttagcagctttggcgttaatatcataacgacgattatttctaaattcattaccacccggttctctgctattacctaaatctggtgtagcttgggcaatgactactaaaccatcttcttgactgccttgaatgagattattccgcaaaactgggctagtattggcttgaactacaatccctgatctattgtctaaaatctgattaccaaccactacgggagccgcattttgggcaatgttaatcccaaaaccggtactttgaaagagattttccctaatttcaggacgggcatcaccagaaattgtaattccattagcaccattaccctgaaaataatttttgcgaatgctgggagtagcattaccagtgatggaaattccatcttgggtattgctggtaaaggtgttttcctcaactaccgtattagcaaattcaatccataaaccataaccacggctgttagagttggtgacagtaacaccgcttaaactggcttgatttgcacctacaatggctacgttttgacggccaaagctgcgactgagatagtcaccaccaccaacaatatttactcctttgccttttttaccaatatttccctgaatagctacacctggtttgatgattaagggaaatacttctcctgtgttggcgctgtatgtaccagtagccagcataatcacagtatttgattgtgctagttgcaaagcttgagtaattgtcccaaaaggagcgtttcgactaccattcccattttggtcattgccgatactggggttgacaaacagcaggttaacttgagaaattgtactctcatcgttaaatttctgttctgatctgatggtaatctgagcaatggcgctgctaaaatttgtgtctaaaagtgctatacttcctattcctaaagcaacgctcacacttaatattgaggtgggcagaactgaaggtttaagtaggtaggagcaaatccgcttttgtaaagggatatttggtagacgcttatgaaactcttgaaggggaggcataaactttatataactcctgaaaaacacacaaatgatttttatccgctcaaccagtcttgtccataatattcttatttttcacccagtgcctgtttttgatccgggtaaatttagtcaatttttcacaaaaaaccgcaaagatgcagatattatttaagaggctggatgtttctgtgagactacaagcaaggttattttaatggtcgaagcccacagccaaacacaacaaatacaacaagtggtttatcgcattttagacgcaaatttggatcgcgcccgcgaagggttgcgaattattgaggaatggtgtcgttttggtttaaatgatgcccagttagctgaagactgtaagcacctccgtcaagaggtctctaagtggcatactgcacaaatcagggcagcacgagatacgccaggtgatattggtactgatttaacccatccccaagaagaacaacgaagttcaattacatctttgttacaagctaatttttgccgtatccaagaagctttgcgggttttggaagaatatggcaagcttcatgatgccgaaatggggaaaacttttaagcaaatgcgctatcaggtttacaccctggaaagcactttgatgggttatcaacgtcatcagttactttggcgatcgcgtctgtatctggtaacatccccggtagataatttgttggaaactgtggaagcctgtctcaaaggcgggttaactttgctacagtatcgagaaaaatctgctgatgatgtgattcgtttagatagagctagaaaactacggcagctatgtcacgattatggcgctttgtttatcattaatgaccgtatagatttggctttggctgtagatgcagatggggtacatttgggacaacaagatctacctattgctgtagcccgtcagttgttgggtccccagcggttgatcggtcgctctaccacaaatcaaaaagaaatgcaaggggcaattgctgaaggtgcggattatattggtgtgggtcctgtatatgaaacaccgactaaagcaggtaaagccgcagcaggtttagattatgtgaggtatgcggctaaaaattgtcaaattccttggtttgctattgggggtatagatgccagtaatattaatgatgtcatggatgcgggagcgcaacgggtagctgtggtgcgatcgctcatgcaagctgaacaacctactttagtcacacaatattttatttctcagctttataggaagtaggggactggggactggggactggtgactgggaagatgaataacgtaattaccaattacgaattatgtctaatcaaattagtttacaagtgaacggggaaacacgcagttgtttatccccaacgcttttaccagaattacttcagcagttgggttttaatccccgcttggtagcggtggagtataatggtgaaattttacaccgtcagttttggacagaaactcaaattaaagatggcgatcgcctagaagttgttaccatcgtcggtggaggatagaagaggttacaggtgacaggtgacaggtgacagcaaagaggcaggggagatggggagatggagaggaaaagatttttcccagtcaccagtcaccagtcaccagtcaccagtcaccaattaccaattaccaattaccaattacctaatttaatagacaagaataacgagattcaggattatataaccagcggtgataggttttgcgtttggctaattcttgtccttgacgaccgagtttttcccgcagttgttggtcttgacataatcttttgaaagcttgtaaaacttcataaccagaattgggatctaccaacaggccattttcttcatggtggactgcatccaaaatactccctaagcgagaggcgattacaggtttaccaaagtatcctgcttctaaatggactatttcaaaattatcaaaattatcaaaattatctatgtttctggctttgtcttcctgtaaatttagcatggcgaaaatgtcacaggctgcataataactggctaattcccgttctggtacattcccagcaaaatgcactcttttattcacccgcaaacgctgacattgggattttagttgttgttcacaaagtcctattccgcaaattatgtaatgaacatctacgccaatagttaatagtaaaggaatgttatctattactttgtcaaagtttttatttttaattaatttaccgacagaaagaatgacaattgctgtttcagaaatgttgtaagtttgacgtaagcggatacgtaaatcatccagatgactgagattgctaggagtaccaaacttttctagtcttactattgggttaatgacatgagtaggagtatctaagcgaaaaatatttcttaaagtttctctaatataagaattgttacaaacaattccttcggctcttttgagggtaattttcaataaaaatcgccataaaggatgacgggaaatatcaaccaaatcattaccgtggaggtagataaaaaagcgaatcggtaagatataactgagtaataacaaagctggaaaatcgtagccgtgacaccattcgatgtaacggtaatgatagcgaaaatataatcttatggctagtaataatgagcaaacaaagttaaaaaaattgaataatggcttgattataatgctcaaaaaattaccaccaaataaactcagccaaagactcaagttagtccaacgataaacaggaaactgttgtgatgtatcaaatattttatctccacagcaaccagcagccagtacaattactctgtctggatcttgtaaacaacgattataaatatattctccaatgacagcttcttggggatgaaagatgcgggagataactaaaatatctggacaagcagttttctccctaatttgtgttcctagttgtgaaatatgttccataattcaggttgataaataagctgcaaatttttaaactacagtagggaacttttaacagggaacagggttaaaagcatctaattaataatgtatttaaactttaagaagtatgaaaatagtctcatcaatctgtaaagtaaacttgatcgtgtttagagattgattgggagcattccaaatgtgtaaatttatttttatctagggaaataaaatgctccaagacttgatatgattgaactgcaaaggagacaaaggtaagagattgtgagagattgtgagagattgtgagagattttttagtgttgctgcgttcatttggtcaaaactgggatgctcctgattgattttgcaaattgtagctacaaaacttggttcaatatattcatgccataatttttaatcaatattgattatccccatttgctcaaaaattggtatcaaacatttgtttcttgtctaccaatttcttaccaaaggaggatttttaacatgattattttgacttgatgaaataaagctagagtttctcgttgatatgctccagtaattgtatagcgcctgctggaaaaattaaatctagctgatacttagtagattagcttgaattttgccaaaattcatgccaaaatgccaaaaagtcatgaataaatgatactttgaattatgctttttctatcaaaatgatgatttaaatcccataatattttgtaattcctcatagttaatactattatttattgtgttggatagattacaagtatgaaaacgaaaactatcaataaataggttgtcattttctttgattaatactggtgtaattttaccaagctttctcaaggtaatagctgattactgatagctaattactgataactgattacttaaacctccttaccaatatgtgctgaacataggttattgatccggaaaaaatttattcactatcaaaaataatttaaccgagaggttgttatacctaagttaaaattattgctgttaagtatgtcatgctccagagaaggtaataattaattgattccaaagttttgcactggtacagatattttgcggtacggttatcaaccaaggaatcttcgctgtcttccctgccaagtagtgtgcattcacggtagattaaagatatggctgacaatccctgcggcagattgtggtgattatgttctaccttgtctgaatcctagcaataggagaaaaatcttaaaaatattgttttttggtagcttgctttatgcaaaaaaaattacaacgaatcctcaaacccctgttaaaaatttcttttgtcctgggtctggttttagctttagcattgggtaatgctgatggtgctttagctgcacgcagtggtggacgtattggcggcggttcgtttagaatgccatcaagcaggacttacacacctcgtacatactcacctcctgggggtgggggatattatcctggtggtggttttggttttccttttctgatacctttttggggtattggtggtggttttggtggactgttcacaattttgattttctttgcgatcgctaactttttagtccaaactttccgtcgtgtcaccagtggagatactgaagaagtaacttatagcagtaaccccaatgtttctatcactcggttacaagttggtttattagcacaagctagaggtttacaaagcgaacttaaccaaatagctgaaaaagctgataccaacactccagaaggaagagcagaaattttacaagaagcaagtttagctttgctgcgtcatcctgaatattgggtttatgctggtggtggtacacaacaagctaagttaaacgcggctgaatctcaatttaaccgtttatccttggctgaacgtagcaaatttagcgaagaaactctttctaatgtcaacaatcagttaaaatctgttttggctaaagaattacccggtaatgtggatagccctacccgtttaattagtgaaggtccaggagagtatattattgtcaccttattagctgcaaccttgggtaaatgggacattccccaaattaatagcgccgacgacttacgtcaagctttacgacaagttggtagtcttcccggtgagcaagttttagctattgaagtgttgtggactccccaagcagaaggtgatactttgacttctgatgatttgtttgctgaatatcctgatttaaagctggtttagtcaacctatactcacaaagtaaaatgtaggggtttagcaatgctaaacccctatctcattattgttgacatttaaacttcagcggaaaacaccacccgaaaacccgacattcttaaaccactttccgcttcattccaactgcgactagcactgcgacaaagttccgcgctaaaattccaagcaccaccgcgcaaaacccgacgatggatatcaccaccaatatcccagacactaccatttacaggtgcgccatgataattattatgccaaggatctgcacaccattcccaaactaacccgtgcatatcatacaacccaaaggcatttgctatatccaaactgcctacatctgttattttgttgtagaaattacttttgggttcaattgcataaatttcactaccgttacaattaattaaatcagaagttactgtttccccaaaatgaaaagatgtggtagttcctgcacgacaagcatactcccattctgcttcactcggtaaacgataatttcttcctgttttcagcgacaaccgcaaacaaaattctattgcttcataccaagaaacgttttctatcggtaaatttgcacctttaaattttgctgggttgggatttaaatcttgagtaactgtgggtaatgctgctaccgctttccattgtgcttgagtaatgggatatttccctatataaaaaggttctattttcactcgatgttggggatgttcatccgcattaccttcaaattctggtgaacccattaaaaaactaccactaggaattgataccatttctaaggtgacgtttctattcaattcttctgcgaaaaattgtgactttcctctgtctcggtaaagttctctccctcctgtatctacagtaataatctcaaaatcaaatgtttctaaatctggaacaggaacaataattttttgttgttttgtaggtgtttcgataataggggcaaattttaactctatcggtgttgatgattcgatgtttaaataatttgggaaattatttgggaaatcatgttttaaatcatgtaacacttctattgctgactgatatctatcactaggaaaatgttgtagcaaatgatctaaaatgtatgttaattcttcactaatagtaatccctttttcttgtaaacgttgtttccataaccattttgcattcatcggatcatacagaggatctttcaatccataggtatgttgcatgggtaaatcttgagttaataatctcacacaagttacacccaaagcatataagtcacttccatgacaagcaaaacctgccatttgttctgtgggtgcatatcctaatgtataaatagctgttgcttgtctagctatacttgtttgggtgacttgttttgcaccaccaaagtcaattaatacaggtttttggtctgcatttcttctaataatattctctggtttaatatcccgatggataacgttttttttgtgaataaaatcaataactggtaataagtctattagcagttgacgcacttctttctcagtatacgtcttttctttgacttcttctaggagtgttttcccaataataaattcctgcactaaatacaaacttgaaccttgttcaaagtaagctaataaacggggaatttgcggatggttttctcctagttcatacaaccgaaaagcctcttctttgaaaaattctgcggcttttgctcgttgtcctgttccctgcacttgggggaaaaattgcttaataacgcaaggtgcgtctagtctgtctacatcttctgctgcgtaagttttgctaaacccaccttcacctaataaccgcaaaacacggtaacggtttctgaggatttcaccaaatttatcatgtccacaaacgatgcaaaacttactgtagttggggttgaaggggttggaacaattgggattttggcaaatttgcatggctgaggggaagatagcattttttccaaattcagccccaatatttaattagttattagttatcacttattcatttatcagcagtaatcaaaaagggttatatatgggcgcacagatttcaattataagataaagattagaataattttgataatttgtcaatggttttttaattgttttttggtagctttatatcatatttttgtcctgtaaatagttatataatgtctggttgaacacttatcatatctgtggaggctggtaattggtaattgttaattggtaattggtaatggaacacctacatggtaagtgattgggcagacataatattatttactatgctaatttactatgctgattttatatttataaaccaataacctgtgtagagaggctgtatacaacatctgtgaataccacatctctacctttacctttgccattttcccgtaggttgggttgaacgaagtgaaacccaacttacagcgattttcaggtaaatgaaccacattttttaatctcacgcaaagacgcaaaggcgcaaaggaagaaaggaagataacaagaaggatgtggtacaaatacatgaaaactgctgtaaactcaacgtatttgttgggtttcgttcctcaacccaacctacaaatcaagatatttttgattttggcgaaagtattgtctacattaagttgtaaattggcggaaacctaactactcaacgccttgataaaccgctgcaaactcttaaacacactgggttttttcgcgggtgttccgtcagtggtttgtggttgttctttcatcaggatcatgtctatttcatcacctgatggttttttaggtaattcagctattttttgatattcgcctgcggtttctaaccacacttcccaatctccaggatagcagcgcataagggcgctttcatcatcgacaggacgcagataatagcaagattcaatggtactaatgaaacgtttgcgggtttctcgcgctgcataacctatacccactgtaccggagtcttccagacgggggtttaacatgacaaaggggcgttcaccaattaattcacaaagtttttctagttggggtacttctacggaagtaggggcgataaacaggaaaatttcatcttctggctgaatttttgcttctagggaagcagttcttcctgtaccgatatctaaaattttaaatggtacatctgcccagtctcgacaggctaaagcggctgcaccagcatctgcaaagaagactttaagaccagattcatattcagcgaatacagggagaaattgttctgcaactggcataaatttgagttctgggaacagtaactcaacttgaatgcgagtgataccatcagctaaagccgattttaccgcttcacgagattgagcgatcgcatcttctagggttttgggtagttcagccataatttacagaagtacgttttttcatcaattattaagaataactcgaaaactctaattcattttgtaggcgtaagtaaaagacggaagtaaaatgtaagctgttgtgcatttaatttatataagtggaacaggcatcttgcctgttaaacaagagtttagaatattaggattatacaatttagctgtgtaacagcttagtaatgtgaaattgtggttaggtgatgcagaattagcctttcaatcacgttaataaagttcaattttgtgaagaattcggggatatttttcaggagtatcccaaatatataagtttattttttgcctgatttaaagacgtgaaatgaacaaaccaccttaactgaagtgttcccgcaaggtaggacaaaaaggatacgaagggaagagagaaaaatagagtttttggtgttgctggggttattttctaaaaattgggatgttccctatttttcactatcaaccagatcgccttcctgaaaaatgatctaataatataccaggctttggctgtaaattttccaaaagaaatcggctatttttctgtttaaacttttattcaaatttacaaacacctaataccgctttccaaaccttcacaaacaccaacaagaaaatctaaatccaaactagcaatagtatcactcggtttgtgataattaggatttcgcataaatgccgtatctgtcaccataattgctggataaccttgatcccaaaaaggtgcatgatcacttagtcgagtttggggaactaataaaccccgatttggtactggtagtaactgacaaggtaaacccgatttactaatagcactacggatattgactaaatctcctaaagtcagtaaattgccaattaaaccaataaaatctccagtattggggtacaatctatctaaaaaagctggatatctttgcgaaccaggtctgcaatcccgatatcctaacatttccaaagaaatcattaaacgtagacgttgcttttgttggtgtaataaagcagcatagtcagcactacctaacaaaccatattcttccatatcaaaagcaaccaagcgcaaaggatatctagcaggtgcttgggtaaaaattctggcaaattctaacaaaactgccaccccagtagcattatcatcagcggctacagtaccaggtacaccatcataatgagcgcccaccaaaatcggaggaaaatcaagcttttgtctttcctcttgagcaggtaaatttaaaatcaggttattacaacttttactccccactttaaaggtgtggatttccacacttccccattgtcctaattgctgacggatgtattcttgaacaaagaaatgtcccgcactggccatataaggatcgcgttcccgtgctatttcttgcagatgattgagtaatctttgttttaaagtcaagatggtgattggtgactggtgactggtgactggtgattggtgattgggaaagaaaattattaattttgtatgagtgccttttgccttctgttccctgttccctgttccctgttccctttctgcaaatgctatcctatgtttggcaagtgacaggttaagctacaatttctctaaattatctaaattattgaatttatggaattaatgatgataattataccattgggcggtttttaacatctggttgcaagcggaaaatatgcctcccaatcataatatatagatgtagtcaaacacgcagcaggagaagagtaacgcatgggcaaggtagtcggcatcgacttgggtacaaccaactcagtagtcgccgtgatggagggtggcaagccggtggtgattgccaatgctgaaggtatgcgaaccaccccttctgttgtcggcttcagcaaggaaggcgaaagggtggtagggcaaatggccagacggcaaactgtgctgaatccccaaaatactttttttgcagttaaacgcttccttgggcgcaggtatgctgaacttaacccggattccaagcgcgtaccctacaccattcgtaaggatgaaatgggcagtattaaagttgcctgtccgcgattaaataaagaatttgccccggaagaaatttcagcaatggtgctgaagaaattggcggctgacgctagtcgttatttgggtgaacctgttacgggggctgtaattacagtacctgcttattttaatgattctcaacgtcaagctacccgcgacgctggcagaatcgcaggtttagaagtgctacgtattcttaatgaacctaccgccgcttccctagcctacggattagaaagaggcgatgtagaaaccatcctggtttttgacttgggtggtggtacttttgatgtttccattctagaagtaggtgacggagtttttgaagttaaagctaccagtggagatactcagttaggtggtaatgattttgacaaaaaaatagttgattggttggcggagcagtttttagaagcagaaggagtagatttaagacgcgatcgccaggctttacaacggttaatggaagccgcagaaaaagccaaaattgaactttctgcggtcagcgttaccgatattaacctaccctttatcactgctaccgaggacggaccaaaacatttagaaactcgcctcacccgttcccagtttgaaggtttatgtgctgacttaatcagtcgtattcgtaacccagtcaaacgggcgttaaaagatgccggactatcacctgtagatattgaagaagttgtattagtaggtggttcaaccagaatgccaatggtgaaacagctagtacaggatttaattggcattgaagccagcgaaaacgtcaaccctgatgaagtggtggccgtaggtgcagctattcaagcaggtattctggcaggagaaacaaaggatgtcctgttattagatgtcacacccttatccttgggtttagaaaccataggtggtgtgatgaaaaaactcattccccgcaataccaccatccccgtcagacgatctgatatcttttctacatcggaaaataaccaaaacagtgtagaaattcacgtagtccaaggggaaagggaaatggcagcagataacaaatccttgggacgtttcaaactgtatggtattcccccagcacctagaggtataccgcaaattcaagtagcttttgatatagatgccaacggtattttacaggtaacagcattagatcgaacaactggccgagaacagagtattactattcaaggtgcttctactttgagtgaatcagaaattaacagaatgattcaagatgctcagaaatatgctgatattgaccgggaacggaaagaaagagtagaaaaacggactcgttccgaagctttaattttacaagcagaaagacaactgcgggaagtagccttagaaatgggaatgcagtttgcccgcaaccgtcgtcaacgcattgacaatatttgccgggaactgcgagaaagtttaaaagatgatgatgatcggggcattgatcaggcttactcagacttgcaagatgctctctatgagctaaatcgagaagtccgtgagtattatgctgaagatgaagacgaagatttatttggtgcgattcgggaaatcttcacaggtgataaagaacgggaacgggattattctcccagagaaaactatcgagaacgggattcttataacagaaactatggtcgggactatggtaaagactatggtagaggcaatggtagggactatggtaaagactatagtcgagaaaatcgatcttcttcctatgataacagtcctcccccccgtcccagtcgtcccagctatcaagacaactgggatgatgatgatgattggctgtaaattttagattcaggagtcaggagacagaagtcagaagtcagaaggcaggagaaatgaaaattgtaacttttgtctcttcctgttccctgtttcctgttccctattccctgttcccactgataactaataactgataactgactatgcaaaacttgcaaaatttccgcgattattacgagattttgggagtcacaaaagaagcctctagcgaagaaattaaaaaggtttatcgcaggttagcaaggcaatatcaccctgatcttaatcctggtgacaaggaagcagaagaaaaatttaagactattggtgaggcttatgaaattctttccgatcccagccgtcgatcgcaatatgatcaatttagccgctactggaaacaaaaaggctttgctggtagcaaacagtcaccaaaaccaaagggttggggagatagtcgcaccaacacccgtactagtcaagaggtagatcccagcgagtttcctgattttgaaagttttattaatcaagtcataggtgttagtagtcgcaaagaaactaaaactaatactggtagtacaactactagcgacccgtttcgcactcccagaaccaaagttgcttatacagttaacaccccaccccgtaccactcgcagggatatcgaagcaaggttaactttgccactggaaaaagcttatcaaggtggtaatgaaagaatacgtttagaagatgggcgatcgctcgaagtaactatgccacctgctatggttacgggtcaaactatccgcttgcgaaatcaagggatcggcggcggtgatttatacttaaaaattactgttgaaacccatcctttatttaaactagaaggtgctaatatcttctgtcaaattcctgtaactcccagtgaagcggttttaggcggacaagtggaagcacccactttagatggtcctgtaaaaatgaccattcctcccgcagttagatccggtcaaagatttagattagctaataaaggttatcccgcagaaagtggaaaaagaggtgatcaattagtagaaattcaaatagtgacaccgaaaaatattacagaggaagaaagacagctttatgaaaaattgcgggaaattgaaagttttaaaccccgtgcggatttgatttaattaatagtcataatcaggatttccaggacacccttcgggaagtcaaaagtcaaatctgactatgaaattaattagtgagggcatattatgagtgtatctctctatgaaaaagactttaatttatggctagaattaacaattaagcaattagaaagccatgaatttacagttttagatacagtaaatttgattgaggagttaaaagatttggggaaagcagaaaaaaatgctttagagagtaatttaatgattttattagccatttattaaagctaaaaattcaagctgatgccccagaaacaatgaaaaatagttgctataattcggtgattgaacatcgtaaacttatcaaaaaacaattatcaaaaatgccttcattgcaatcctatctacccaaagttttagaagattcctatgcagatggtaaggatattgctatcaaagaaggaaaattggcatcttttggagttcgtattcctgatgaatctgagtatcctcatctatgtccttttaccattgaggaaattttagatgatgaattttatggatcatctttatctgatgttgattaagaatctgatattacgacaaaaaacttttgaaacaacctctcagaattaagatttccatgatttattgattaacaagatgatcgtcatttgtgggtaaatgaaccacattttgatgaaattattcttctacgttaaagtcaactttatcgtagatatcagctaacaaaatttgacagggaatagaggctaaatttaaactagcttctgcatctgcaaattcagaaaatacccatttattatcaccaattttgcagtattgctcaacgtgcattgagtattggtcaattaaaatatattcttgaaaggtaggaatagtgcggtaagcagcaaatttttcatctttatcatagcttttggtggaatttgataacacctcggcaatcattaatgggttagtaatagtgtcttttcttccttctgcaaataccaagggagtttgcacaaccataatatcaggataagtgtgaatgcgtctgttaggaatccacagacgttgatcagtaacaaatacttgataaggacgacgtttgagaagatagttgagagtaccactgaaattcagtgcaatttgattatgatttggtgttccgcctgtcatcggtataattaatccatcaatatattcgtgacgtatatctgaatttacttcaaattctaaatattcttccggtgaatagtagcgtgtttcttgtgcaatagtcatgatatttcaactcccaagatttcaagttgttgattcattcaaatagtctagtaaacccttcttgggtaaagtgtctgtcatgagttagtatttcagtaatgcctaattgcttcatagtttgcatagaaatacaatctgtgaggctatattctttgtcagcacgttgtttataaagttcaagccctgctaaaaatgtttcatgagtttggggtataatttgcacataatcattgtgcaaaatatcttgaactctattaatagcattttgccttgttttactatcataagttgagaagaaattaagaaactctgttaacacttcatccgttgttactagataaactgaaacaaggtttttactataatttattacggttaaatgccattcatctttaggattaaataaggcaacccagtaaaaagtatctacgaataatgttttcataattattgtttgggtttaccataaagataatgatcaatttgtgctgcactatctgttggtaattgggcaataacttcttctggtaaatcttgattacattcttcaaatatttcccaaattggtttacttttctgttgctgttcaccagattctatggttaattgattagcagaattagactcattagtttgttgatttcttctgtttttagcaaataataaaaaatctaacaattcttcaatgagattttctgatgtttgttctatttctctgattagtttttctttaggtgtcatatttttacctcatttcagattttattcatctagagaattaatacccaaggccgcaagtcgttggtttatccaagctgtagctgtggtttcgtcggtttctatggctttctctactcctattgtagcaatttctaggagttgttgggactgttctctcttttcgagagattcttcaactttgtttctaatttttttctgtattgtaagaacgttttatgaaatgcctctacacaatttttaattaattatctgttttcatcatctgtattttcttcattatgaaaaatcccttctatatcttgcgaaccatgtaaaatcctcacaatttcaataccttcattcataggacggtaaaaaattaggtaactttttacagggaaacttcgcacataagcagctagttcaggacgttctttacccatttgtggaaatttggctaatttaggaaaagtggttctcaatgtgtcaaaaagtttatcagcagctttggggttattttgcgccacgtattttcatatattctcaatatctcttgctgcttgggtagaaatgcgaaattgactcatacaaaatcactttcaaccgcatttttctgaactctggctttaatatctgcaaaaaaatctgttaatgattcttcatcgtattcagtgtactcaccgttttctagttgctgaataccaatattaatttcattacgtaaagctgctaatttgagcttttgcagttcttcctcaagaccatgtattctatctaacatctgttgaaatgcttgtgcttcttgtactacgacctcagctttaccattaacagttagtacaagtggtgattttgtggatttaattttttctacgtagtctttagcattacgtttgaaatccgtaagagtttggatattttgcagattaattctagtttccatcgcatctaatcaagtgctttatttagtattttatcagatgctctcacaggcgtttactactgtcacctactatattctgttaacctaaaaatataaccttccacccaaccgcacctatgacagtcacccaagacactgcaccagatttagatgtattatttcccatagttaatatagaaagtgacgaaccacccttggaatcatcattacatctagaacaaatgctactactaattaaatgtttgaattggtggtggcaagatttaattaagtttaataactattttattgctgggaacatgagtatttattacagtcctcagcagatcaaaactaaagactttcggggtccagattttttcctggtgttggatacagaaaaccgaccccgtgatagttgggtagtttggcaagaaggcggtaaatatcctaacctaattatagaattgctttatccttccactgcaacagatgacagaactgtaaaaaaacaaatttatcaagatatttttcgcaccccggaatatttttggtttgatcccaaaacttcagagtttgctggttttatcttacttggtggaacttatcaacctatagaacccaacccccaaagtttattgtggagtcagcagctagatttatacttgggagttcatgagggaaaattgcgttattttactgccgaatgtcagttaattatgacacctgaagaatacggcatccaagctaaagaagacgctaaacaggaaaaacaacgggctgaacgtttagcagctaaactgagagaattgaatattgatcctgatagtttgtaaaatctaattctcatcatcatcaaatgtaatcctgctatttttttaatggacaggttcaccacccaagggatttaaaatagaaaaaaacagagttgatcaaaataaatcaaaaccgtgagtcaaactgggacacaaccacaaagcagtaacactacaacatattacaccctattaggactgcatccctcagcgtcagtcatagatatacgtcgtgcgtatcgggaactgagtaaacagtatcatccagatacaacagaattacctgataccgttgctactgaaaaatttcgggaaattaacgaagcttacgctactctcagtcatccagaacgccgtttaagttatgatttaaagattggttattctcgatttggtgtaattcaaacaccaacggatttaaaccatccaacccataaaccccatgatttttctaaatcaatgtacttggatgcaagcgatcgccctttatcatcgggtgaaatctttgtattatttgtcttgggtttaacctttgttggttgtttagttttggcgatcgccattgctgtgttgcgtggtgaacccttacaaacccaacttacccaacccaccccaaccactcaacatctagtttccatgttccaaaatcacaaccctcaaccagccgaatttttttaatttttaatttttaatttttaattttttttaattgcttatgcttcccgccaacacaccactgtataaccatcccctcccacaaattgaaaaatggctaaaagagcaaggttgtcaacaagatgacaccgagttacattgttggcgcgtgcaaaaaccaacttggcaagcggatctatggttagatattgaacaaatcaccgtgagatatattaacgctggagaaaatggtcaagatatccaacgttcctttaaatattctctcagtcgggaagatattcaagcagctgttttttctggtccataaatccaattccaggatcgtttttacatcccatacaaagaaggcaaaaggcaagagtttgggctatctgttatccccaaatttttcgatcccacattctgcaccccccagtgtcacaatcggtaatttcggatttttgaagacttttgaggataattttgatacaaaattctctaaattttaggtagcgatcaccaatctcaaatccccaaatgaccatttttcgttgtgtgacagtttagggtgcggaaggtgggttctagtaatacaattaaacgactgctatataaaacctagacaaaactagactttactttctacttcaacgggagcatgggagcagttatccctcagtagactttcacgccttagccagacgcgattgtgttccaattaagtttctgaaaaagactaccaccatcattgcttggttttcgcgtcggcaatagtctcaattcaatacttgatatcaccgtattatatatcaagtagttgattttttcctaaaaatatattgatttttgtcaatacaagtatagttttgtctatgaaattgtcaacttaggacttgctcaatagttctcttttttgcgaagttcccaaagcctctacttcctcaatcagattttcaatatccaaggtttcaaaatcccgtgctttgagcttcgcaacagtatcttcaacccagagtaaaatatcttgatcatagagggatagtgtcatatttaatttttctcccaaatcttactattgaatatagcattacttcctaaaccttcccaaaccgccgttctcgttgttgataagcacataaagcacggtgaaattcctttctatcaaaatctggccagagagtatcagtaatataaatttcaccataggccatttgccaaagtaagaaattagataaacgcatttctccactggtgcggattagcaaatctggatcagcgataccagctgtatataaatgactttcaaataactgttcagaaatttcatctggttttaataaaccttcctctactttttgggcgatcgctcgacaagcttgtaaaatttcctgtctaccgccataattagtagctactgtaaacttaatactttgattatccttagtttctgccatagagcgagaaatttcttcttgtagcgattttggtaaagcttgtaaattacccacaaactgaatctgtacattttcttctaccatttcccgcagttcttgacgcagaaccctttggaaaagactcattaaaaactccacttcttcctgtggtcttttccagttttccgtagaaaaagcgtaagcagtgagagctttaataccccaatctttacaacagcgtaacaaatccttgagggcatcaactccccgcttatgccccataattcgaggtagaccttgacgtttagcccatcgaccattgccatccataatcaccgcaacgtgctgggggagtaattctcgttttaaatcagaaggcaaatattgcagttcagtatgttgtgtagtcatttttcggtcttatttttttggcgagaagcagtcgatggtaatctaagtaaacgtgaaaccagtgctaatgtttgaccacctagttgacgacctaaactgaaaagaccaggtgctacagcttctcggtctacagttggcgaaaatcgttcctctaaagactcttttaactttctaatcgtcagtggtctatataaagttcccctttcagctaaggaaatagaacccgtttcttctgatacaacgacacaaatgcaattttcgacacgctcggtaattcccattgctgcccgatggcgtgtacccaactggcgtgaggctgtgcgtcctgaaagtggtaaaattataccggatgatacaatccgcgaaccacggatcaaagttgccccatcatgcaataaagttttaggctgaaaaattgtctgtatcagttccttagacacctctgcatttaactttacaccaggtacagaaaaatctcgctcatccattggtccggtagtttccaaaatcagcaaagcaccaatccgattttttgacagttctttcacagcatcgacaatttcatcaatcacgctatcagatttaggcactgtcaagcggttaggttgaaacaactgccgaaactcaccccgtcccaattgttccaaaaatcggcgaaactctgactggagtgctacggccatagctacagcacaaccaattactaacttttccaaaacgaaattgagcaaaggtagtcccaaattcccactcaatgctgaggccagcatcaagattataaatcctcgcaccatccatagtatccggcgttcactaataatcaccaggatcatgtatgtcaacgccagcactaaaagaatatccagagtcccaagcagcaaggactgtgaccatcccaggtttgtcgtcagccattgcttccaccaatctctcatgacatctggattctaatagtcattagtcattagtcattagtcattagtcattagtcattagtcattagtcattagtcatgattcttagctaatgaccaatgaccaagaaaaaataactatttcaatctttcaggtaggcaatcttggcgaatgatgtcttgataggtttccctttgcaaaattaaatttgcttcaccgttagctactaacacggcagctggtcggggtagacgattatagttagatgccatactgtaattgtatgctccagttgccataactacgagaacgtcgcctggttcagttttgggaagtgaggcgtttttaatcagaatatctcctgattcgcaatgtttacccgctactgtgactgtttctgttagaggagcagacattttgttagcaacaacagtccgataaactgattgataggtgatggggcggggattatctgacattccgccgtcaattgtcacataagtacgaatatcaggaattgttttagctgatccaatagtgtaggcagtaacgcaagctgtggcaatgagcgatcgccctggttcacacaggagtttggggaggggcaagttttcagcagcgcaagcttcttgcactacttcacaaatcgcctttgaccattcttcaatgcttgggggatcgtctgattcggtgtacttaatccctaaaccaccaccgacatttaactctgtcaattctaaattatattttgctgcatctcgcaaccactgtaccattacagcagccaaatctctatggggttgacgttcaaaaatttgcgaaccaatatgagcgtgtacacccacacagtttaaagcgggttgtttactcacaaaggcaaatacctcttctaaatcattagggtcaaaaccaaatttactatctaaatgtccggtgcgaatatactcatgggtatgacattcaatccccggagttaaccgcagcataatacggatggctgaatctttggttgctagttctaccaaagtatgtaattcataccagttatcaacaacaatggtacaacctgattcaatggctaaagttagctcatcacgggatttattatttccgtggaggtagattttctctggactcacaccagcttctaaagctgtgtaaagttcaccaccagatactacatctattcctaaaccttctgaagcgacaatggcgcaaactgctaaacaattccatgctttagaggcgtacaatacttgagattcacctttgtagtattttttaaaggtatcccggtattgttggcaagctgtccgcaaggttgtttcatccaaaatatataaaggtgaaccaaactgctgaactagctttgtgacatcacacccaccgatttctagaaaatcatcacgattaactctagcagtcaagggtaggagttgttgattaggagaaatatttgtactatcctggctgggagatagatattgattgccagaaggttgaaccttgacggggtgagtcgataccataactaaattagaatttgtccttgttaaaattacgagcgtgagttaatatcccgattttcagtttactgctttattggtgattggtgactggtgattggtgactggtgactggtgactggtgactggtgactggtgactggtgactggtgactggtgactggtgactggtgactggtgactggtgactggtgactggtgactggtgactggtgactggtgactggg

SEQ ID NO: 22 - DNA, 70685 bp, Sphaerospermopsis sp. LEGE 00249
  LEGE00249_34
ggactggggactgggagaaattatttgtattttcccaatcaccaatcagcaatcaccaatcaccaatcacctacaccaatcacctacactacaaccattggacggctaccggcggagtgacggtcaatcacttggtcgattaagccgtattctttggcttcttctggagacatgaaaaagtcgcgttctgtatcttcggcaatacgttcaaaaggctgaccagtgtgttcggctaaatactcattcagcttgcgcttgtggtataaaatttcccgtgcctgaatttcaatatcagtcgcttgaccttgagcgccgcctaaaggttggtgaatcataatccgtgaatgaggtaaactcatccttttacctttagtacctgcacttaataggaaagcgcccatactcgctgctagtccagtacaaatggtacagacatcggggcggatatttttcatggtgtcaaaaatgcccatccccgccgtcactgaaccaccaggagagttgatatacatataaatgtctttctccgggtcttcagaatctaaaaacaacaattgggcaactatcaggttagccagactgctgtccacctgttgtcccaaaaaaatgatccgctcacgtaacagccgtgagtagatatcaaaggcgcgttcgcctcgacccgattgttcaataacgataggaatcattgagcgtatttgtatctatttgctatttattctatctatgagagaggctgattgtgttgattgtcaaatttggatatctcgacaataacagataaatttttgatctcctcatcatctgctctgagcaaacagatttttcaatagcaatactctagaatcaaatatctcatcgccaaaattttttttaacaggcacttttagcggctgatagcagtctcaagaattgtggcgatgtcaaaagtgggagaattcaaaagttcatcattattaacagatgattaacttacattctgacactagctgtctgcgtgcctatttattgacctataactttagcttgccttgtgttggcgaatctatattatttggtcgaaattctttttcaggtattagtaaattttttcacaatttttaacctgaacctggttaattttccggacatattttgcaaatccggtaaatcgggactatctggtgtatttagattaaccaatctaaatttaaatgctatttttcaagagaggagtgctatgctggaaagacttatgcaagctgctttaatcacttttttgctgcacctgatcgcagcactaaaccccagtacccaaattcctcgcaagtctgtatcacctgtatcggaaattccagcccctgttctcggttcaactattcgtttttccaaataaaaggtgattggtgattggtgattggtgactgggtaaaaataactaataactaataactaataactaatgactaatgactaataactaataactttaaaaacgctagacttgtcagaaaatggtggaaaacttttattatgacgaatcgcctagctgacacaaaaagcctttatctccgaaaacacgctgaaaacccaattgactggtggacttggtgtgatgaagcattggaaactgcaagggcgcaaaataaaccgatttttctttctattggttactctagttgtcactggtgtacggtgatggaaggtgaggcgttttctgatttggcgatcgcccaatatatgaatgccaattttctccccatcaaggtagacagagaagaaagacctgaccttgatagcatctatatgcaaagtttacaaatgatgactggtcaagggggttggcctcttaatgcttttctctctcctgatgatttagtccctttttacgcgggtacttattttcctgttgatccccgctatggtcgtccgggttttttgcaggttttacaagctttacgcaattactacgatactgaaaaagaggagttacgtcaaagaaaagctgtaattctcgaagctttactgacatctgcggtgttacaaaatgatggcagtcaggaagtagctgatcaagaattattacaaaggggttgggaagtttgcacggggatcatttctcctaagcaggttggtaatagttttccgatgatcccctatggtgagttggttttgcggggttctcggtttaattatcaatctcggtatgatggattacaagtttctactcaacggggtttaaatttagctttggggggtatttatgatcatgttgctggtggttttcatcgctacactgttgatccgacttggactgtcccccactttgaaaagatgctttacgataatggtcagattgtagaatatctggctgatttgtggagtgcgggaattgaagaaccggcttttaagcgagcggtggctggaactgtaaaatggttacaacgggaaatgacagcacctagcggttatttttatgctgctcaagatgcggatagtttcactaaccccatagatacagaaccggaggaaggtgctttttatgtctggagttatcaggaattacaacaactgttaacaactgaagaattaacggaattagaacaacagtttactgttagtgttaatggcaattttgaagggaaaaatgttttacaaaggttacatcctggtgaactgagtgaaactttagaagttgctttgagtaagttgtttactgtgcgttatggtgcaactcctgatgcactagcaacttttcccccagcgcgagataatcaggaagcgaaaatcactaactggcctggtcgcattccggcagtgactgatactaagatgattgtagcttggaatagtttgatgatctccggtttagctagagcaggggaggtttttcaagaacctagttatttggagttagcaacaacagcggctaagtttattttagatcatcaatttgtggatggacgttttcaccgacttaattatgagggtgaagcgacggtattagctcaatctgaagattatgctttgtttattaaagcattgttggatttacagcaagcggatttagaaaatgctgattggttggaaaaagcgatcgctctccaagatgagtttaatgattttctgtggagtgtagaattaggagggtatttcaacacatctagcgataatagtcaagatttaattatcagggagcggagttttgcggataatgctacaccttcagctaatggggtggcgatcgccaatttagtcaggttatctttacttactgataacttacattatcttgatttagctgaatcaggattaaaagcctttaaaggtgtaatgaatgaatctcctcaaggttgtcctagtttatttactgctttagattggtatcgaaattgtacattgattcgtagtaacactgagcaaattaagtcattaatgcctaaatatctacccactaccgctttttcagttgtatcagatttaccagatggaagtgtgggtttagtgtgtcaagggttgaaatgtcttcccgcaccagggagtttagaggagttgttgttacaggtgcaaagaagtcagaatagagggtgactgatgactggtgactggtgattggtgacaggtgacagtaagaagggaatagggaatagggaggaagattttagattttagattttagattggagttaagaaaaacaatccaaaatccacaatccaaaatccaaaattaataactcctgactcctgtacgggcgaagcattcgggtgatcaattctcgatttttccccaatattgttgtccgaatgcttcgcccctacgactcctgactcctgcggtatttacctttttccaatcttccaatcttcaccaccaggtaactgagttaaagtttctgcaaccatagcaggtaattctttaggtgaataggaataagttaaattaaggaattgtaaagcagttgcaattaactgttttctatctataatttctcctagttggaattggttataaataccattcatcacttccaaactagcatcagcgatcgcatcttcaatcacctcttcctccataaaactttcccattcatcttgattgatgtaataggatttcttattatctttaatattgatctttttaatttctcggatagcattacgaatagatgcagaccaagaatttgttaaacgctgttcgatttgatttttaattaaatgaattaacaaaatccttacatacgactggatattgcccaaaatagcttgtttactcattccttctaactcgtccacaattgccaaagcatctgcgtaacgtccttgtaaaatactatttctgaggtctattaattcttgggtcatatttgttaacctctcatctagctatgttttatattttaacataaaggtgatacagcattagtcagcagtcacaagtttcaagaaatcaggagatatttaatcagagatgtgactgcaaaataaattcattcccacacagagtatgggaatgagaatattagaaagaagtaaatattaacattaacgcaactgtgataacaaatttttcatttgaggagtagatagaaatttctgagcatcagtaatcatactttgaccccaaaaatgctttttcatccagtgaaaatcagcaaattttctatctaactttaatgctgtttctgctaacttataagcctgttgttgttctcctttaccatataaagctacagctaaagctaaggaggcctcagcagatttattgttaattttaatcgcttgttgccattgttgaatcgctgtttctttgtctccttgttcatatttaatgaaccctatattattgatagctgctaagttgttgacatctatagcaactgcttgattataatcagacatagcggtgatataatttcctagtggataataaataatacatcttttaatgtcagaatccgcaaaatatggctctattttgatacctgttcatagaaaatgtacattttactgaaccttatttaaggtatcaataaatatattgatataaatttaatacttattaatacttgatgatgagacgtatcaataaagattttgttcctatgactacattaagcgccatagttcttgcaggtggtaaaagttcgaggatgggaaaggataaagctttgattcctattcagggaatacccttattacaaaaagttggcaatgtcgctaaaagttgcacggatactatatatatagttacaccttggccagaaagatatcaacacttaccgttaccagaatgtgaatttatacaagaaaacccccataacacacaaggacctttagtgggttttgtaaaaggtttagagaaagtaaacacagaatgggtgttattattagcttgcgatttaccaaatttgcaagttgaagtgttgcaagattgggtgaaaagattagataatataaaaggagaaaatattgcttgtttggtaaaaaatacccaaggttgggaaccgctttgtggtttttatcgcagttcttgtttacccctaattttagattttattaatcaaggaggacgatcttttcaacagtttctcaaattacatcctgtggaaactttacctttgtcaaaatcggatatgttatttaattgtaatactcctgaagatttagatgaagtgacaggtgataggtgacaggtgataggtgacaggtaacagaggtaaaaaccttgtttgttgctagaagttgctataatttgaaaaaataaaattgccgattcccaaaaaataagaaatgagaaatcaaaacaatattatgcgtcataaatcatttttagtatcaatttttttaagtttgtttttgttgtcttgtgctacagaaaccagccaaacacaagcagtaaaaccagaaattacaccagatattaatattaccattgcacaaaaatcacctaacacatctgtgaaaagagtggttgcgctttcttcgctgtctgctgatattattgctgaactagatcaaacaaaattagtaggaattgttggtagtaagttattaaaagatgatcctcgatttaaagatattcctcaagttagtcaaggacaaaatgcaccaaacttagaaaagattgtagcattaaaaccagatttagtaattggtgtagcaggtttttctgatgtaccattacaaaaactgcaacagctaggaataaaaactttatccacaaaagtatatagctgggaagctttggaagaactcactaaaaatattgcagaaaaaataggtgcagatccccaacctttattaaatagatatcaaacttttttaccggaaaagaaaaatcaaaaaaatcagaatctttcgactttagttttagtaagtcgtcaaccaattttagcaccaaataaaaacagttgggcaggtgatatagtttctctgtttggtgcgaaaaatgtcgccgcagaattacaaggtaatagccctattggtggttatgtaacactttcagccgaaaaagttttagcagcaaatcctgatgttttaattgtggttagtgctgaagcaactttgttagattctttgaaaaaagagccgttttggcagaaattaaaagctactcaaaataatcaagtttatgtttttgattattacggaatggtgaatcctggcagtatagctgcaattgaaaaatctgctcaggaattaaagaaaatcttttgagttgtatttaataggagtcaggagtcaggagtcaggagtcaggagtcagaatatttgtttatgaaatagatccccgacttcttcaagaagtcggggatctgggttgatatagaatgctatttttcagcgacaggaatatttttttgtttttgcatatttccacccataatactgcgaaaatacaagctaccaatactaattaaaaacactaaatatcccacagcttgcactatataaagtttatctctatagccaaataaagatttgagaataataccaggaaacttgctatcaggtaaaatgttagcagtattccaaaccattggacctaaaatacaagagtgaattttagtaaagtgttcataataaaaacaaagattttccgaggcgcggttgctgagtgctaaactagcgatcgcatcatcaaaatgtttgaaagccgaaattactaaaccagcgacaattaaaactaataaaacgcccataatttggaaaaattggcgaatattaattttcacaccccatttaaataataaaaccccaattcctgctgctgttgctaaaccaccaagtgcgcctaaagttggtaataaaccttgttgaaaattggcagctacaaataagactgtttcaaaaccttcccgcactacagcaactaaaattaaactaaaaaccccccatccagcatttgaattttgtgttaatgcttcgttaactgcaccttcaacttgagatttcataaatctggcttgttttgtcatccagattagcatccaactcagcataatgattgctaaaatactaaatacaccttctaatgttggttcaactacagaggtgtattgaggatttatagaacctaaaaatttaatgattccagtgaataaaacgccaattaaagcactaacaataataccaactccaacacctgcatatacccatgagttgagttgagattgtttggctttttgcaataaagcgaggacaatacccacaactagggcagcttctacaccttctcggagagtaataacaaaagtaggtaatgcaatactaaaattcatttttattagtggttatgaacgcttgatcactattcttgattgtgtaaaaaattgagaactatcaaatttcttttttctttgctcgttcctacacatagtatagaaacgaacgaaagaaaagaaactaaaaagctgaatcttgactcctcgaaatattagctgaaatcgcgtaacattttcttgagttctaaattatgtaactcttcttgtccgatcatgccacgggcaaattcttccaaataaatactagcatcttcaactgtatttagtagagttttatacatatccaatgctttcttttcatgggataaactttcttccaaaatgtctttgactgtatgtttgaaagtttcttccatttgggcaattctcaaggtaggatgtccatctaaaccggtgagaatttctcctacttgttgggcatgaagtaatgattcactggcttgggctttgaaaaaagcgacaataggtaagcggtttggtcctgttaccattagggaataatgagtgtagcgaacaacgccagctagttcaaattccatgatggcgttgaggatgtcaatggttttttggtggtcgagttctcgcatcagttgttaagatgagcaaaattaaatttggagaggattttagtgagtagctatacactttttatcttagtttaatgtagataatttttttagtgtttcacttttcactatttcctctattttcacttattttaagctgttttttgtggatgtccaatggtgtgcaaatactaactttgtgctttggtgttagtttgagatagcactttttgagtgttttcctctatggtttttaccattttggtaacatcttcagggtttttgactgcttgtgcaggtggaataacagtaggccaaacttttaatagttctgtgaaagctgtatctatggctttgtgtgcttctgggtttgcttgagccatttgtccagaaattccttgatatagttcatgggaatagacaacaaaaccacgagagtcttgatattctattggttcggtaattttaccttttgctactgctgctccatattcggcgttagctgcgtctaataaaccattaattacttttaacacaaattctggttttgagcgttcttgagttggtaatgcggcgatcgcactatccacagatgccatagaattggtaaaattatctttgattttagcatcttgagaattagattttaccaagttagtcaaattcactaaattagttttaaattctttgactttgcgttcattaagttgttcttctacatcaacataaatctcctcaactggatgtcctatatggggttcggcttgtttgggttgattttgtgctaacaattcttgtgctactaaaagatgtcctttcattaatgccaattttgtcatgtaatctacatctttggcttctcctgtgagtacaacttcttcaactgtcaccatgtctttaatttgctcaaactgtgcttgagtaattacttttttggtgactaaatcttctggtgaactgtagggacgactggcttgtattttattagataaagcgggtacaccaagttgagcttcaaatttgtctaactcggacaaaatagcatcattaatattaattttggctttcccactatgactactgtgggcgctggcttgcgtcactgctggggttgaagtcgtttctgcggtgggggtattccccgcacaagaaccaagggtaacaatcacacaagccactattgataataatatgtaacgtgatttaatcattgatttgctcctggagaggctaaaacccaataatggacaaatttacagaattgactggtgagtataattaaaagtaatttgcattagtaattatattttttttagcataaatgacaaattatagtaactatttttaaccagcaaaagtatagtttaatcatttcttaaccaagtgttaggtaagttccatgacttacaaatttctgtcacctgtcacctgtcacttgcgataacttcaaactgtcccatacatccattttcagcgatcgcatcttgatggggatgaaacatatacttacccggataacgaaacgcaaattctaaaatgtgtctttctgctacacccattgttaaaacatctgtcttttcgctgggagtcatcgtcatccccgaacgataaacatcaaaaaagttagcgtgtaaatggaaggtgacagcaggatcaaactcaataatattcaaaacataagctctaattaattgattttgataaagttgaataggatggtgcatataatgatgaggcaagccattaaatgcgtaatactcatttttgttatcatcatttatgtcatatccagacataattaaaataatttcatcagcaggaggacggggttgaggcggatcaataataaacattccatataaacccttagcaatgtgacgagttacaggtgcaatatgacagtgatacaaatgcacaccatagggttctgcatcaaattcatagatagttgctttaccattactcacaggttttacaccatccatttctgcgggatgcactccatgaaaatgcagagaatgggaatgtccagccttattgagaaataatactcttattcgttcccctacttttgctcttaacgtcggtccaggaatacggccatttaaatcccaaatattgtaagataccgcattatttagctgaatggtggaagtacctgctattaactcaaattctcgaatagtccgcccattttcctgctttaatgtcccataatcaaagtttctcagcacctgcatgggttgagtagcactattagcagcatgattagatgcttccattgccattgggggaaatttaacacgggcattatttttggcatttagaaactgtaataatgcagatgcaccaattacgccaccgccaaatatgcccattgttatcagttggcggcgatttaaaagtatatttttactccgactaaagttttcagacatttttcagacatgaggtgatgaggagggaacacaaacaagaaattgcaaattatttgcaattaccattagttatagtataggaatcaggaattattgtcaataattatgtaaactatcgagaaatacagggcataggtgaaaatcaagaaatttggcgaatataattcgctactatgctttttaccctttttgggtaattttgattggtaatttttaactcttgccttttgcaagacagctttttgccacccgtgatgaagaataccgatatacccgaaaatgatatcatattttactaattttcactattggttcaggttaacttctagacaaatcactcactatcaggtaagctagtatgagtgatttccacagggggctgtgagaaattatctatatctttatcatcacccaagttagacttttcaaacatcctctgaaattgtcttttttaacgtctggtttcagtctattgatcaggttaatttgtaggttggacaatgcaaacatcagggaaaaatagttatcaaaaattactttatcaaataagtaatcaaatttttaacttaatgggaaaattgttagtgaaagaatgggataaaagactgttaggtttatcccaacttccggttaaatctgtgattgatattggtgcaaatgaaggtcaatttgcccgcagaattatcaagatttttcctgatgcgtatatttattcatttgaacctttaaatattccttttcaacagttatcccaattagcaaatcaccatcctcaaaaaattaccgcttttaatctagctttgggtgatagtattcaacctgttgaaatttacagtcatttatattttaatccatcttcttctattttaccaactactcaactatgtgaaacagtgtatccaatggtaaaaaaacaagagaaaatcctcaatctgtttatggtaacataattaccgtgaaaaatggcaatatttcaccagccaaaattcacacaatttgtcaacctttttatcaagcttctctgattgatcttttggttcatcagttagtttccagatagttaaccataaacactgcaaattcctgactgattaaatcaatcaggaattaacatttacaaaaataaacaataaatatacaaatattcataatttaataaataaatacaaatttggatgtattttttattataaaaattttccaaatccctgccaaaacatcctccaatggggcattgtaaatataggggaaatttagtttcctataaatttagaattgtcatgctatcttttgcagttgtaattctattgctgaaattagtgtaaaaaaaagcgaaaaacaaggattttcatgcatataccagatggatttatttctgttccagtagcagcagctacaagtttagccagtggagcagctttatttgtgtcctttgggcgatcgcaaacagcttttggtgttcgtcgcgctcccgtattaggattaaccacagcctttatttttgccgcccaaatgattaattttcccgtagcgggaggtactagcggacacctgtgcggcggtgctttagcggtgattatgttaggtagtccttgggcagcaatgttatgtatagcaacagttttaataattcaagcagtgctatttgctgatggtggtattactgccttgggtgcaaatattttaaacttgggagtaatcagtgtttgggtagcttggttcttaacccagaccttacagcgactactgggtggttctaaagggcgtttacccctagccgcaggtatagcagcaggtgttagtgtagttgcagcagctatagcttgtgctattcagttagccctttctgggacagcaccagcgaatatagttttacctgcaatgacaggtgtacatattttgatcggtgtaggtgaaggcttaattactggtggtgtgttagcctatttagccacagcacgtccagacttgttaccaggagaagaagagaaatttggaggctggttgataccagtggtgagtattttcctagttgcaggtgttttatctttatttgcttccgcttggccagatgggttagaaagagtagcagaaaacttggattttatcaacaaagccgaagaagtcagagttgtagtaccaacacccttagctgattatgaaattcaaggtttaggaccaattggtacaagtattactggttgggtaggtgcgacagcttgctttgctgtggcttttggcattgctaaagtgatgaaacctaaaaatgcttaacatttccttggcattacgcttgcaattatccctgatcattgtgattggggcagcttttttaaagcctcatagctggtcaaatttgctggtatatggtgcgatcgcacttttgtgggtatttatattccgggtttctattcgcaaattagggagtttactaggtgcagaattgatttttctgtcattggtagcgttacccttggggtgggaaaaagcaagttttttactggtgcgatcgctaatttgtttaatagtcatgaatagctttttactcaccttacccccccacagttttggcatcgcccttaaaggtttacccgtacccgccccattaaaggaaaatttgctcctagctgggcaatatctagaaattttactctcagaattagccagaatgcagcgtagcgcccaactacgaggtttaaatggtgctgggggatggttacgttatgccagtgcagctatgatcggctctttgtatctgcgtactttagacagagcagaacgagtttatggggcaatgatcactcgtggttacaatggtcaactacctatagactctacccttaacccaaaagaacgttttacactaatcttagtcgtcattattgctgcttgtatcaccgtcagttcctatttttaatacaccaggaaacaggaaggggagatgggtagatggggaggaaagggaagttaataacccaatcaccaatcaccaatcaccaatcaccaatcacctatatttgagttgtgaatcttgacatccttaacttctcatccccaaacttttatctttcatcctcatacctctgtcgttgaggtgaaaaatctggtgtatgcctactcacaccagcaacccgtattaaaagatatttcctttaccttaaatgcaggcgatcgcgtcgctttgatgggtgcaacaggttcaggaaaaagcactctcctagaaaatctcattggtttaaaacaccctcaaagtggcacaatttctattaacggcattcccgtagaaccaaatacgttcccccaaatacgcagacacatcggttttacttttcaagatgccaatgatcaattatttatgccgacaattttggaagatgttacctttggaccacgcaactatggtatttcaccagcagtagcaacggacaaagcacgacaattattagctgattttggtttagaagaatatgctcaccgttccgcacacgaactttctggaggacaaagacgtttagctgccctagcatcaatattagctctagacccagcaattctgattttagatgaaccaaccaacggacttgatcctgcatggcgacgacatttagcccaagtattactaaagttgcctgtgcaggtaatattaattgcttcccatgacttacagtggttagggaaagtgacccaacgtgctttagtcctttcaggtggtcaaattcatatagacagccagatccatccgctattacaagatggcaaaaccttggatcagttaggtttaccagtagactggtgatgaggttgacactctccgggctaaagccacggagattctacattctacgtcagaatttgcttgagatatttgtctatgctttttggaactatgaaattaacataagtttactttttactaagaattgtcgtatatttttaatatttgacacaaaaggagttaataatgcttacgtcggaggcacaaaagccgctgacaattccgcccaaagaacttttagcacctcctggggattttaatcccacaatgttgctattttttacagtagtgacaatgttggtattttccaactttggttattgggtatgggaatggccgcattggctatgttttagcattaacactctggctttacactgttctgggacgattattcatgatgcttgtcatcagtccgcccatcgtaaccgggtgattaatgcgatgttagggcatggtagcgccctgattttggcttttgcttttccagtatttacacgagtacatcttcagcatcatggtaacgtcaatcaccccaaagacgacccagatcattacgtttctacgggtggtccattatggttgatagcggtgaggtttttgtaccatgaagtatttttctttcaacggcgattgtggcgcaaatatgagctactagaatggtttattagccgtttgattgtagtttctattgtttatatttccgtccaatatcactttttgggctatattctcaatttttggtttattccagcgtttatagtgggaataggactagggttattttttgattatttaccccatcgtccctttgtagaacgcgatcgctggaaaaatgcccgcgtatatcctggtaaaattctcaacatcctgattttaggacagaattaccacctcattcatcatttgtggccttcaattccttggtataattaccaacccacttactatttgatgaaaccgctgttagatgaaaaaggtagtcctcagacttcagggttattgcagaaaaaggacttctttgagtttgtctatgatattttcataggtattcgctttcatcaccacaaagaataggtaaatttttaaggtgggttaacgactgtttaacccactaatataaatagggtttgctgaaaaagtcccttcgttgaggcagggaatagggaatagggaatagggaatagttttagctaggggttgctgagaaagtctttccgtgagggcataggagtcaggagtcaggagtcaggagtcaggagtcaggaggagatttgaaaatttctttgccatctcttgaaatcccaaaaaatgcacactttctccggtatacccttcaaaacccttgcactaatttctgtgtttatcagcctctaacctttgatatatcaaggttttaggtttattcagcaaaccctagctatctgttatccccagattttctaatttatcagacccaaaatgcacagtttttaaggtatacccttcaaaaatcttgcactttctttcctcctgatcagcctcaaacctttgatttacgagtattttgggtttattcagcaagccctaaataaattcaatgttgatttttctcaatattaaaatgaatctgacgatcaaaacagaatcttcaacctagcatttgctaactctcaaattcttcatcgtcagatttataaatcagtcaaattacaagaacagaaagcttcaaaaaagcggtagaaattaaaaattaaaacagataattgttgggttttaattttcaattttcaattttcaatttttaattctttacggtgttcccaccgcaccagaataaaccaaaccccgctgcatatccaaagtcaaaattgacccatcttttattacctgcgtcgcttccttcacaccaacaataacaggtacaccaagacgtaaaccaattactgctgcgtgactattgagactttcatcttcagtaataatcccactagccttgcgaatcgcatcaacaaaatcaacgcctgtactcgatgccaccaaaatatcaccatgattaaaatgagtcgcatctataccagtacgcacaaccctagcgcgaccactgacagaaccttgtcctaaaccaataccttgacctagtaccgctgtcaccacttccactttaatcaaatctgttgacccagaaacaccttgcagtgtaccagcagtcatcaccaccaaatcaccctcactcaacaggtttttttcctgggctacattaatagcagcttggaaggtttgaccagtagaaggtaaatctaacaccaacaacggttttacaccccaaaccatctgcaactgtcgcgccacattgacatggggtgtgatggctaaaattggcgttttcggacggtatttagaaacattccgcgcagttgctcccgtttgtgtcaaagtcataattgctgctgcacctaaattctcagcaatttgaccaactgcttgactgatagcattaggaatagaacgtttatcatctcgcgtcaaacgggaaggatgttctgcttcttcctgttcaatgcgttcagcaattctcgccatagttgctaccgcttccacaggataactacctacagcagtttcattggaaagcatcaccgcatccgtaccatctaaaatcgcgttagccacatcagacacttctgcacgggtaggacgggggttgctgaccatgctatctaacatttgggtagcggtaatgatgggaatacccaaacggttagcagtagcaattaaccgcttttgcaacacaggtacatcttctgctggcaattctacccctaaatcacctctagccaccatcaccccatcacacaaagatagaaccgcttccatttgttctatcgcttcgtgtttttcaattttggcaactacaggaacatttttcccggtactggtaattaactctttaatttcgataatatcctggggattgcgaacaaaggaaagtgctatccagtctacaccttgatctagaccaaacatcagatcctcgcggtctttgtcggtcatggctttgatggataagtaaactcccggaaaattaacgcctttattgttagaaagtttacctgcaactgtcacccgacaatgtaaatcacctttatcgcggttaatttcctcaacaaccatttctacccggccgtcatcgaggagaattttggaaccgacggggacttcttctgctaaataatcgtaggtaacgcagctaatttcttgagttcctaccactgggcggtttgttaaagtgaagcgatcgcccttagacaacatgataaaaccattttcaaattgtcccaagcgaatttttggaccttgcaaatcttgtaaaattgctacaggtctattcagttcaaaagcggtttgtctaattaaccggatactgcgctgatggtcagcatgagtgccgtgggaaaaatttaatcgcagtgtcgttgcacccgcttcaataattgctttcagcatttctggactactggtagcaggtccaacagtagcaacaattttggttcggcgcagagaatctcttagttgcgtcatgggcggattttagaattttttggttctatctgggaaataatggtaaattaagcagtcaattcttttcagtcactgctatatcaatgtcaattaatatcaaaagcagtgaaagtgggggtgaagtatagatttgatttcgtacagttagtaactttatagaaaaatctcctcaagccacttcctctaatcagcaagacttcggttaaatcttactatacagaatccgcagaaaaaagttagaaataactcaggattaagttatagacaagtcaagagttaattttacttctcaacagacctgatagacacttccagcttgtctaacctgtaatcttggatgtgattagcagcaatcacaagaaaattgccgaaaggcacggaagccacttggctatcttacagtggaggaagttccaacggcgaattaattcgccgtgatggtataatcaaggggcgagtaagaataaccatctgcacgaagaagtattttgatcaggagaaacccctgatttatctctctcggctttgaccgtagcctgggtaaacaagcaaaggcaagatacagagtgtatgccgccataattcgattgcttgacggaattccataagttgtgtaaaaacatccatagcggttatatgagaattggttgtgcttttttcattttccgctattggggtgtctgttcttacaggcatcccttgattttttgctgtctctcgatttactgactatttaccgatcgctcttcttttagtctaaagtccagtaattaaatttgcttgcaatattctatctgtcaacccaaagttaacagcccagaggatatatctactactaatcgtctagtttttaaccactgacgacctagtaaaatttctgaaattccttgacctacatgaacgggaatatcaaaatcttgtccgtcaattcgcacttttcctaaataaatgtcaaattccgcatttccttgggctgtgagcattgtttgttgttctagatacatccaatctagtgcttctaaatcctggttgttaattgccagccaccaagaaaaacctgtatcaaaaagtgcttctactggtagttctaaaccgtcagcagccattaactctatctcaaaaaataattcatcctcatcaccaaatttacccgaaatcatattctgccacacaccccagtttcgttgatgcggaaaacgtgcagcttgacatttgggtatttttcatgtgccttctgtgcagcaaaaaaagcatcttcattaagaaaatattcgccactgtcaggctcaactgctatgtaccagttgtagtgagttttgattaattctggttgtacttggtcaaaaatgagtttacagcgttggtacaatctttcgcgttcagcaagccattgagctttctgttcttgggtccactgaatttctgggaagattcttcccctgcgtagtgtactcgtagacttaacttcactcatggttggttctgccttagtgcaaaatttatattgtctaatatttccgactattatcattaaaattttttgctcttgcgttggttttatggtagggcattaaaatcaaagggttataggaaatataaaaaactaaaaaccattgcgtggcaaggattataggctagagcagagttttatttgttattcgattccatataatgtccgcaagaaccaaatttttgaatcttattcaactataggttattattgcttttattgtctctactttaggcacaagcctaatgtttagcttgggaatattcaaagttggtattaatcaaccttttttagactgggtaatattattcttcagcctaattttagggattattccttttgccatctttggtttctttattggttatatattagaagcaaatattatttctttagtcagtgcatttattattggtctggctatgtttagttctggtactataccattacctggaatgccagagtggttacagaatttaatccccttctcaccctcaaaatagtcaatagcgttaccaacatcatcaccctttcattactcatcggtggttgttctgtgttcataaaatccgcattagtaaggatgtatcaataatttttcaaaaagctactcaattaagagtggtttttattttgggtgtagaattggattaccctggatgggtttttactacttttagcatatttatattcatcgtgcgtaagtatacagtaattgctcctgtgagcctaagtattgctttgttgatgactggttgtaatgagagtaaaatctctcagtgtcaacgattggttaaagttgtgaatcaagggacttctttgattgataacaataaaggaacacaagtaacaactagcttgcaactctccaaagatttgcaaaatgtcactaaatcaattcaagaattaagattagcagatcccaaactccaagaatttcaaagtagttttgcgaaagtttttgataatctcagtcaagcgatcgctaaagctgctaaagctctgggtacaactaaaacagcagaagcttctacagcaggtagggtaaaaatccaaaaggccagaacagatattgactcagcattaacagcagcagctaaaagtgctggtaaagaatcagatacctttgggaatcagttaaatgaatactgtagtcaatcgcaatgatttttgattttttacccctcctgtggggagatatttgaccattttggacaattaatttataattagtaggaatttaaagatattttaaaccttccacccaaaatataaaatattttgggttattttttggctgcttgtagagcaagtgagatggggcgatcatgtttgcgctcacattatagccaaactgcgaatagttatagcttgctgaataaatgtaaaacctagagaaattaaaggtttgaggcggttttttcatcaaaaaggcaacctcgccataaccaggatttccggttaaaccttgtaaattattatgttctatatcttcatcttgaccaagtttacttgtccatttgccatcaggtaattgtctagcaatgtgggttggtattttattggagttggcatatatagcaattttctgaaatcctgtttctaatacgtcattctcaccaatttcataaccaattgttttaaatgcttgctgaaaagcttcaagagtttcttctctaggaacacctggtggccagtattcttcattttgagcatctggccaccaccacttttcatcatcttctgctgcccaagctacacaattataatctgttgtatctggactggtgagcttatatccgtggatcgctaaattgggaaaatcacgctcaataaagttttttacatatttagtccaggcgttatttcctaccacttatagcctctttcccttccccaatcaagccatgctttagtcatttcttttgtatttcctctgtactctggaggcacaggatcttctctagaaatagattttaatgcccaaaaccatcttccagattttttctctaattctctcagtaataaaggtattacaggttcacccatacctataatttgttgataggcagggtgcatacacatttggtttgttgatgatacaccacgagtttcttcacgccattcttcaacaagtgtggtgaaatcagatttttcatttattacttggtctaatctactacgaaaaataggatccgagtagtatcgcttggagttttctattactaaactgattatttgattgccaagaggtttaatattatttatttttaataacttgctgaggttttctggctgtatatctttcaataattgtccgatagcaaagttaaaaaatggagcagcaaaaacttccactcctgcaaagtctaattctacaggttggttagcttgtaattgtcgatgaaccaaatcataaattttttgtccatcgttcactgtaatacaggttttacctactaggtcgaaaacttcatattttgtaaatactttaactttactattacaaagtattaacccttgaagtaactgctgatactaaatcattaatctgtaatggctgtgcttgttgaaaagcatcaataaaaccctgtaaagttttttcatcaatgcttatcagtagcttaaaaccaggcttaaattcttctggtatttgcagttctgtcatattgctcctaaagcattaaaacaatttaaaacttacaacaatttcaaaataatagttttttacaaaaatttattctagtgatttactaaaattctagcaaatctattgttgctaatagcttattccttttgattttgcatagtcagatactaccaaaatcccccaccttgcggcaggggattttttagttacttacctaaaaccagtagtcaagatcaaccgaacttaccagcagtagaagcaatgaggaacgctgcgtaggtgacgatatagccaacggtgaagtgagctaaaccaaccacacgagcttgaacgatggagagagcaacgggcttatctttccagcgaaccaagttagctagaggagtacgctcgtgggcccaaaccaaggtttcaattaactcttgccagtaacctctccaggagattaagaacatgaaaccagttgcccaaaccaggtgtccaaagaggaacatccaagcccaaacagagaggttgttcatgccgtaggcgttgtaaccgttgatcaactgagcagagttcgcccagaggtagtcacggaaccagcccatcaagtaggtggagttttcgttgaactgagcaacgttaccttgccaaatacccaggtgtttccagtgccagtagaatgttacccaaccaatggtgtttaacatccagaacatagacaggtagaaagcgtcccaagcggagatgtcgcaagtaccgccacggcctggaccgtcgcaggggaacgcataaccgaagtcctttttatcgggcatcagtttagaaccacgagcatccaaagcacctttaacaagtaccaaggtggtggtgtggatagccaaggcgaaagcgtggtgaaccaagaagtcgccaggaccaattgttaagaacagggagtttgttccagaattgatagcatctaaccaaccaggtagccaaacgttaccagcgttggggtaagcggtgtaggcgatactgtcggggttagacaacagtacatccaatccgtacagagctttaccttgagccgcttgaatgaattgagcaaatactggttcgatgaggatttgcttttcaggagtaccgaaagcaactactacatcgttgtgaacgtacaagcccaaggtgtggaaaccaaggaataaggatacccagctgaggtgagagatgatcgcctctttgtgctgtaacatccggtctaatacgttgcctttgttttgttcgggatcgtagtcacgaacccagaagattgcggcgtgtgcaaaagcaccaaccatcaagaaaccagcgatgtactggtggtgggtgtacagtgctgcctgtgtggtgtagtccttagcgatgaaagcataaggaggcagagcgtacatatgttgagcaaccaaggaagtaattgttcctaacgcagccaaagccaaagacaattggaagtgtaaggagttgttgatggtgtcgtacagaccttggtggggcaggttaaactgaccttcgctcttgctaccgggaactaaaccggacttggagttgagcatttctttgatgctgtgaccaattccgaagttagtgcggtacatatgaccagcgatgatgaagatcacagcgatcgccaagtggtggtgagccatgtcagtcaaccacaaggattctgtttgggggtggaaaccgcccaagaatgtgaggatcgcagtaccagcaccagtggaagtaccaaaaagatggccagcagtgtcagggttctgagcgtaaacaccccagttaccagtgaagaagggggttaagcctgcggggtggggagcaacggacaggaagttatcccagcctacatggataccacgggattcggggatagcaacgtgaaccaagtgaccagtccaagctaaggagctaacaccgaacaaaccagccaggtggtggttcagacggggttcagcactcttgaaccaagagaggctaggacggaacttgggttgtaagtgcaaccaaccagcgaacaggaacaatgcagccaacagcaacaagcctaaagaacctacatacagttcttggtttgtccgcatcccgatggtgtaccaccagtgataaacaccggagtaagcaatgtttacaggattgcttgcgccagcttgagtgaaagcgtcaactgctggtgcgccgaagtgggggtcccaaatcgcatgggcgataggacggacatgaaggggatctttaatccactgttcaaagttaccttgccaggctacgtggaacaggaggctggaagcccacaagaaaatgattgccaagtgaccgaagtgagtggcgaaaatcttttggtaaagattttcttctgtcatgccatcgtggctctcaaagtcattgcccatggcgatcgcataccaaatgcgccgcgtagttgggtcctgtgcgagatcctggctaaattttggaaattttgttgccatagggttgatgattcctctgacctttagccattgctatcactgctaccagtgaaattttggattttgggttggagattgatccaaaacccaaaatattcactgaaattttttaacctactgaaaggatgtgtgcgtggaagaatgcccaggtggtggctattcctccgagtagatagtgagctacacctactgcccgaccttgagtaatgctcaaagcacggggttgaattgtaggagctactttcagtttattatgcgcccagacgatggactcaattaattcttgccagtagccacgaccactgaacaggaacattaagctgaatgcccaaacaaagtgagcgcctaagaacatcagtccataagcggacagttcactaccgtaggagttgattacttgtgtagcttgcgcccacaggaagtcacgtaaccaaccgttgatggtgatagcactttgtgcaaagttgtcacctgtgatatgacttaccacaccatcatctactgtaccccatacatcagactgcattttccagctgaagtggaaaattacaattgacaaggagttatacatccagaacagtcccaagaatacatggtcccaaccagaaacttggcaagtaccaccacggcctggaccgtcgcaagggaagcggaagcctaagttggctttgtctggaattagacgagaactgcgagcgtacaatacacctttgagcagaatcagcacagtcacgtgaatggtgaaggcgtgaatgtggtgaatcatgaagtcggctgtacctaaaggaattgcagcagcagctacttttccgcctacagctaacacaccaccgccaaacacataacttactgcttctagagcgttaggtgcggttgttcctggtgctaagtggtgtaagttttgtacccactgagcaaacactggttgcaattgaattgcagcatcagagaacatatcttggggacgacccaaggcacgcatggtgtcgttgtggatgtacaaaccaaagctgtggaagcctaggaaaatacaaacccagttgaggtgagagatgattgcatcacggtgacgaatcacgcgatccaatacgttgttttggttcacaacgggatcataatcacgcaccatgaagattgctgcgtgagcagcaccacccacaatcaagaagccaccgatccaaatatggtgagtgaagatacacaactgagtagcgtagtcagttgccaaataaggataggggggcatcgcgtacatatgatgcgcgatgatgattgtcaaggaacccaagaaggccaggttagtagccaactgagcgtgccaagaggtggtcaagttttcataaagtcctttgtggccttcgcctgtgaaaggacctttgtggttttctaggatatctttgatactgtgaccgataccccagttggtgcggtacatatgaccggcaatgatgaacagcactgcgatcgccaagtggtgatgagcaatatcagtcatccacaaaccgcctgttacggggttcaagccgcctttgaaggtcagaatgtcagcataagttccccagttcaaggtgaagaaaggtgctaaaccactagcaaagctgggatacaactctgtgattaagtctttgttcaaaatgaactcatggggcaaggggatgtccttaatggcaacaccagcgtctaatagcttgttaactggtgcggacacatggattaagtgacctgtccatcccaaagaaccgcaacctagcaatactgataggtggtgattcaacattgactccacgttctggaaccattccagtttgggagcgcgtttgtggtaatggaaccaaccagcgaacaggaacaagcccgctaatactaagccgccaatggcagttacgtatagttggaaagagctagtgataccccagccacgccatacttggaacaagccagaggtgatttgaatgccgtggaaaccaccgcccatatcaccgtttaaaatatcttgtcccacaataggccaaactgtttgggcgctgggcttgactcctaatggatcagccagccaagcttcatagttggagaacttagcgccgtggaataacattccgcttaaccaaattgtcactacagccaagtggccaaagtgagcagagaagattttgcgagaaatgtcttctaagtcgcttgtatgtgtatcgaagtcatgggcgagggcgtgcaggtcccaaatccaggtggtggtttttggtcctttagctaaggttctgtcgaagtgtcctggtttagcccatttctcaaatgaggtgggtacaggatcgttatcaacgatgactcttgcttttttctcctctcgctccggaggactaatcgtcattcgacctcctctgtgaatagggaatgaggaatcatgtacaccacagagtgaatttcactctttgtccccagatgttttttggggacctgtggatttgttgtttctgttgaattatagagtctgtacttgtactttgttggagacattttaacaataattcaaaatcgccagatttattgtcatatctgcctttttatattcaaagctattgtaaaaaagtcaatactttttctattaaatttacaaactataacaattcttaaaatttatggttaatctctaatacagctataaatcatcatgttgtaactggatatgttgcttatgctgaaatttaaatctgtaaatttagtgataaatattacttaattttcatatttttcatctttatgtaaagagatgaaccaaattttctgtaaatcacaaagttacaacagcttgccgttttcagtagtcagcttgcagcagcataacctttgatatgtaaggctttttgatgtaaatttgtaactaagtaaactgcaatttgctgtataccccagtctgggtttatggtatctggggtgtagggtgtaaagtgtagttaataaattttgctgaataaaatcataggtatagcagcatgaaatataagcaaaaacaagctcttaataaatccttaaataatagtttacctatttttaagtggctcttgactttggtactggttttagttttaagtagttgtgctgataaagctggtggacaagacgtatttattgataagcaaaaaccagttgctgaaattgcccaagttgatcgtaaattttcggaaactgctcctccaaagctaatacaagaactaagaggagatttggaaaattatcaaccacaagtaacaatacttacgcctacagcagatgagataattgaagataatactgttacagtccgttttcaggttaaggacttaccaatttttaaagatcccaaatggcaactgggaccacatttgcacgtaattcttgacaatgaaccttatatagctgtttacgatttaaataagcctttagtattcccagagttgtccgcaggtactcatactttacgcgtatttgcgtctcgtccttggcatgaaagctttaaaaatgaaggtgcttatgcccaagccacatttcacgtctttactaaaaccgacgataacaaccctgaccctaatttacctcttctcacctatagtcgtcctaatggtagttatggtgctgaaccaattatgttggatttttacctaactaacgcgcctttgcatcttatggctgaagatcatcctgaagacacaatgagcgattggcgtattcgttgcacaattaatggtgaaagttttatttttgacacatggcaaacagtctacctcaaaggctttaaacctggtaaaaactggatagaactagaatttcttgataaccaaggcaacccagtaaaaaatgtctttaatagtacagtgagagtgattaattaccaaccgggtggtaaagatactctttctagaatggtaagaggggaagttacggctgatgaagtgcgtggtattgtagatccaaattacacagttgagattcctgttactgaacctacacctactgtaacgcccaaagtcgaaataacaccagcacctcaaccacagatagaacccaaagtagaaaaacccacagttccagaaattgaagtttctcctattcctcaaccccaggtagaacccaaagtagaaataactcctactccagaaattgaagtttctcctattcctcaaccccaggtagaacccaaagtagaaataactcctactccagaaattgaagtttctcctattcctcaaccccaggtagaacctaaagtagaaaaacccacagttccagaaattgaagtttctcctattcctcaaccacaggtagaacctaaagtagaaataactcctactccagaaattgaagtttctcctattcctcaaccacaggtagaacctaaagtagaaataactcctactccagaaattgaaattcgtaaaacacccgctgactcattagaaacagaggagttgaaaccagaaacaacagaaaaaacagggttaaacagattaagtgagtattttaagaatcgaaatgtaattaaacccgaagagaaaaattaactaaaaatactcagttgcaaattttgggataaagtttccatcaaagtcagaccagctacagaattacctatactatctaaagcaggactgtagctggctatagctccttgatttggtactattgctatcaaagccccactgatacccgatttcatgggtaaaccaattttgactgcatactgaggagaagcttcatatagtccacaagttaacattaaagcgttaacaatttggcgatgttgggaatttataaaactacttttacaggctaataattttcctaatttcgctaaatcttccacagtaccagaaatacagcatatttgttcataagtgtcaagagccaattcaatattttcaatgtgttgagtttggtagagatattgagcgatcgccacatttacctgagaacgagtagcacgcacggaagccaacatttctacatctaaatatagttgactaccggctaatttattcaaccactgacaaaacaactgagtgcgatgatttccatttttacctggtaacttatcagctaaagtaatagcaccactattaatcattgggttgcggggatgtccatgatcagctattaactgttctaaagaattaaaaggcattgctgaaggttcaacaccaaccgagtttaaaacatttgccgttcctaaatgttccaacagatatagtaaagaaaaaggtttaatgacactcattaaaggaaatatacaagcgttatctcctaaagtgtaattttctcctgactgacaatagatatgaacagcaacccaactagggttagctaaagctaaaaggggtatccgttgcatcacacttccttgtgttgtttggtttttcccttgctgaacccagagagataaattatttatattgatgtcttggagttgtatcaaaatgctgatctcaatcttaaaatctacaataatcttctacaataatctaaaattactatgattcctcgtgttagagcgccagaattaccagaaaattacccttggttaaatacagataaacccttatctctaaaagcactcagagggagaattatcattttagacttttggacatactgttgtattaactgtttgcacattttaccagacttaaaatatttagaacgcaaatatcaagatagtctaacagtgattggtgttcactctgggaaatttgacaacgagaaagaaattgaaaatatccgtcaagcgatattgcgttatgacattgaacatccgattttagttgatagtgattttcgcgtttgggaacattatactatcaaagcttggcctactttaattattattgatctacaaggatatgtgatcgggcaatttgcaggggaaggacatcttcaaaagattgaaaacatgatcattcagattttgagtaaaatcccaaatcacattaatattcaaccattaaaattcaccttagaaaaacagcatcaaacattaattacacccttagcttttccaggtaaagttttagctacaccagacagtttatttattgctgactctggacatcatcgcgtaattatgagtagtttacaaggggaatttattcaggttatgggaacaggtaaacggggtgtaaaagatggtaattttcaaagttgtgaattttctgcacctcaaggaatgacttatgatagtgacactaaaagtctctacattgctgatacagaaaatcatcttttaagaaaaattgatttaccaaaacaaattgtagaaactattgcaggaacagggaaacaaagtaatatcatctatcctcatggtggtaaagccttggaaatagaattaaattcaccttgggatctagttaaagtcggaaattctctctttattacaatgtctggaaatcatcaaatttgggaaatgaatttattaacaaataccattcatagctatgctggtagtggcgcagaaggttgtgtagatgggaattttcaagaatgtgcatttgctcaacctagtgggataactacaaatggtgaagagttgtttattgctgatagtgaaacaagttctattaggggggtggaaatatcagaaaatggtaaggtgagaactatttgcggtagtgggatgttatttggttttggtgatgtagatggaataggtgaggaggttcgtctacagcattgtttgggtgtagaatattttaatcatcagctttttattgcagatacatataatcataaaatcaaattagtgaatctgagcaatggggagtgtaaaacgattttatcaggtggggaaagttgggttttttctgaaccttcagggttgagtttttttggtgattttctctatgtttgtgatacaaataatcatgtaattagaagggtaaatttagaaactttggaggtgataataatggagtttgctggtttatgtgcgtctggtgtgtgttttccatcttgaggatttaaacaataattaaacgcagatgaacgcagatgaacgcagatgataatggatgattttatgtaatcttatctgaaaacaatgttacgtatttttacggcatgattagttaaataataaatatgatatatttattattgatgtaattgagtttaatgatttagtatattacttgttaggttgatgaacatgaaacataaatttattcctttagactgtgatgatgatatattgctgattaacaaagatacatttaaggttgatagattgaaagaattagttttgcaagaaattcaattaaaattgaactatgaaaatactaaaactcagcaaaatgcctttggagaaatatttatagttgatacttatctgttgataaattcattgaagaatatttttatcggtgagaatgagttaggtattaatgatattaatttccatattaatatcagtaattgtcaattcttaaaaattggcggtaaaggttggaaaaccggacaattgcaaattaatatatcaatttcacctaatagaaacaacccagataatgtttaccttgagttctcacctgatcaaccagaagaacctgaatcaccattagatgatctgagaaaaatgataaataatacgtagggtttattagcaacagcgtaacgcaccattttgatttaatctatctcaatagcttaatgatgaggtaaaaatgatggtaacagtatcaattaaagatgaatacattgaagttttatccgcattaggagatttacaagaatcaatggatttggcgcttaaacaatatactcttgataagattgctgtaaaaattgctgaactgcgtcaccgagatattaagtatcaagaaaaatatcagttagattattctaggttttgtcagaaaatatatgaagatgaagaatttcttcaacaaatagaaaattctgtagataaaacatgggagattgatttagctgattgggaattttgtcataaaggagttgaagattggatagaaaaattacagactattttgctgacatatgtaaaattctctaattgttgctaattcaatatttatttaaaggagtattaataaatatgatataaaacaagattaataacaaatcacaaattaagtatcaaaaacatggaaaatcaaaatttaaataccctagaatatgtgaaacaaatgtcgttattattggaattaccaattaataatgaatataaagatggagtgattgccaattttgaaagaatcaaatcaatagcagaagtagtcaataacttccctttaccagaagaaatagaaatagcaactacttttgaaccatgaatgacgctgtaaatatatctcaaaatgtcttatcaggtaaatttagcgcagttgaaattacccaaacaaccttaaataaaatatccaccaaaaataaagaattaaactgttttactgaaattaccacagaaacagctttaaaagatgctgccaaaatagatcaagaaattgctcaaggtaaaaatcctggtatattgtctggtgtaccttttgctgttaaaaatttatttgatatagctggtttaacaactttagcaggggcaaaaatcaatgctgaaaatttaccagctattcaagatgcaaccgcagttgctaggttgaaaaaagccggtgcagtgttggttggtgcgttgaatatggacgagtatgcttatgggtttgtgacagaaaatgcccattatggtacaacttgtaacccccatgatctacaacgaatagcgggaggttcttcgggaggttctgctgctgctgtagctgcgggtttagttcctttctctttgggttcagatacgaatggttctattcgtgttcctgcggctttatgtggtatttttggttttaaacctacttatggcaggttatcccgtgcgggtgtaaaattattttctagtagtttagatcatatcggacattttgcaacttctgtgagagatattgcgacaatatttgatgttcttcagggggaagatgagcaagatccggtttgtacaaaacgtccgattgatttatgtttaccacaaataaataatgatatttctgggattaaaattgcgatcgccgatgattattttacccaaaaagcagaaccagcagctttagcagcagtggcaaaagttgctaaggctttaaatgttactgaatatgtcacaataccagaagcgaaaatagctcgtgctgcggcatttgtaattacagcttgtgaaggtgcaaatctgcatttagaaaacttaaaatcccgtcctcaagattttgatccagcaacgcgagatagatttttagctggtgctttaattcctaattcttggtatattcaagcacaacgttttagaagatggtatagagatcaagtgagagagatatttgcaaatgtagatataattattgccccaacaaccccaatttctgccccattaattggacaacaaacaatgattttagatggtgaagaaattcttgtccgtccacatttagggttgtttactcaaccattgtcttttattggtttacctgttttatcagtaccaattagggagaaaaattctctacctttaggagtacaattaatagctgcaccctataatgaagctttgattttaagagttgcagcagttttggaagcacagggaattgtttctggtggtttactgcatgaattttgacttctgaggtttcgccaaataaattatgaaaatctgtgaaaatttttatattgagaaatttccaaatcgcgttacaatcattaaagcttaaatgagttaattagctgattcagcttttagctaactccaaccatctatctagggcttgctgaataaacctaaaaccttgatatatcaaaggttagaggctgataaacacagaaattagtccaagagttttgaagggtataccggaaaaagtgtgcattttttgggatttcaagagatggcaaagaaattttccaatctcctcctgactcctgactcctgactcctgactcctatgccctcacggaaagactttctcagtaacccctatctattcccaaacttgggaaattatatgttacagctagtaattactgtttgtgtactgcttttaggttcagcattgtgttctgctacagaaacggcgctgttatctgttcccacattgagagtgcgacaattagcggaatttaaaaaacctgccgcagttgcacttctagcgattcgtgaaaacatgaatcggcctattgccacaatagtaatcctcaataatattttcaacattattggaagtattatcacaggtagtattgcaactcaagtattaggagatagatggcttggtatattttcgggaatattaacttttctgattattatttttggagaaattatacccaagacaattggtgagagatattctgaacaaattgctatactcacagccatacctgtaacgggaatttctttggtttttacacccttagtgtggattttagaaaatgtcactgcaccattttctcaagggagaaaaagaccaacaaccaacgaagcagaaatcaaactcttagcaaatattggtcaacaagaaggtattatccaaagtgatgaagcagaaatgattcagagggtatttagattaaatgatgtgacagcatctgatttaatgacaccccaaattatgctgacatatatacgcggtaatttgaccttggctgaagcaaaagcagatattattgcttcccaacatacccggattattgttattgatgaatctattgatcaagtgatgggatttgctttaaaacagagtttacttacagcgatggtggaaggaagtggtgaacaaaaaattgctgatttagctagaaaagtgcgctttgttcctgagatcattcgtgctgacaaactgctcaaaaattttatagaatcccatgaacatcttgcagtagtagtagatgaatatggatgtgttgctggtgtgattactttggaagatgtgctggaggtaataactggtgaaattgtagatgagactgataaaacggtcgatttacaagaaattgccaggaagaaacgagcaaaaatgttgcagtctatcaatactcttcatactggagaaaaaactgaagaaaaacatgataactatgatctaaaaataggaaacacaaattaatttaaaattccaaatttttgcaaaataagctacgcgaaaaaaacttaacatccaggaattaaacattgtgaacttccggaggataaataacttttccttgatatttatcttcataacctgagagtggtttcaccataaaaaagtcttcaggaacattaaaaggacattctatttgataatttatggctgcttgaaaaccaaaggggtgataaagtttgggatatcccaaaactacaactaatgcttctcctctattgtctgctagttctaggcctgttttcagtaatgcttttccaataccttgatgttggaattggggatgaaccgccattggtgctaaactcaatactggtagttgttcttgtgctgttactaagtcaacatagctaaacatgatataaccaactacatgatcttcaatttctgcaactaaagaaagttcagatatgtaagcgttagatgagcgaataaattccacaagtttagcttctttttttcccctaaaagctagtgtgttgacttttgctatggttggatagtcgaggatattttcagcacggattttcataatcaaattgtaattatttatgtaattatttatgaaagtgtatgattggattgtggttggtgcaggaattacaggtgctgcacttgcttatgaattagcaaaaacggggttttcggtactgctgctagaacaagacaaaacaccacaaaatgctactcgctatagttatggtggaattgcttattggtctggtacaacacctgtgacacaacaactatgtcaagaagcgatcgctcgttatcaaatcctagcgccagaattagatgctgatatccaattccgagaattagatttattactaactatcgctaatgatactgaaccaaaggtagcagcagcatcctattctcatcttagcacaccaccccagctattgagtgttcaagaagcttgtgagttagaaccattactcaataaaaatgctatctctggtactttaactgtcaaacatggtcatgtccatccgcaaaaactaaggcaagcatacattcaagcatttctacgtctggggggagaaatacagtttaccaaagtattagaacctacatatatttttgtcgctgacaaaagttttagaggtgtaaaaacaaccacggacaccttccacagtgctgatatagccatttgtactggtggaatgagccgaaaattattaaaatcagtaggtatttctgtgaagatttatttttctcatgcagaaataattgaaactccatcagtggatctgcggttacgcaccttagtcacaccggcgattttacaacgccttcaattagaaattgcatcaactcaaaatgatcaattatgggatcaacctggtgaaatagtaccacctattttagatgcaggtgcagtccagtttcttgatggtagtttgcgtttaggtcaaattagtcgtattcttacagatccccatgaacaaattaactcagaggaaagtgaaaaatggttgcgaacaagtatcacgcacatattaccagctttgggaaatttaccaggaacttggcatcattgtttagttgcatttagcaaagataaattacctttaattggtactattcccgaatttgaacatattcatattttctctggttttagcagtccgtttgtttttgttccacctttagcacaacgctttgctaaatttctatctggacaggaagataagattattgatcagttgttgacgctacccgcctgaaaaggacggggattcttgtttcaatggtagggacaattcatgaattgtccctacatctttttcggacaggtctaattaggggttgctgagaaagtctttccgtgagggcataggagtcaggagtcaggagtcaggaggagattggaaaatttctttgccatctcttaaaatcccaaaaaatgcacactttttccggtatacccttcaaaacccttgcactaatttctgtgtttatcagcctctaacctttgatctatcaaggttttaggtttattcagcaagccctaattaatgatgatcgaacaaatctaaatctgtaactgcgccaacgctactagaggctacgagtttagcatatttagctaacacacctttagtatagcggggtggacggggttgccagttggcacgacgacgggctaattcttcatcagatacattgatctgtaataaccgcgcattagcgtcaatggtaatgctatcaccttcttctaccaaggcaatattaccaccaactgcggcttccggggcaacgtgaccaactaccatcccgtaagtaccaccggaaaaacgcccatcggtgattaaacccacggagtcacctaaacctgcaccaataatagcagaggtgggagcgagcatttcccgcattcctggaccgcctttaggtccttcataacggacaattaccacatccccagctttgattttccctgctaaaatggcatctaaacaagattcttctgattcaaatactctcgcaggtccggtaatggctggttttttcaccccggtaattttggcaactgcaccttcagtagctaggttgcctttgagaatagctaggtgtccttgggcgtacatggggttattccaaggacggatcacatcttgagcgggtgatggttcatcagggatatctgctaaaacttcggctacagtttgtcctgagatggtaagacagtcaccatgtaacaggccatgaactaagagcattttcatgacttggggaataccaccggctttgtgtaagtctgtggctacatatctaccactgggttttaagtcacagatgacgggaacacgaccgcgaatagtttcaaagtcgtctaatgtcagttctacaccagcagcacgggcgatcgccagaaaatgtaaaactgcattggtagaaccacccacggccataatcacagaaatggcattttctatagatttacgggtgataatttgccggggtaagatttgtttacggatagcttctactaaaacggctgctgatttggcggtactttcggctttttcttcatcttctgcggccatggtggaggaatagggtatactcatgcccattgcttcaaaggctgaggacatggtgttagctgtgaacattcctccgcaagaaccagcaccgggacaagcgttacgttctactgctaatagttcattttcatcaattttaccggcgctgtgttgacctactgcttcaaaagaactgacaacggttaagtctttaccgtcatattttccgggtttaattgtgccaccatatacaaatatggcggggatgttcatacgtgccattgctaacatagcaccgggcatatttttatcacaaccaccaatggccagcacaccatccatactttgcccactacaagcggtttcgatagaatcggcgatgacttcccgggaaactagggaatatttcattccttctgttcccattgaaatgccatcactgatggtaatagtaccgaaaatctggggcattgcaccggcttcttttacaccaatttctgctctttgggcgagtttgttaatgcccatattacaaggggtgatggtgctgtaaccattggcaataccgacaatggctttgttaaaatcttcatcttggaaaccaaccgcccgtaacatagcccggttaggcgatcgctgcaccccttgagtaactactttacttcttaaattttctgccatttttattgattccttctgtaccatgatcgctattatggcgatttttgtgggttttgtagactctgtagattttgtagattttgtagatatttattctctcaaaaagtggtcattggttattagtttcttagttattgatttattaatgattggcttattaatcattggtgattatttatgtatcaaataagtagtcgtgtaaaataaattttatagttaaattttatagttaaattttatagttaaatcttatagttagattttatagttagattttatagttagattttatagttaaacgatgttttaaaagtgctattccgtgaagtaatgtaattaaaatcatggtataagctgttacacagctaaattgtataatcctaatattctgaactcttgtttaacaggcaagatgcctgttccacttatacaaattaaatgaacaacagcttatcactttaaattacttagtttacaaatctttagaaattgttaaaaaaaaatttttaggtataaattaactcctattaaaacctctcccttacaaggtgagatgctttaaaaaaaccttaaaaaaccttttacgtagttatgtaatgacttatgtaacaagtgtagagatgttagtttctcgtagattattagttctgctttatacttttttaacaaactgctacacaaaaaaaaataaaaaaaataaaaaaaataaaaaaaatatacttcatttcaaaactgtgtcacaactattatcgtataattagattcaaatatatatagtgtcatcaaagtaatctgtgtgggagtagtatacataggcgatcgcgcaacaggcaagactcacctagcactagagttagccaaccccgatggtgaatatgtcaaagttagtaatctcgactatgacaatcttagattgtcattgctggatgaaaattaccaaggcaagcccacggatgcagtagcaccatatcaatattatttagatatgaatgtgcggctaccatctgggaataagcaggttttagtaaattgggttgatacagggggggaggtatggcgaaaaagttggcaaaaagataatactgatcggtggattcaatttttagatcctattcgcaatagtgaaggactattacttattctcccaccccatcgggggatgagttttcaaagtggtgtggatgtagaacagttccccacacagaaacaatggtgtaatcgttttgagagatgggtaacatttttccatcaacaatgtccaaaagtcagacatttggctatttgtatgaacaaagctgatttattttgtaatttatccacagaaggaggaaaactagcttataaaccctatggtagttccctcaactggcaacaacgacatagttatgttttacaaaaatattttcgtccgatttattcccagatagaaaaattaaatcaaggtattgatggcgcttctgtgcggtgtttcattacatctatttaccatcggagtctcctagaattaccgtggatttatttaggtagttttttagctaaataggtgtaaattatgtagatattatggatattattcaacgataacaaagatttgaaaaatcattacaagggtgtgatatgggcaatattcacgtaattggaccacaggcttcaggaaaaactacttatttagcagctttggcttataaaccaagcacagcagcttggaaagccaaaaattttaaagttcaagcattaaatgaagaaaccaaagaactagcagataaggcagaaaatattattgtagaaggtgcatctttagagcctactcagacctatgttacaaccattgatgatttaaaagtttactcatttttgattgaaatccagaaaaaatggcaaaaaccagaaaaaattaatttagctgtccgtgactatccaggagaagtttttaaagaattagaatctgtatctgctgatccagtccatgaagaatttatgaatgagtgtttaagtaaagatactcaagggtgtttaattttgttaactgagtggaaacaaggaacagataaattttataaacgagttttcaaaaggttcatagacttaatggataaacaagaaagattgcaggatttacggttagcagtagccatgagtaaatgtgaaagaggggaactgtggcctggtaggttagatccagaaaatgatttatttgccattcattttccagacaccctgacatttttaaaagacaatattcccagtaaaaatttacaattttatgccatttctacctttggggttttacaccgtacagatccacgaccaaatcgcaaagaagaattaggaaaacagaacagatattctgttttaagagaacctgaacaatggtctccctatggaatgatttcccctctttattggttgagtacaggtaagaagatgaaagaagatgcttaatttatttaaaagtaaaaatcagaccccattacaaagtagtgtagtgttacgagtgataggcgatcgcgcttctggaaaaaccacatatatggcttccttagcacggtggccaaatgctgatcctgacagtccagtgcaagctgtaactgctgtagatgaaggtggagaagacttgatcaataaagctcagaatatcttagaacaagggttacaactagaaccaaataagttagagaatatttcagaggttacaaattgcactttgcaaataagtctaaaagaaaaaaaaataggttctccattgtttaacctgaatatcagttctagagactattcaggagaattttttagtgacttattacatcaaagtcaaaatccccagttagaggaatatttagaagattgtttacaagctaatggtattatgtttttagttgatggtagcagtcgccgtaaagacttagaatatgccaatggtttagataaattgttgttagcactggatcggaatgatatcaatggcagtaagcgccgaattgccttagtattgaataaatgtgaacaatctgatttatgggtaaatcgagataaaccaggatttttagcatcagcgcggtttccccaagtttgccgcaaattacaagcttggcaacaaatgggaggaggagagatagaattttttacagcttctgcttttgggatgttaggtaataaatatcccgaaccaaatgttaacttattaaataggagtagaggaggagtgagagcggtaattaaaaatcctaaactgtggcggccttttggtttagttgcgcccatttattggctggctaaaggttcacgtcatccagaattagatcatgtatgaaagaagttagccatttttgatcttaccctcaccctctcctagaacaccgattcattaattgtaagggcgaagcattcagacagaatatcaatggttttagcgataggttatcagccgaatgcttcgcccctactaaaaccaaaatttcaaagcctctctccttgtaggtaaaaataaaaaacatgataaaaaatatgagttcaccaaacattgaaatccacgaatttagtacaggtattcacattcaaaaacgggataatggttgggtgtcccttggttttacgggacaatatatgaacgctactattaaccctattcctcaagttgtagaaagggcgatcgctaatcaagaatttgctttaactgaaggtgcatctagtgaaaaaccggcaattattgggcgggtagtaggaagtggtgatgatgcttggtgtgtaatcgctgttgttacacgaggagaggatgaagtgggacgcagtgcggctttttatcgttattttttatgtaagggagataacagttatttacggtatatattggcttggtgggaacaaaatcaaaaaccaagatttaaccctttagatgttaaagatagtcctcatttatttacaggagaaactcctaaacctgatcatgatcaaataaatgaatataaatctttaccatttgcacaacaaaaaccgatagttttaccagtagaacggcaaattgatttatatactcttaacagtttagctattagaaaacctaatgaatctaaaaatggtttacctgtatcctgggcgtttaatgtagaagcactggtaaaaccggaacgtttccaaataattcaaccagcatcacaaaaagcctatgacggactaacacgagccattgccaatgctagtcagattgtttcagcagtaaattttgatgaagcagcgttaaaggccgggattcgcagtttaatgaatagttcccaagtcaaaccggaagcagtggaggaaattgttaaagctgtagaaaatgaggaagttactgatgaatattgggagaatttatttaatggtcaaggtgcggataaagcgatcaagcaaaaaatttatagtccgcaaatggtaagattgatgacaataagagcgatggttttaccagagactttaccgcagtttttggcatggttgaagattcaacctggtaaaaaacctgatgaaaatcaaatgatgtctttagagttgcaaaaagctattcggaaatcattccctaaagaacaactatcagcaggaattaaatatctattacccaagttattagatgagaaaatatcggtagatagtcttagttggttgttagcgatggaaggtagtgcttgggtttatgctcaaaaggaattttttaatgatattaaatatgatttacaattaattcatgatcattgttataattctaataacttatacccaaattctgttcttaaaactcaaattaaaactcaaaatgattcatggcaaaataatttgaaatgtgaaaaggaaatttgggaaggtttaatacgctattggaaaagtattcaatatcgcaactggaaaattgaaggatatcaacctttagctgaattatttgaaaatttcaaagaatatgatttagctgcatatttttatcaaatccaagagggagaagttaaaaaagatttatttgatctagtaactgatgcaccataccgtcgccgatcttcatctgttgtttttggtttaagtcttgtacgaaaaaagaatttaattgatcatgcctttgattttattatttttattgtggagtatgatatgaaacttggattggttgttcctctttccctagtaatcttagttagtggttggtttatcggtacaaaaacttggcaatcttctactagtgcaactgatattgaaaaatctttgtgtagtaagacttttaacgatcctcaagagaacaaagactgtcaggttatattgcgaaataatgacaaattgacaggtagtggcatttatccttttaatgaaatcaagacattaattccagcgattgtaaatgatgttgttgaggaaaaaattaacacacaaacacaaacagcaacacaaacaacaacatcatcaacatcaacacaaacatcagtaaataaaaaccagataaaagaaaaagtctcaagcaagctagaggaaatcttagaaaaatcaatatcagaaggagaacctaaacttcaatacgcggatttatcccctgataaagaatcaacagacttagcgactcaacagcaatgggtgagagcaatttatatttatcaaattaacaacaagataccatatcaaaaaatcgcagttaataatagtgaaaaacttaaatgtttcttgtggattttatgttctaagcctaagaacgataattctaataaccaaactgttcaggtaaaaaactctaagctttataaaaaattgacagaagatattaaagacaaagtcaatgctaaaccctttacaagaggggactaaggagggtattttaaggattacaaataatgagcgcgatcgcttgtgttacccttttaccccaccctaaccctcccctattgttgtaaaatataaatactgcattgagaaacgatcacttcctgcggaatgctctccgaacaaagtttgtacatttctgggtttacttactgacaataagaggataacaaaatgaatactaaattacttgattccctgattaaaattattaactctctaagtgatgaagaaaaaaagatcatctctcaaaatataactacatcgtttcctgtgcagcaaaataattctatcaatttagaaaatgaaccatttatcggaatgtggaaagatagaaaagatatggaagatagtaatcaatggttacgtcagttaagacaaaatgagtggaaagtggaaaagtgattaccgctttattaaggaacttaatttacacccttatccctaaaaattaatctaaaaattaatatttaagcaatcaaaagatccaccaaccatgagaatctacctttacatcatagccggcattacatcagccttactaggctggaatataggtcaatttttcctcacagatttagggttattatcacaatttcccgaaattgtcttatttccttgtatagcaatttccttagcatttggtatggtgataaatgaaatatttatcagcaaccctaccagaccaaaacgcagtttgcaaactgccaaacaacccctattaatcgccttgggattaggtacactttctggtttaatcgctggtattatttcccaaattctctttttgccaattattcgtgtacctacacctatagtcagaacattaggatggttattaattggtagttctgtaggtattgcggaaggtttaagttggcggtggtatagtatagaagcgggaagtaaaaaacgctttcaacaaagattaaaaactagcgttcttgctggtattggtgcgagttttaccgcagcagttttgtttgaaataatgcgattaagttgggggacaatgccggcggaatttaaaggtatagaagatcccattggttttagcattttaggtcttttattaggtgctgcttttagtctcactaactcccctagttatattgcagctttgcgggcgggtagaggttttgaatatgtggaatttaaagatgttcctcgacaatatatagaatttaatcatgatgttaaagaatctgtagagtctgtagagtctgtagagtctgtagagtctgaggatgatgttaaagaatttgtagagtctgtagagtctgtagagtctgaggatgatgttaaagaatctgtagagtctgtagagtctgtagagtctgtagagtctaaaaatgatgctcaaaatccaccaataccaaatatcaatcaatcttatcctgcgattgataagtcttacctatcatttatcacagaaactgacaatattaatgatgatgaaattgaagaaggtttatcaattcagttacctggtaatggtacaatcagaataggctgcactgttgaaaatacacatatttctattcctggtctaccgctccatgttgctgatattaaactagagaaaaggacagctactctcattccagatcatcagtttttttatgcgatagaagtaaatggaactaggttgaagtctcgacgcagtattcctttaaaacataattatgttttaactttttatacaacaagtgtcgatggtattaatgaagagaaatattatcgttttgtctactataaccgctttttagatccccaggcttaaagacatggtaaaaacagaatttacaacagaatttccagatgatcaaatattgtcgggtgggcatacttcgacaagctcaatacaggtcctgcccgcccatcgaaaatcaaaaattatcagtaaacaaatcatatcaattacaggcattaccagcattacaggcaagatgcctgttccacaagagttgattaaaaattgttttattggtaagtctttagctgtatttttgttgttgcttggtgcttcatttaatcctactttagcagcagttaaacaagctgaaattgtgggtagtcctacaattaaaaatgataaagtaacagttagaattaaggtcaaagataaaaatgataaacctgttatgggtttacaagatactaattttaaattaacagttgataatcggacagtccaatttaaacctaaagattggaaaagtccagaagaaagtgtacctcctcctgcttggattatagttttacttgattttagtggtagtatgaatcaggtagatagtaggggaatcaaaaaagtcactggtgcaattaaggcgattcggcaatttactaaaatttctggagagaggggaggaaatacacaaatttctatagttccttttggtaagtctggcaataattgtcctgaatatcctgtcaataaagaaactttagataaatttctatcagccgatgatgttaaactaggaaatcttctagattatttatctggtttaactccctgtgcatctacagatttatatgaacctttaaccaaagctgtgaagtttttaggtaatgaaaaagactcccgttttaacttgccagaaaattcttcccaaccacaaccaagactatcaataattctcttgtctgatggttatcataatgcactgaatgaatacgctgattttgaggctttaaaaaagttacttaaaggttatgaaaacattacagtacatactttaggttatggattgacaccacaggaattaggtataaaatataaattaggtagacctgctacccgtggtgatatcaatacaaaaaaagttcctgaagcccaatttgtagaccaaaaaagattagcggaaattgccaatttaacgggaggtattgcggagttctctggtgatgcagaaacaataggagagaacttacaattatttttaaatgctttattgggagaatatgaaattacctatacccaacccaatgcagaacggggttctaaacacaatattaaagtgagggtaactgaaaaaggtaaatctgtggattcaaaacaggtagaatatattatgcctgtgtttgggcgatcgcttccttgggaagttcgtttaatgatggttataacggtgttatttatcgttattgtaggggggatagttccttttcactattggggaaaatatctcaaagcagaaggtaatagatgaattgaaatgatgaattgaaataatgaatttaaagaatgaattgaaagagtgcatttaaggaatacaaaggaatgaacttgatgaaaattcttagattttatgtaagtgttttgagtttttatttcctgactggttgtttaccaattcaaccacttaatgaaatgggtatttttcagaatagttctcagaataattctcagaataattctcagaatagttctggatgttctacccaaccaaccacagttttaaaaaccaacgatgttaaacttgtttctctcaattctcaaaccatcacagagtcagggatggtgacaaataataaatcacttggttacacctttatagggaaaacaggtaataagttagtttatcaaacaaatcaaaatatttgtatttgggtttatacaccagataataaattaatgaataatcctgttttacctgttgatggtaaatatattatccaaattgctgctatggaaggtgcaactacttttgatttagcattgcaactagaagataatacccaagctgttaatttatcatcttctcctaaacctgtaacaacaactaagatcaaaaaaccatcttctcctaaacctgtaacaacaactaagatcaaaaaaccatcttctcctaaacctgtaacaacaactaagatcaaaaaaccatcttctcctaaacctgtaacaacaactaagatcaaaaaaactcagacacaaaaaacaactaataatatctcaccaaaagaaaatatttctgaaaaatcaatatcagtatcaacaataccaaatagaatatcaccagcaaaagctataaagaactattatactatgattaataatcaacagtatgattcagcttgggatatttaccccacagaagttaaagaagacaaagaattacaccctaatggttatgattcttttattgaatggtggacaaaagttaattatgtcaatgttaataatgttagtattgcatcggagaataatgattctgctattgtcaattttagaagtcgttatgaaatgaaaaatggtaaatcaattcctgtgagattaaaattttatcttgtttggaatcaagaaaatgagaattggtacgttactaaaattaagctaattaattcataaaaatatgaaaatatacctaaaaaacttatttatttactctaccattgtaacctttatcacatcactcatggcttgtcagaatgattcttttttacctgattttactacttcctctggttgtagtgaaaaacctaaagtttctttgaatgcaaaagatgtagaagctatggtactacatgaaagtacaattacaaaatctggtcaagtcagcattaataaatcagttggttacacttttatgggtaaaactggtaataagttagtttatcaaacaaatcagaatatttgtatttgggtttatacaccagataataaattaatgaataatcctgttttacctgttgatggtaaatatattatccaaattggtgctatggaaggtgcaactacttttgatttaggattacaattacaaaaagatgcagaaactccaatatcattaactcaatcaagtctcttagaaacaaaacagacaaaaaattcaaatcgacaagatcctgctgtttttattagaaattattatttatctttaaacaaccgcgagtatagtcaaacatggagtaatttatcagatcagtttaaaaattattctagtagttattctgaatatcaaaaatggtggaatagtgttaaagaaatcaaaattggtaacattgagattgtaaacattagtaacaatactgctagtatagatgctgagttatggtattatatgaacgatggtagagagtttcaagatactcgcaatcgtatttatttaatatggagcgaaaataataatacctggctaattaatgataagtctgaaccatgatgatccaagttaatatttatccgagatttatccgagatttatctgagacttatctgagacttatctgaaaaaataattttagggaaactacatgatatgatcaaaaagttaattgtgtgttgtacctgtctatctatccttggttgtcaaacaaacgtaaatccacttaactctatttttcagaataatgttgttacctcctctggttgtggtgataaacctacagtttccttgagtggaaaagatgtagaagcagttgcattagatgaaagtacaattaccaaatctggtcaagttagtgttaataaacatattggatatacttttacagcaaccacaggacaaaaattaagttacagcactgatgcggatatttgtctttgggtgtttactccaaataatgaaattatcgacggtggagaattgcctaaaaatggtaaatatattattcaagtagctgcaccccaaggggtaaaaacttttgatttaaaaataagtttaggaaatttagaaactgcggtatctactcctacacctgaatatactcctacacctgaatctagtcctacacttaaatatactgctagacctaatactactagagctaatacacctgaatatactcctacacctgaatatactcctacacctgaatatactcctacacctgaatatactcctacacctgaatatactcctacacctgtacagccacaacatgatatttctcaagaagaagcattagaattagtccaaagatggtatgcagcaaaacctcagatatttggacctccttttgatactagcttggtagatcaattagcaacaggaaaactacatacatttacaactaaacctgatggaccagtagcgtggttagaagaaaatgatgcttattacaaatacaattcttcagaaatacaaagagttattgatttttctaattcgggaaaattaccttacataaaagttagagtatccgaggaactgtatttatacggtaaaagaggaattgatagacaaaattcaggatcttacactaataattttatctacgtttttgaaaaagaaaacggaacttggaaaatttatgattataggaaggtagcaagatgaataataaaactcggatcaaaaaatataaagtcaataaaaaagtattattgaaaaggttgattttccttttcttgttacctatttccttgttaataattattgttaataaattgattgcgaatcaatctgaaaaatctctacctacagttcaactagatgttacttctaatcctagtattagtggtaaaaatgagatttctgtgccttttagtaagagtcaaattcctgtttctttatcaaaggaaaatataacagaaaaaacaatagaaaaaacaacagaaaaaacagaacaaatgtcaactacttctccattaataatggaaaatactatacaatttacaccaccaagtataggactgaacgaaacaagattgattcaacctgatgattataatttagaaaatctaccaaataaatatgctagtctagtttataatgtcaagtctccagaatttaaaagtaatgaaaatctagacaacatagttaatcaaattgtaaattatgtagaaaataaaggtttgccgagtgataaactatctgttagtttattacaaataaatcagccagaatttcctacttattctgggtatttatcaaaagaacctagatttactgcaagtgtagtaaaattattttggatggtttatttgtatggaaattacaacagtaatcagttacaacaaggaatcatttctgataaagatgtaaagaaaatgattcaggattcagataacgaatcttctagtgtgattgtagataaaatctcaggaacagaatcaggtaaatctctatcagatgaagagttacaagactggctgcaaaagcgtttagccatgaacttattttttcaagatgctggttattatataattaatatcagccaaaaagtgtttcctacttcttataaaaaaaatgatggacctgtaggcagagatttacaaattcgtcgtagtgaaacaaaccctattcgcaattatactacatcttatgatgtagcaagattattatatgaaatatataccgaaaaatcaatttctaaacaatatagtagaaaaatgaaaaaattaatgaaaagagatttagcgccagcagcttggaaaaataaacaatttaatgctattgagggttttttgggtcagggactacctgaagatgttgagttttattcaaaaatgggctggaactctaaaactcgtaacgacgcagctatcataattagtcctgatggaaaatgtaaatatatattagttgtttttggagatgacccaagtttttttcaagataaaactttatttccagaaatctcgcgtttagtttacgaaaaaatgctaaatagtcccaatacaatatctgaattaaatccatgacaacttttaatctacttaatcgcttaaaaaacaacaaacctctactatttgcaatatacggcgctggtggatgtttgacagcagcaattttattaggagaaccatttttagccttaactaaatctgatacacctacccaaaacgaaccccaagcaatagttttgttaattgacacatcctcaagtatgagtgatggcaaattaacagaagtcaaaaccgcagctagtaaatttatagaacgtcgtaatttacagacggatcaaatagcagtcgtcaattttggtatagacgttaaaactgttactcctctgacaaacgacattaatactttaaataatgccattagtagtttatcagaacaaggttctacaccaatggctcaaggtatggatacagctttaggagaattacaaacaactacattaaatcagaacatcaataataatatcattttatttaccgatggtataccagatgatcccaattttgcttataattcagccttagcaactagaaacgcaggaataaaattaattgcagtcgctactggagacgcggatattaattatttaactcaaattacaggcgatcgctctttagtattttatgctaattccggtcaatttgatcaagcatttcgcaacgcagaagctgtaatttatcaacaattagttgagtctaattctagagaaaactatagtattggtgatttattattacgtatgagtggttggacagcatttttagcaatgggaatatccctagctttaattatgggacaaaaccgctatatgcgtttacctttattaacaacaaaaaaaggaattattgccgtcagtggtagtttaatagcaggaacaatagcaggtacaacaggacaattattatttttaatattttcacctctatctaatatagcattattagaagttggtagaattgccggctgggtaattttaggagcgttagtaggaggaggtacaaaatttttcgttcctaatttaaacctcaaaaatgccttaataggaggaacaattggcgggggaattggtgctagtggttttttaattactgctagtatttttggtgatattttggggcggttatccggtgcatctatcctgggattttttattggtttaatgatagcgtggatagaacaaaaacaattagcatcagcaccatatttattggtacattggacacccacggaacaaacaacatatttattagggacaaaaccaattttaattggtacatctttaaatgtggaaattcctgtaaatgctactgatggatttacaccaattactgctaaaatcttcaaagaaggagaaaatattattatggaatttaatcaagaatatgcgatgatgaaaaaaatgaagaaaacaactcaagatttaaagattggagatactcggaaactaggacaaattaccatagaagtcaaggataaaaccgctaatcaatagttaactaataatggttaaatatacattttacctcaaaatccaaaactccaacgaaaggtatgaatacaccctagatttaaaccccatgcaagaagatacaccagaacaggtttttactcctaccataaaagaaactatccgtacaacattacaaaatctcagcttatcagcaatcaaggatcaccaacttaataacattattcaaacctggatagaagatattagagagggttatagatttagttccctaactctcaatttaagattattgatagaggagaacattgacaaattacaagaaaccggcaatcaagaaaccccgaaaattattaacccagatatatcagatatagaaccacaatttgggatgttaccacctttgaattttgtgtaatcatgtttatttaattattcaacaatcattcaataatcattcaataatcattcaataatcattcaattaggacataaaaatgcagaacgctattaacgttaatattactccccatcgggaatttatgccagcagacagcacagcacaaaaattatttgtgatgttgaaattacgccccattaaagatgtagctacaagtcgcccacctaccacatttacctttgtgattgacaccagtggatcaatgtatgaagtagtagcaggagatgtcaaacctacaggtattacttatcaacaagatgggaaacaatatcaacaagtcacagggggaaaatcaaaaatagatatagtgattgaatccttattagcattagtcaattcaggaaaattaacaacaagcgatcgcattgccatagtccaatttgatgataatgcttcccaaattattgggttaaccagtgctacagaagtccaaaaactagaaaccgccattaacaacctgagagaattttccggtggtacacgcatgggtttaggattacggcgtgcatttgatttgttaagtgaacaacaaatgacagtcaaacgtatcctattatttaccgatggacaaacatttgatgaagatcaatgtcggtcaattgctaataatttagccactaataatataccaattacagccttaggagtaggggaagaatttaacgaagatttactgactcatcttagcgattttacaggaggaacattactatatatagtaccaggaattgccaaaggtacagaaacatcaattttagatttacctcataaaatcatcgctgaatatagccaagcccaacaagaagttatcactaatttagccttaacagtaaaaacagtcaaaggagtagaactaacccgcgtagttcgtgcttatcctacccaagcagaatttcctctcaatcaagatccttatccattgggaaatgcgatcgctaatgacgaaaccatatttattttagaatttaccattaataaccgccctgcttctcgtgtacgtattgcccaactaggattaacgtatgacattcctgggcaaaaaatccgtggtgaactaccaccacaaaacctaattattcaatttattcccggagaacaaaatgtagcccaagttaataaagaagtcatggattatgtacaacaatgcaacatatctaacttagttgatcaagctactagaatagcagaaaaagacccagaaaaagccgaacagatattagaaacagcccgacgcatgacagttaaaatcggcaacacagacatgacagaatccttaaataacgcccaagcagaactgcgtaaaacccgaaaaatctcaccaggaactcggaaaaccgtgaaaatgggtgcaaaaggtaaaaccgtgaaaatgggtgacgatattaatgaaatgccatcagaagaagaaatgcgaaaactcacaggaacatagtaattgataattgataattgataattcctaattcaaagttaggggtgactgtaaaaccttgcacgaaaacaattaataattgaaaatcaggagaaaaaaccatgattacttgtacagcttgtggctatgatcaaaacccagacaactcagaattttgtaacgcttgcggttcagaactgcaaactatcatcatacccccaccaatcacacccccaccaatcacaccctcaccaatcaaaccctcaccaatcatagaaccaagcgtagcacctacagtcattcaaccacccctaccacaacctaactatcccataattactaatacattcactacaaatacatccaccaatgctaaaataatatgcaaacaaattaacgcccccattccagaatttctcatagagaataacgccatagtaggtatatttgatcctgacgttggaccagtagatatagatttagaaacattttttggaggagaaacagtatctcgtaatcatggcgaaatttatcatgaactaggaacatggaaagtcaaagatttaggttctaccaatggtatatttatcaaatcccaaggacaaacgcgctttagttccagaattaccatacccacccccttaaactctggtgatgaaatagcatttggtaaagttagatttctatttcaaaccttatgaaaaatatgaaaaatcaaacttcctttttcagcttaaaactaaataaaccctaaaaataccacctaaatacccgcaaaatttaataacctaaaaatcgggtatttattcttattctctttgtaactctgcgtctggcgcgtgaaaaaaaatgagtgaaattacaaatccatcgccattaataattcaagaaaacatctgttgtcaaatccaaaacctgcaaatagaaatcatctcctacttaggacaaatcacacctgagattgattactttcaagttaacatcatagatgctgaaaaaccagggttactcagaataggtggaactgacagcgccctcaaccgagaattagaattaagaaaccaattaggagattataaattaatttctccactcctagcgcacaccatagaagatcctataaatattcaagtttctcatttaccaattgctgataacacagaaatagatacacaatcagaaattttcaaaacagaaactttagcagatgaatatttagcagatgaaactttagaagatgaatatttagcagatgaatattatccagaaactgaaatcatcaccaacacatccaatcaaaaactcctactattaacctaccttccccaagaaaatcaaaccttagaaacttggttaaaaaccgaaaattccttagaacaatcattattaattaccagccaaatctgtcaattattccgctatttacatcaaagaaaatggtgtattattaatataataccccaatttatgcaaataggaacacccatccaattctttgatttaactagcgcctatcctgtcggtgaaaatctcaatattggcttaatgggaaactattgcgcccctgaattagcatactgtaaatatcctattcaagaaacaatgagtagttacacagtagcaggattattatatcatataattcacaaccaaaatctacctaacgatcccactatagaaatacaaatcaaacccattcctcacctgtatcaaatcctgaagatttgcttatctcccatcccggaagaaagatttacattagaacaattattaacaatattagttaatacccgtcaagaaattagcataccagatattacttgggaagtagccagtttgtctactgtaggattatcaataaaccgcctgaagaatgaagataactatggaattaaacaacaaaaaaacagtgggcaagaaactataattttagctgcgatcgctgatggtatgggaggaatgtcccaaggagaattagccagtaaattagcaattaaaaccatcttagaaacacccatacctccaacaaatcaaaccaaagaacaatatcaagaatggttaacctccttatttatccaagctaatgaaacagtatccaaccaagttaaagaaggaggaacaaccctcagcgtaatttttgccatatcccaacaattgatgatcagtcatgtgggcgatagtcgcatttatttactacgtcaaggagaaataaaacaactgagtcaagatcattccctcgttgctatattattagctagtggacaaattacagaagccgaaattaccacacatccagatagaaacgttctcaccaaatccatcggcggaaaaaagagattaagccatgattacgttcaagatttaagacaaacaacctcagaattaacaatgaaattagcagatcaagatatcattttactatgttctgatggtgtttgggacttagtttctcaaactgaactagcggaaaatttcaccaatcaatcaaatttacaaacagccgtaaatgctactattaaccaagtattagaacgaggtgcatctgataatgctaccctgttagcaatacgatgtttagttagttatctttagttaatcaccaatcaccaatcaccaatcaccaatcacccattactcattaacatctatgcaatgccccacctgtctcactgataatgtagatcatgctactatttgtattgcttgcggtacacctttaaccccccattcccctacatcaaatctgcatttatccccaggaacattaattggcaatggtagatatagaatagaaaatgtcttaggacaaggtggatttggtattacttatgcggcaacatatttacaaaattccgccaaagttgccatcaaagaactatggccagaaaatgcagccagacaaggtaatacagttttgtggccaatgtcaattactcccgtacagcgtcaagaacaactgcaaaaattccaaatagaagccaactatttacaacaatgtgtacatccaaatatcgctaaaatttatgagtatttcttagaaaataacactgcatacatgatcatggaattactggttggtaaatccttagatcagatattagcaacagaaggaatattagccgaagatcgagttaaacattattttctgcaaattgctgacgctttaaaagtaattcacagtcataatttattacatcgagatatcaaaccagaaaatattattgttgtatctccacatcaagcggtattaattgattttggtgcagccagagaatttattgccaatcaaactggagatatgactagaatcttaacaccgggatatgcaccctatgaacaatatattcaaaaaggtaaacgattccctggtactgatatttatgctttatgtgcatcaatgtatgaattactaacgggaaaattaccaacagaagcaacagaaagggctagtgcatttttacaaaacagtgccttaaatacattaaatacattaaatacattagtagatccattaattgcaccgcgacaactccgccctgatttaagtcctgtaatggaaaaagttatattaacaggaatgcaatttagaatagaagatagatttcaaactgctgatgaattaatagcggcactccaaggtaaatttatttctccccaacatcaacgggctaaggaattagtaaaacaaggtaaattaaatgatgcagcccaagcatatcaaaaatatttgtcagttgaaccagaaaacggggaagcagccgtagaactagcattattacaaatatatattgatgaacaagaagcagaaatagatgctcaaaatgccattaaattacaagcaaatgatggcagaggatacggagttttaggattgattaattgccgtcgaaacaattggcaagaagcggtaaaaaatttacaaatagctgttaatttatctcctaatgaaacttggatacaagctaattatgcgtgggcattagctaaatctggtaatttagcagcagccgaaaaaaccatagatacagtattaaaaatccaaccagattgtacttttgctttaagtttgcaatcatggatatatgtacagcaacaacaatggaagttagcgatccgtacagctactcaagcaatatttaaattaaataatcaagtacaaaatcagctaaatcatcatgaaaagcaattacaaactaacttacaaaatagtttatatccttatttaattattgctttagaaaaagccgttgtcactaaacaagctaatgatgtagatagaagaattgcagaatttattcaccaagtacctaatagtagtatagcttggggtttaaaaggttggaaacaagggaatcaatacttatggcaagatgcacttatcagttttgaaaaagctgcccatcaaacatctcatcaaacatctattcctggttgggtattacttaattatgggattactcaagagaatttaaaaaactatcaaagtgctattcaaatatatgaaaattatttacaaacattcccacccctagcttttccttactttcgtcttggtactttatacgcccaaataggagtatggaatcaggctaagttatatctagaaaaagccattaaatgtaatggcaattatgcagaagcatatcataatttaggttgggtattaatgaatattaaaaatcaagctggggaaatagaaaatagccgagaaatgttatctgcttatagtcaagctatcaaattatataccttgtctgcaacgtcccaaagtttgcaaatagcggcaaatattaaacaggcatttcaattaataggtgtgaatataggtgtgaatatttagggattacttagtaaatagggtttgctgaataaacctaaaaccttgatatatcaaaggttagaggctgataaacacagaaattagtgcaagggttttgaagggtataccggaaaaagtgtgcatttttggggatttcaagagatggcaaagaaattttcaaatctcctcctgactcctgactcctatgccctcacggaaagactttctcagcaacccctaaatattagggtagggacaattcatgaattgtccctacaaagattttagattatgcacatttcaagatcattcctcctaatcattactcctaaaaaggtaaaaattgcaataatacagatcccagactaccaacaaaatccataaaactgggtttacccttgctgatattttctgtatagggtgttttcaattctaaaataaaagcttgtgctgtttgtaaaccttcgctatttttttgctcttcaaacagttttacggcgatttgggcatcttctaaggcgctttttctgtctaagttttggtaactagctacaccacgggataaataagcacctgcatagtctggtttgagagcgatcgcttgactaaaataatcaatagcctgtttgagattacctttttctgctgctgctacaccccaagcataaaagtcttctggtttagctatttgtgcaggtatgcctaaagcaccttgaaagttagtaccgttaaggtttgcacctgccaattctacattcattaagtaggtatttctcaaatctgcaccagttaaatttgcgccattgagtttagcatcgatcaaatttgcgccaaataaactcgcaccagttaagtttgcaccccgcaagtctgcaccactcaagttagcacgactcaagttagcacctgcaagattcgcaccgcttaaatttgctcctgataagtccgccatgactaacccagcattgcggagattgcagttaaagcatttattggttgctaataactgtcttatctgttcataattagaagcttttgcggttaatggtaagctgatggtaagtaaaaatgctgctgtggcaataatttggtttttcataatcagtgttacaagagtaaaaattcaaaagtcagtagtcagaataaaactcaatactgataaaatattgaacccaatttaacatactgggaatagagagtagggaagaaagcaagttaaaattttgctctacctactctgatacgggaaaggcaaccccacccctactgactcctgattactgatttgaatttctgtcttttgaatccaattctttatttttgtaacgttgagttaacagaaaaacagtatgattatgtgagggagtttgcgccacttcttttttagcattagaccaaccgatatctgaaaataggctgacgctaaatgttaggatggatgctaataatagtttttctagcataagcgtaactcctcataatcaccacgcaataacttaataatttatatatttacaaatgatttacctgattagaaaataactaactatttaatcaagtatcaatgatttcaatgttataatttcagtcattactatcacaacggtatttttactgtattttcagttttgcaccacttatctgttcatcctttttgatttattgtttaagaggttgtcttaaaagtttttggcgaatataatagagcctccggcacgcctgacggcgaacgctactacacaagcaaagtccactagtggactaacgaaaaattgaggttttgtctgtgtagatgtgatttctaatcactcaatttagacttttccaacatcctctaaggtacaatctaacgaagaagtcagatttgtacggctgatatcaatctagagcatatatctatctaggggttgctgagaaagtctttccgtgagggcataggagtcaggagtcaggagtcaggagtcaggaggagatttgaaaatttctttgccatctcttgaaatccgaaaaaatgcacactttttccggtatacccttcaaaacccttgcactaatttctgtgtttatcagcctctaacctttgatatatcaaggttttaggtttattcagcaaaccctatctataaccaatggcataaatataacttaaatataacttcatccaagggattgatgatacttgcattcaaaaacgtagtaatagagttatggccttaaagtcattcagaaataacaggaatatcaaaagatttctgttttgctgttggaggaatataaagcatggttataggtatacatagacgtgctgtaggggtatttcctgatcgccgggatgctgaacaggcgttacatgaactgagacattcaggctttccaatggaaagagtttctgttatcgctagacatcacgaaaatgaagaaattgctggtcatcaagtccgtgagaaagttggtgatcaggcggaagaaggtgcaacaattggggcaatttctggtggtgttttaggtggtataactggtttattagtgggactaggaacgttagctattcccggagtcggtccaattatgttggctggtgctacagctacagctttagtaacaacccttgctggtgctggtattggtgctgcggcgggaggtttaattggtgcgttaattggtttaggaattcccgaagaaaaagccaaaatttatcatgatagagtacagagaggagaatatttagtcattattgatggtacagatgcggaaattgctagagctaaagaaattctgcatcattggcgaatagaagaatttgaagtttatgatcaaccggatggtaaacaaccaactacagaagctgttcatcaggatgtaactgttcctagagaaacaactgttcctacagaaacaactgttcatagagaaacgactgttcttaaatatgcaattggctatttttcactgctgcaagatgcggaaactgctattaatgatttaagaaatgcaggttttcccttgaaccaaattgctttaatacacagagaacgtcaacacagagatgcttttgggggtgttcattggagcgatcgctttgagtctactcgctttaatattcccgatcatcaaactcagttttacaacgaacgcatccatcaaggagattatatcattatcgctggtggtacagataccgatattcaccgcgctgcaactattctcaaccgacatggaattaaacaatggcaagtttacgaagcaaatggtcatgtaaaagcaccttcgccagcacctttacaaactactaaaagagcagttggtgtattttcccatcgtcgtgatgcagaaacagcactcagagacttgagaaatgctggttttcccatgaaccaagtttcccttattgctaaagacacagacaacagtgaaaaaaggaatttagagggtaataaagcagatgaaggactaaaagccggtgctgctacaggtggtgcaattggtggtttaggtggtttattagttggtttgggaactttagcaattcctggagttggacctgtcatggctggtggtgcggtagcaactgctttagccacaaccttaaccggtggtgttgtcggtgcagcagtgggaggtattgcaggggggttaattggtttaggtattcctgaagaaagagcgcgagtttatagcgatcgcttccaaagaggtcattatttaatcattgttgatggtactcaagtacaaattcaccaggctgaaactatcctcaaaggtttgggaattgaagaatttgatatttatgatgcccgtgatgtcaacgaatatcaaccgagtgaacatcaacgcagttttgaaactgccaaacctacagaaaccgttcatggtgattttgctggagaagcaccagtaattattattgaccatcgccaaaaaacagtttaattcccattagtttcaccacatttgaggagcaataaaattaacagtttaaattttgctcctgcctcctgaattttgctatatcaaaatcaaacaataaaccaatgaaaaagttaacttcattcttaataggttcacttttactttttagtgctgcttgtgataataccgctaaaacaactgtgactgcacctgaaccgggagaaggagaagttccagtcagtccagccgcagaaaccagacaagaagctaaagaagacgctcaaagtgaacttcgcagaagacaactcaacgctgatattcgcgctcgtgaagaacgaaatctgctaactactgatcgtacagaaagaacagcagcagacttagctagtgaagtccgttctaagttagaagctaatattcctggtggtgcattaacagttaaagctaccgatgatggtactgttactgtatcaggaactgtaaataatcaggatcagttagctaaaattgaacctttggctaaagaaattaatggagtgagaaatgtaattgttaatgcaacagtcgcacaaccaggaaggtaaaactgctcacaattaatatctgttaatatctctaagttgatggactgaaataagtttttctggtcaatcctcagtaatcaagatacaaactgaaatatttttgacttggtattctgagtcaagactgttatattgatttacgtccagtcacttatcaacactgttgtgccaaatggcaaacattatggaaactcaacaacagcaagactctgctacttccgtctcaccaccaggggtattatctcttgaaggtgcagaaactagaaatttgcctaaactgcaaccagctaaagcgcctaacagtcaatggcaacgaattagctcacaaatagttgacttattagatcaactaccaaattatgtgggtagtttttttgctaaaaatcagcaagctatcttaacaattgtgttaattttgtctgcctttgttacggttaaggtggcgatcgccgttttagatgctgttaatggtgtgcctttattagctccaatttttgagctaattggcatattctatgctatgtggtttgtcttccgttatttcctgaaagcggaaactcgccaagaattatcccacaaagttagtgcattcaaacaacaacttttaggttaatcataggttaataattcagagcttctgacttctgaatttgggattttagattttggattttggattttggattgttttcatttagcacaatctaaaatctaaaatctaaaatctaaattttctaaaattttttattttttgccccataccataaaattgtgataaaaattgataattattcgcccgaatgcttcgcccctacgactcctgactcctgactttttatgtagattcctcttttatttctacagttaggttaggtaaaccatctaatttttctgtgggaatttcttcttttacataaggaacaaaaaccgttaagcctgctgggatacatttaatttctacaggagttgtacccactatttccccatctataactactttttgcggtggttttgtggtgattttaaattgtttagctcgcaaataaccaatatcatctcttttcactggtgtacctgtagcagcagtttggaataaatgaaatgtggcagcgatcgcacctgttttagtttctggagctactattgttaaatctaataatccatcatcataaataatcccggaaggtccttgagctaaaacagaagttggaggtgctgcatttgctactgtcaccgctgatgcaagagtttgaatgatcttatcttctgtttcaatttccacagcaaatctttgtaaatttcccagttcttgaataccagctaagatataagctatcatcccaaaacgatttttagtttctcgatctgctttttctacagtttctgcttcaaagccaatacctgctaataataccattggatgatcatgacaataagcaacatctactgtgcgagttttaccttgtaaaatggtttgacaagctgcggcaattgtattaggaatatttaatgctgcggcaaaagcgtttgctgttcctctagaaataatcccaaagggaatattagtattaactactgcttccgctgctgctgataatgtcccatctcccccagaaacaatgatcgcttctactcccctttctactgctgcacgtgcgagttcatcagcatcaacttcttcagtggtgagataaatatctaaatcaatttctggttctaatattgacctaatttgatctaattcaaagtctggatcaccttgaccggcaactgggttaaaaattaaacaagcggaacgaatcatagagataattgataattgataattgataattgataattgtttcagtaatggtcaattgttcattgttcattattgaatattagcatatcttgaaaatttcaacttctctctgaagactactttggctgatgatttactaaaatttattttcctgtttcctattcctttacctaaactataatttctcaatgtgtaaatttatttttatctaacgaaataaaatgatctgagacttgatatgtgagacttgatatgattgaaccgcaaagggcgcaaaggacacaaaggtaagaaattttcagagattttttagtgttgctgcggttgttttttctttgattgagatagtcctcatcaatctttgttgtagtatctaaaaaaaatctgcatataggtagatgctgaaaaatagaatatgtaaaaatatacataacgttatacataacgttttatcaaactggtagctgctgctgatataagaaaaatgtaaccgaatgtaaagagagtgattccatccggtaagtcacttgctgcggtagtctagatcaatgtgaatttatcgcctggtttgacaaattgttttatgacttcagtttctagccctccacgcactattcgtattggttcacgtaaaagccaactagctctagttcaaacatactgggtaagagagcaacttcagaaaagttatcctgatatcaattttgaagtccataccatgtctacccaaggcgacaaaatcctggatgtagcattagctaaaattggtgacaaaggattatttaccaaggaactcgaactgggaatgatcgagaaaagtattgattttgccgttcattcccttaaagatttgcctaccaacttaccagaaggtttggcactagcagcaattacagaacgggaaaatccagccgatgcggtagtattccatgagcaatacaaaggacaaactctggaaactttaccagcaggtgcggtgattggtacatcttctttaagaagactggcacaactacgccataaattcccccattttacctttaaagatgtgcggggaaatctgaacacacgcatggctaagttggatgcgggtgaatatgacgctttgattttagcggtagctggtttagaaagattggaaatgagcgatcgcattcaccaaattttaccccctgatatttccctgcacgcagttggccagggtgctttaggtattgaatgccgtgctgatgatgctgaactaatcaccattctcaaagctattcaacatccccaaacacgcgatcgctgtttagcagaacgatcttttctccgctctttagaagggggttgtcaagttcccattggtgtcaacacagaaatcaatggtgataatttaacactaactggtattgtagctagtgtagatggtcaaaaactggtaaaagataccgttactggtttagccaaagatgcagaacagttaggaacacaactagctaacaccttacgtcaacaaggtgcaactgaaattttagaagaaatcttcaccgagattaaacgcggatcataaagggactggggactggggactggtgactgggtaatcaattttatctttaccaattaccaattgccaattaccaatcaccaatcaccaattaccaattaccaattaccaattaccaattaccaattaccaattaccaaattatgcgaattttatttgttgcagcggaagctgctcccattgccaaagtaggtggaatgggtgatgttgtcggtgcattaccaaaagttctcagacaaatggggcatgatgtacggatattcctgccttattatggctttctgccagataagatggaaattcccaaagacccaatttggaaaggctttgccatgttccaggacttttcagtttatgaaagtgtcctccctggaactgatgttcctttgtatttatttggacatcctgctttttcaccccgtcgtatttatgccggagaagatgaagattggcgtttcactttatttgctaacggtgcggcggaatttgcctggaactactggaaaccggaaattatccactgtcacgactggcatacagggatgattccggtatggatgcaccaagatccagatattaccactgtgtttactattcataacctcgcttatcaaggaccttgggaatggtatttacggaaaattacttggtgtccctggtatatgcaaggacacaacactatggccgcagcggtgcagtttgctgacagggtaaatacagtttcccccacctatgcagaacaaatcaaaactcctgcttacggtgaagaaatcgaaggtttattgtcttttattagtggcaagttatcagggattattaacggtatagatacagatgtttatgatccggcaactgataaatacattaatcaaacttttactaccgataccttagacaaacgcaaagctaacaaaattgccttgcaagaagaaatgggattagaagttaattctagtgcctttttaatgggtatggtgagccggttggtagaacaaaagggtttagatttggtgatccaaattcttgaccgctttatggcttatacagatgctcaatttgtgttgttgggaacaggcgatcgctattatgaaacccaaatgtggcagttagcatcccgctatcctggcagaatggccacctaccttttatataatgatgctctttcccgtcgcatctatgccggtactgatgctttcttaatgccaagtcgttttgaaccttgcggtatcagtcaaatgatggctttacgttatggttctgttcctatcgtccgccgtacagggggattagttgatactgtcacccaccacgaccccgtaaataccgcaggtacaggttattgctttgaccgctatgaacctttagacctatttacctgtatgattcgggcttgggaaggtttccgttacaaaccccaatggcaagaattacaacaacggggtatgaatcaaaactttagttggtatgaatctgctaaacagtacgatagtctatatcgttccatgtatggtttaccaccaaacgagtagatgactggggactggggactggggactgg

SEQ ID NO: 23 - DNA, 69166 bp, Sphaerospermopsis sp. LEGE 00249
  LEGE00249_35
gggggatcatctataatcctgactttgaatactccgcaatttcgcagcatctctcataccataatcagcacgggtgaagcgattcaattgcatttcaaaaaactcccgatttgcctgtaaatgtttaggattgggatcatctaaaggatataacaacgcagttcttaaagcttgaattaccgcagatgttacattatacattgaacgttggaaagttacacccaactgaatcaacatatcatcttcaccccgacaatgttttttgtaataatcaactaaatattggggaagaaaatgcaacatatcctgcattaataatgtgggtggaatacccgcagtacctacagggaatacgtcagcgtaaagaatgccataatggaagtctttttggtcttctggtacttgtcctgcttgggcattataagactttgtacctctaaatggtgcagtccggtaaaatacagcttctacatagggtaaagctgcttcatataaccaagtaaaacctttagatttgggaatgacttcataacattcaccatcaacataaacatgatgataaataggacgaccggcgatcgcaaaaataccattcactaaaaaattcatggcatcaggaacacctttaaaaccgccttcatcataaatatccgacatttcaaaaaataccggtgccattacttcccagaaaagtcctaaattggcataataagacatcatccggcactgttccaaaaacatatcagggaacagtttataaagtcccaacattaaaggatttttcttaaagtaagctttaattgctttatcagcattagctttatattcatcagaatctaaataggcatcaaattgatttacaggggcgtacattttccgatgccataacatcgcttgcatacaagcttctgcaaattccatgttaattctgtcatggaataaatgatgtaataactttggcattttgcgagtttcacccttttccataaatgccaaaagttcaggatgtgctgttgcttcaccgcgccaaattcttaaatcagcatcatcccctgcataatgattatgtaagtctaaatattcttgaggtaagaaatatttaaaagcaggcagaggatttaaaaagactctttccccaatataaagcaagtcgcgccagtaaaaatccatcggtactgcgtaagctttataaataccgatgatttgcattaagttttctggtgtatctggcagcattgaaccaccagcttctagacgatgaatgacatcggcaaattcgtgatttgatggtggtagtttggtgattggtttatcgggagtttgtaccattttgatttcctatatttatgaatttatcacgcagagacgcagaggcgcagagagatttaagaggttaataaatgtactagattatctatcttattcctttttttcttcttctcattcttctcttcctttgtgttcttcgtgccttcgtggtttttctcgttttttctcgttcccatactctgtatgggaatgaattttaaaaggttctgccttttagtttttttacagtagaggcagatcctctgagatagtattcccagtctcagactgggaacgagatcaatttttctgacaagctgacagcttaaaaaattacttcaaagccacttgagaaattacggttttttcaggagtgggaatagctgctaccattgctgtagttgtggtttcactccaacgcactaaccaggtaggttgtactcccaagaaaatgatcagggaagctaatattaatgcgggaattttttctgcccaaaccactctgggataataagctaagtcgttatttagtctaccgaaacaggtgcggttgagaagaataacgaagtaaaccgcagttaaaccagaggaagctacacacaataatgtggggatggggaaggtggaaaaactgccttggaaaacgataaattctgcaataaaaccagttaaaccagggataccggcgctggccataccacctaacaccagtaaagcactgacgataggtaaaccgcgaataggactcattaaaccattgagtttgtctagttctcttgttccaactttggtttctacaagtccaactaaatggaagagaatagccagtattaaaccatgactgaacatctgcgctactgcaccaactaaggccagtttggtactagctgcggctgcaagtaaaatatagcccatgtgtccgattgaactatatgctaccatgcgcttgatgtctttttgggcgatcgctacaactgccccataaattgcactaacagcaccccatattgctaaggttggtgctactacattccaagcttggggaaataaaccaaacccaaatcttaagagtccataagttcctaatttagctaaaattccacctaataaaatagcaataggtgcggaagcttcaacgtaagcatcaggtagccaagtatggaaaggaattaaaggaattttgatgccaaaacctaaaattattcctactaataataacagttgcattcccgcagacaggttttgagtattaaccgcatctaaggcaaaactatgagaaccacttaaccaaactatgcccaggaatgttgctaaaataaatgccccggaaactgctgtataaatcaaaaatttcatcccagcataggcgcgtttttctcctccccaaatggaaattaataaatagaaaggtattaattccaattcatagaaaaggaagaaaagtagtaagttttgggctaagaaagcaccagcaacaccaccgctaactaataaaatcagcgaatagaaaagtttaggacgttcggtattttggttactgctgtaaatggctatccaagttaataagctgttcaatatcaacattagaattgatagcccatcaacacctaattgataatttaaacccaaggtttcattccaaggtaaattctcttgaaactgcattcctggactattgatatcaaatttcagcaggatgaaagcattccacaatagaactacaaaggaaagagttaaagctactagtctagttctcgttttaggaatgactgtatctggtaaaaatccgataattgcagcgccaataattggcaacaaaattaaaacacttaacataattggggattggggattggggattggggattggtaaaaggtaattattttatgtatgaaaattaccagttaccaattgagttaaattaactaactaagctgactttaccggtgtctaagtcgtaataaccaccgactattttgagtttattagccttgattaattctgatagaactggtgaagatttcaatttttcaacttgtaccaaaatgttggctttacaggcattctctaatctatctcctggttttccttcagatttttctacacctggtttaattgcttctaataagctaccaatttgtcctggtacttgagcgcctttaatagtggcatctacagcaccacatctttcatggcctagtaccataatcaattttgaacctaatactaagctaccaaattccagactaccaatttcttcaggtgtggcaatattacccgcaacccgacaaacaaataaatctcctaaaccttggtcaaaaattatttctgatggtactctagaatcggcacaaccaagaatagaagcaaagggtttttgacctttagcaacttcttgtaagcgtaaataactttggttgccagaacgacgtttttgtttggcaaatctatcattaccatccagtaatgcttttactgcttcatcgggtttactaacagtttttgcttctactgcttcagatgtaactaagttggaagccacactgacagcgactcctgcaccaatgacacctgttcctaattggagtaaatttctgcgagaaatattgtttttttgatgtttgttgttcactttattattcttcaattcctcaaaagttaagttcttattttagattgatattgtctatttaaatcataaagatttaaaaaaccaaattcatgaactgcacaccccagaaaggccatgtaacccaagcacctaaaacgctaactcctaataaaacagtgaaagcgtaaaattgagtttgtccattgttgctatatttcaacccttccccacctaataaggagaataaaccgacaaaattaacaatgccatcaacgacaaatctatccaccatgtcagctaatttagaaagttgggcaacgccaaaaatgatggtcattttgtaaaggttgggggtgtaaaaatcgtaagcaagtaaattttgtaaaccttggaagggtaagcgaactggtttaggaataatgtttcctaaataaattacagcactaatactgcaaccgaaaatacttgaccaaataaataacaatgccacatctttatttaatgttgcccaactaggtaataaagataaactttccaacactaaaggcagatgtaaaacaaaaccaaataaaaccatcattggtaaaaccatcaaccaaatagcttccggtgaacgttcactcatttgtttgggtttaccaccaaagattaaaccaaattctctggttaaactaaaggctgtaaacacattgacggcaattattattcctactaaccaagggtgtgttccccataaaccatcagctaattttactaatgcccaaaaacttcctaaaggtgggaaaccaattaaacccaatgttcccacaataaatgctaaaccggaaatgggacgacgtgaccataaaccaccgagttgggtaacgtcttgggtgacactattccaaactattcctccggtactcatgactaaaagtgcagcagataaagcatgagtgaggactaataataatgcggcttcatcctgttgtgtgcctacggcgataaacactaagcccatgtaagcactgacagaataagataaacagcgtttgatgtcaatttgggcgatcgcaattaatgaaccaccaatagctgtaactgcaccaatagctaccattgcagaggaagctatgggggataagctaaatacaggttgtaatttaatcagcacccatgcaccactggcaactaccactgagttccgtaaaatggtactgggaacaggtccttccattgcttcatccaaccacaaatgcaagggaaactgagcgcatttacccattggaccggcaattaaagccaaacaaaccaaagtaataattgtcgggtctacttgggcagtttgcgcccaaattgctaaatctttataatcccaagttcctgctaaagtccacagtccgagaactcccattaacaggaataagtcaccaacccgcttggttaaaaacgcatctcgcgcaccggtcacaaccaagggttgactaaaccataaacctaccaacaagtaagttcctaaagtgagaatttctaaaactacataactgaaaaataggttattacataaagctaaggcacataaaccagcttcaaataaacctaataaagaataaaatcttccccaaccccagtccatttccatataacccacagcataaacttgggcaaggaaatttaaacccgtaataaccattaatgcccctacattaattgcagagagttctaaattaatagttagttttaaacctgctgtggataaccaaggaataaatacctctttagcaggatgattccaagtacccagaaaggctatggcagaatgtaaaaacgccaaaaatgtcatgactaagttgacataacctgccggtctaggtccagttttcctgattattcccggcgaccaaggtaaagctaaaacaccacctaataaagcatagcaagggaccagccaaacggtctctagcaggtactgagacatgaactcacctctatatttgcactgaatattgttgcttgtttgtcaacaagcgttgatacctgatgatgttaactagaaataataaggcaattttatttttgcttaatattgttagatatagcttaccgttatctctgccaaaagggaattacttaactagataaatccacgatattttatctaattttttcttatagttctatggattgatttatctgatagtatctatcgtatagaatctatgaatataccaagcaacaggaaatagcgggagcaaggtcaaaaaaattaattcttgctcctgactcctgtacataaactgcgccagaaagtttctactgacttctagaaatttgcaattctgctataattggtgctgatgagtttatgtagctaataggggcgggtttcatatctcggtagtcgaggatttgaacgacaattaagtaagctatagctaaaagtatagaaattgcacctgtaataatggcgactatttttgaacggttcatcagaatttcctaaaagttaaaatttgatagttgatagttgatagttgatagttgatagttgatagcctattcctgactcctgactcctgactcctgtacgggcgaagcattcgggcgttcgcgtagcgtgccgaaggcaatcaattatcaatttttatcacaggttgttttccgaatgcttcgcccctacgactcctgactccttctttaatgagttctgtagcttgttgggcagaaagaggtttatagaacagatatccttgcacatcatcacaattaatagactttaagaaatctagttattcaggcttttctactcctacagcaattagtgttaaccccaagctgcgtcccaagtcaactatagccttgatgatatgagctactttagcatctctggccaattctttgataaaagaccgatcaattccatgcagatgaaagggtttttccaaggtttgtaaaattctgggagctacttgagctacttattcctgatgattcaatacagcaaaataactatgagatacacccgacttaaagcctgtaaaatagacagtgccgacacttctagaataaagcaggaagaaaaagtcgacttttgttcgcattagttagggcttgtcgaataaatgtaaaacctagatagagttagccgttttgtatcggctgacggcaaggaacagcatcagaaacactgagagaattattgcctggaggtgaaggagatgcttctggtgtcatgggtgcggctaactctccagaagcagcgttttctgtttcatcactcataatcggtggacgaatggcgctaataactgtcttgatgacaacagcacaaggaaccgccacaatcacgcccaaaagtccgccgattcttgccccagtcaaaacggaaatgagtatccaaactggatttaaacctgtaaaacttcctaaaatccggggtgcaatgatattttccagaatttgctgcacgatgactgcggcggctaagactctagcacccatccaaaagtcttgtagggagactaacaaagttgtcatggcgatacccacagaaccaccaaaggggattagcgccataatgccgatagttaagccaaacaacaacccaaatggcactttcaaccacaaaaaggtgggaatcagagccgaggccatacaagtagataaaatcaactgggtgataaagaagttttgaaaacttaggcgtactgttcgggaaaaaggttcacgaaatttagtagggagccattctactaagctttgccaaagttcaccgccatgttgcaatagatagaaagtcaaaaccatcgttaacagaaagtctaacaagctggtaaaggtgacgacagcgagatttaatacttgtccggctatagcttgcagttgactcttgacgcgatcattaatttgcacgacgatagcatcaagattaatcggtaagcccatcatctcggctttctcatttaaaatcattaactgcgatcgcccagagtctatcaactctggtaaacgggctactaactgctgggcttgagttagggctagaggaaagagggtgacacccagcgccaataaaattgataaagctgataaaaataccaaaatggcgacttgttctcgtcttgcaccgtgcttttccatccaacttactgggtagttaagcagaaatgccagcactgaggctccgactaaaatgactatcaaagagtggaaataatgaaaaattgccgatatcgcccaaccattgagaactaatagaggagcgaatagcgcgatcgccccgattcgcgctactggtgtaaatgtttgccaccagtcaagtagcttttgtgtctgcatttttagctgattggggatagaactaaatacaacttaagctaaattcttgtttacagactattatctctaactatatgaatcttatgtcttcctctggtttatgatgagaccctccacaatggaaaatctaccacctattgataattacccacctgctccagaaactgccacttctaaaaaattgctgcttttatacttgattcctgtcatcggcttttttccttccctttggactctctatcgccatgagggtagtcgggaacaactggccgtgagtcgtctgtccattaccttgggctttacatggatgttagggtacttgctgttagcaactggggcagctacttcagatttttttacactccggttgttaattcttaacagttttctcacatctggttactttttagtgagtgtttggttaatttttcgtgtcattcaaggcaggtcttatcgtttgcctggattcagtagttttgccgagcgaatactgcgtaaatagtaaatttacatttgttcatgtttttaacaatctgaggattgataccagcatttataggtaatctacccaccaatatcatcaaataatcaaatttggtttattattgccatacttccataaactacttccatcaacttcccggatgatcaaaaaatcaacagaaatgcaggtaaaggtcttgtagtatctacgataggtaagtaagtagacaataccaagaattatccatcatggtctaatttatttacatatattgagttggtattgagtaagcaaatttacggtattttagcagtcagtgtgaggaaatctgtgactagtcaaagaacatcagcagcaggcaaaaaatcagcgaaagctaaagctaaaggcaaaaactctcgcaaatcaaaatcaggtcgctggctatggtttgcggtgggtatgggcgggatagcaatggtctcaggtatggcaggggctttgttggctgtttcttgggatagtacacctttgcagcaagctcagttaagtgctaaggaggcagcagtttttgatagcgatcgcatttctggcaatggcttccaattttctcaattaactcgccctgtgaatatcttggtgatggggatgagtgtactgcctccagatatccaaaatccacctattgaaacccaaggacttagatatctaccccaagttaattcttttgacggtcttgctgatgtcatgctcttgatcaagtttgatccagataccaaaaaaatagttatgctttccattcccagagatacccggacagaggttgaagggtttgggttgaaaaaaattaacgccgccaatgtcgatggtggaccggctttaactgctaaaactgtcagcaatctcttgggaggcgtgggaattgatcgttatgtccgcattaatgtcttgggtgttggcaagttaattgatgccttgggtggtgtaactgtctatgtccccaaagatatgaaatataaggatgattctcaacatttatatattaatttaaaggctggtaaacagcatttggcaggtgatcaagcactacaattactccggtttcgccatgatgaactcggagatattggcaggattcaacggcaacaaatggtattacgtgccttgattgaacaaagtcttaatccagcaacattaacacgattaccagaaattctagaaacagtgagagaacatattgatactaacttatctgttgaggaacttgtggctttggttggttttggggcgcgaaccaatcgctctaatatgcagatgttaatgcttcccggtcgttttagtgaaaaacatgagtatgaggctagttattggatacccgatccacaaataattaataaattaatggtgcaaaactttggtttagaatcaacatcagttgattctgaaatcactgatccctctcggctacggatcgcaattcaagatagtacaggtggcgatcgctctcaaattcgtcccttaattgcagctttagaacaagctggatatcgtaatatctttatttctcgaccttggggtgaacctttggatactactcacattgttgctcaacaaggtgatagtgatagtgctgaatctattcgtaatactttaggttttggagaagtgcgggttgaaagcactggtaatatcgcctctgatattagtattcaagtaggtcaagattggttactacataaaccagtgtttgaaaatatggttaggtgacaggtgacaggaagatggggagttggggagttggggagatttattctgtctcctgaactcctgaactcctaagaaaaatctaccaagatgcagctttacgtctcttgtagggaacgccagtaaacggttgaaaaccagtgacaggataagcgtcatctgtagggctaaaaattcgcatgaaggcttcagaaataaattgggtcatactagcaagcattctggagataaacataatctaagactccttttttatgccctttatctgagatatctattacttttactttaatgctgatatttgttggttgctcatattcgcaatatatttatattttacgcaatgtttttttagattgctttgcaatacttcattgagttgaagaatcacactttttcttttaattctaattgtaaattcttggcgagtaatcgggtatttttctgacataattattagtcttaccattaaaaactgtgaaataatagatatataaagatatataaagatatataaagattaatttgccttgattggcaaggttttcaggcatcatcttttctatacttgacattaattatggtatgatttaccataataagagaagcactcttagtaggacgctttcagatgacagcttttgcaaatgttgatgatgacaagtacagataccaaaacccagaattgaatctttgtcctgaaaattatagtttgctgacagacctttaccagctaacaatggcagcttgttacacaggtgaaggaatagaacaaaaacgagccagctttgaattatttgtgagacgcttacctgaagggtttggctatttaatagcgatgggtttggcgcaagctttggaatatttagctaattttcgttttaattccgcccaaattgccgctttacaaagaacgggtatattttatcatgcacctgagcgtttttggtcattattaacagagggtggttttattggggatgtgtgggcagtcccagaaggaactgctgtatttgccaatgagccattattaagagttgaagcgcctttatggcaagcacaaatagtagaaacttatcttttaaatacacttaattatcaaacattaatcgctaccaaggctgctagattacgtgatattgctgggaaaaaagcaacacttttagaatttggcacacgcagagcttttagtcctcaagcttctttatgggctgcaagggcagctttagcaggtggtttagatgccacttccaatgtgttagcagcattacaactaggtgaaaacccaagtggtacaatggctcacgctttagtaatggcgttatcagctttagaaggaagtgaacaacaagcgtttacagcttttcatcaatattttccgggtgcgcctttattgattgatacttttgatactgttgctgctgctgaaaagttagctaaaaaggtaaatagtggggaaatgacattaactggggtgaggttagattctggtgatttagttagtttatcaaaacaagtgcgatcgctcctaccacaaattacaatttttgccagtggtgacttagatgaatgggaaatacaaagattaaaaaatcaaggtgcagaaattgatggttatggtttaggcacaaagttagtaacaggttctcctgtaaatggagtttataaattagtagacattgatggtattccggtgatgaaaatgtctagcggtaagtttacttatcctggtaaaaaacaaatttttaggtttttggttgatggtaaattacaatctgatagattaggtttattagatgaaaattctggaaaagaaaaacctttattagagttagtgatgaaatcaggtaagcagataaaaccaacagaaaatttacaaactattcgagaaagaagcgcattatctgtagcgagtttaccccaggaaacaagaagtttagaaaatccaatttctgtaaaagtagaaatttcggaaatgctgcatgagttgaaggaaaagactaagaaactaaccgcaaagaacgcaaaggacgcaaagtaagatgaaaaagatcgctttattcggaacaagtgctgatccaccaactgcgggacatcaaaaaattattaaatggttatctcaacattatgattgggtagcggtttgggctgctgataatccttttaaagagcaacaaactcctttacctcatcgtgcagcgatgttgaatttgttaattacagatattcaagcaccattaggtaatattagtttggaacaagaattaagtagttggcgaactttggaaacattagaaaaagcgaaattaagatggggtaatgatgtcgaatataccttagtaattggatcagatttagttattcaattaccaagatggtatcatattgaagatttattaaaacaagtgaaattgttggtgattccgcgtcctggatatgtaatagataatattagtttggaaaaaattagggaattaggaggaaaaattgcgatcgctagtttaaccggtttagatgtttcctctaccgcttttcgtgaacaaaaagaccatcaaactctcacaccccctgttatagattatatttatcgggagaaattgtacgtttaaatgccactacgtaaccataagaaaatctcaaattccacacttcaacaaactttggctgattttaaagtcggtgtggataatgtcatattttctgtagatactaccaaaaatcggctgttagttttattagtaatgcgacaccaagaaccatttttaaattcttggagtctccctggtactttagttagacaaggagaatctttagaagatgctgcttatcgcattatggcagaaaaaataaaggttaataatctttatttagaacaactttatacttttggtggtccaaaccgtgaccccagagaagaaattaatagttatggagtgcgttatttatcagttagttattttgctttagttcggtttgaagaagcagaattaattgctgataaagttgcgggtattgcatggtatcccgttaaacaaatacctcagttagcatttgatcataatgaaattatcacctatggacacagaagactgaaaaataaattagaatatagtcccgtagcatttgatgttttaccagaaacctttactttaaatgacttatatcagttatacaccacagttttaggagaaaacttttctgattattcaaattttcgagcgcgtttattgaaacttggttttttattagatacaggaattaaagtatcaagaggtgcaggtcgtcccgcgagtttatataaatttgatgcagaagcttttgcgccgtttaaggataaacctttagtttttatttaaattaggtgacaggtgacaggtgacagttaatagagaatagataaaaattagttacaaatcaccaattaccaatcaccaattcccaattaccaattacctattcccttgtcttatgaaaattgcaattgcccaacttaaccctatcatcggtgacttaacaggaaacactcaaaaaatcctggaagttgcacaacaagcagcagcaaataatgtccgtttattattaacacctgaactgtctttatgtggttatccacccagggatttattattaaatcctagttttgtgaaatcaatggatatcacattaaaaaaattagctcaagatttaccagctaatttagctgttttagtgggaactgtagttaaaaataaagatgctcatattacagggggtaaaactttatttaatagtattgctttattagaagcaggaaaaattaaacaatatttccacaagcgactattaccaacttacgatgtatttgatgaaaatcgctattttgaaccaggattgcaagctaattatttcgctttagatgatatcaatattggtgtgactatttgcgaagatttatggaatgatgaggaattttggggaaaacgtcattatgcagttaatcccattgctgatttatcccttttaggtgtagatttaattgtcaatttatctgcttctccttatacagttggtaagcagaagttacgagaagcaatgttaaaacatagtgcagtcaattttcaacagtcaattatttacactaatcaagttggtggaaatgatgatttaatatttgatggacgtagttttgctgtaaataatcagggtgaagttatttgtcgtgctaaaggttttgaaacagattttttaactattgaatttgatgaacaaatgcgcgatttacagttagattctatttccccagtttatgaatctgaagatcaggaaatttggcaagctttggttttaggtgtgcgagattatgtgaaaaaatgccgtttttctcaaattgttttaggtttaagtggtggtattgattccgctttagttgctgctattgcgacaactgcattaggtaaagaaaatgttttgggtgtattaatgccttctccttatagttctgaacattctgtgagtgatgctttaaaattaggggaaaatttaggaattaaaactcaaattttacccattggggaattaatgcaaagttttgatcatactttagctgaattattcacaggtacagaatttggtattgcggaggaaaatattcaatctcgcattcgtggtactttgttaatggggatatctaataaatttggacatctgcttttatctactggaaataaatcagaaatggctgtaggttattgtacactttatggtgatatgaatggcggtttagctgtcattgcagatgtgccaaaaacccgtgtttattctatttgtaattggttaaatacccatcatcaaaaagaaattatccctcaacatatcatcaagaaagcaccaagtgcagagttaaaacctggtcaagttgatcaagattctttaccagcttatgacatattggatgatattttagaacggttaattaataaacatcaatcagcagcagaaatagttaacgcaggtcatgatcaagtaatagtaaatagggtgttaaaactggtttctattgcggaatttaaacgccgtcaagcacccccaggattgaaaattactgatcgtgcttttggtactggttggagaatgcctattgctgctaataaaaatgggtaaatactcattgatgtgacacatagtccgtagactgatagtccatagacattgaaaattgtctgatggataaatcaaaacaaaagattcttaatgctttaggttatctagtcagacaacacagaacagagttaggaatttctcaagaagagttaggactacgtgctaacttagaccgcacatacatctctggtgtagaacgtggagtgagaaacccttctctaactgcgcttgtcagtcttgcagatggcttaggtattagtgtttctgttcttctgcaaaatctggaaattgaagctgataaaagataaaataaagtgacaaaccaaagaaatttagtagaaactattcaagctcaattcagacaaaactcaactcagttaaaagtttttaatcttctatcagaccaaaaatggcattgtcgagaatgtgaaggtaaaaatataggatcaactcaatatgcaggtggtggaggtattcaagggttacaaaggggtacaagaagtcgtcctggtttagtaattgaaacagaaaagaattactgcttaacttgtcaacaaatacgcttaggagatcgctggacaggagaaataaaatcagctaattcagctgctaatattcctgcttcgttagttaagaaaattctcgaagtttattcatatacagatgtcatagaacaaagacaaagagaaaaacatgagttagtaattgaccatcgttttcctatggaacgttggggagaaagtgaagctccacatttaacatctatgagtgaagaagaaattagaaaaaagtttcaattactcaaaaaagatgcttctggaaatcacaatcttttaaaatcgagaagttgtgaacgctgtattaaaactggtaaacgcggtacaccttttgggattaaattctggtatcaagcaagtgaagattggccttcccaacatcaacgaggtgataaagctgaggaaggttgtattggttgtgggtggtatgattttgaaacttggcgtaatgcacttaaccaaaaactatctcagattgctcacaatgaaggaatttaacaggtttttttgtgttacttgcaatatcattcaagtaaggaatcatagcataaccaatacattctgctaaacgtggtggaacagcattaccaatttgccacatagcttttttcatagtaccttcaaaaataaatgaatcaggaaatgtttgtaatctggccatttctctagcggaaatcacacggtttaaataagggtgaatatgtgtaccaccatgattttcttttacagtcatactcggtttaccaggatattgtcttttgaaagcatcagcatatttttcatataaagaaccaccaggaggaacttttgctaaacgttccatgtattcctgtgaatgttgagtccactcgtgattaatttctggtatgggagtatattctggtaaatcagaaattgctgattctataggtttatattcttctggttttaattgtgcttgaggatagggatttggcattccaaatctattagcaataaaaattgctcttggtctaatttgtgctactccataagcagcagattcgagaattgctacagaaatattaggatagccaatagactcaaaagcttcaaaaattgctgtttttacatcccctttttgaattgttaaaatacccggcacattttccataactacgtaccaagggcgtatttcggaaacaacacgcacaaattcataaaataatctatttctaggatctttaggatcacgttttcctgctactgaaaatccttgacatggtggaccaccaaccacaatattaatttcagatgaatctattttttgcagccattcttggggagaaaatttttcaatatctccacagaaatgatgacaattggggaaatttatttgatgagttgcagacgcaatgggattaatttctacactagctaatggtgtaaatcctgcttggaataacccttgggtaattcctccagcaccacaaaaaagatccacaaaattatattgagataatggaagttgtggggtattaacatcaataaatattttgtatggatcagaattatcttgatctagttgacgctgaatacgctcataacgtcctaacttcgtttttttttgttttttgttaagatgatgctcatcttcgttaggtaaaaaagaaagttgtgttccttgcattgaacaaattgaaccatttatataaagtttgtttctattgtgacatatagtctacaataaatcaagcttcatacaaaataaaaattatttaattgctaatgtatgagatttattacaccttttccttttgaggtgtagcaataccacgtttaactaaactagcttctaattcttgaataaaacgcaaatcttcttttaataaaggttgctgataacttgcttttggctgcttttctaaaaaactaaatgcttgtctaaattcttgaggagtagctttaataggtgcatcaaaatgacaagaaataatttgttgaaaatcccaatttgcaatttgatcagcccattctattacttctcttcctccttgaggaaggatgagaatttgtaaaattggggcgacaaaaggacgaccattaccagataatgcagtaaaggtatcttgccaattttcatcccatttaaaggggaaaaaaccaaagtatgcttgatgtgaacgatctggggcttttttggcatctttccacatttccccaagttgagaaattttgactgcactgggacgaaaataaattgcaaataaagctattctttgccaaccacgacgacggttatgagcattatctatcattttttgctgggcgttgtctctagcatgaaatagtaagggatagggatctatttgtaaaatttccggtggttcttcagaaatagaaagtatggtatctgttaataataaagtgcgagatggtttgtgtaataatgcaacttcttggaaagaacctttacctaaattgatatctaaaattttatattcaaattcattaccaaaggggttgttttgatgattttttgataaaaataatgtccgtttttgaggaaaacctaaccaactgaggggaagattaaaaggaatactccattgatggggagcaacataaactaaagcctggggaaattttctggcaaaaggaccgacaaatattttatgttctaaaccggaactggtaggtaaaattatatattttacttccccatgtttttgttccaattcttttactaaattgatacattctggggtaggtgctacaggtgcataaactaaaagtccgccttcctgtagcttaattatggtcattttaactggtacaactgtatacagaatgccctgtaattgatcaaatatccataagctatctttgataatttctcggcatagagtctttctttttccgtagggatacagaggtaaaataggccaaaaagaccatgacaaattttgctgactttctattccctgagtattcataattttggtaattcaccagagtctatttcttatttttagcattggttagagttcagcaatcatttaatttgtcaaggaatttttttctgctacctactaacattaacctccgatctctctgagcatattttctactctgtttgcaccttctgcatcattactgctgcgatataaactaagagcttgtcttaaagcattgctggcctgttgagtttgtctacgttgtttgaacattgaacccatcaattcataagtacgtggattgttacggtttaatttaattgcttcttcaaaagcccacattgctgaggtataatcacctaaagcagtttgtgtgacacctaaccctaaataagcattaaaattgctacggtttagctggatggatcgacgataagcttcttttgctccgttggtgtctcctaaattacctttgatataacctacagcgtaataaaagtcactattattcccatctagggcgatcgcacgacgataagcagttaaagctaactgaaaattaccttgttgagcatataagaacccaattccagaatgaattctcgcattgctgggagctaattttgctgcttcctgatagacagcgatcgccccattataatcccccgcatcgactaatctccgcccttcctctaataattcccttaaccgtgggttacttgcttgggcaactaatacctctgtactttcagccactacaggaattgcagttacaaaacttcctaataatagaacagccaccaaaaatgatgtttgtttgtataccataaagatccttaaattttagtgaagtttttgtttgtacattaaaacaaaaatatttagttttgaaaactgtatttattcacattaacaaaatcttctaaaattggtaatttttagaaccctgtcctgttgctgtatataggaattcaggcgaacatctatactcatctgataagtggcaagactatgaactagatgcaattcaattggcatttacgagtgtggcaggatgaaaatataggatgaaaataagatccaaaaagttccagaagttatggcaatctgtatcagaggcacataaaaacccaaactttaaactattggctgtcaataaggaaatattatgcttttaagtacaaccgatgtcattcaatgcgctatcattgattcatatttgggcattgtcacagcggaagttgtctatggcagcaattttttgcgggactttttagccagcatcagggatattgttggtggacgtagtggcagttacgagcgtttatttgaagaaggacaacggaaagcactagaacaactagaacaaagagcgcaacgtttaggggcggatgctgtcatcggtatagaaattgatacaggaacaataaatgttgatcaatctggagttttattattaataactgccacaggtacggctgtcaagatgcgttagaattttgtcttttttaaatatataaaattctgaaaaattcaacatttctgctatatttcaaaactgcatttcacaaccttatcttctcactaaagacatagtaattaactctttccactgatagataataaaaacacaaaatagcaatttaattgtaaataaaagcataaagcataaatatacctgaaaactttgctaaaatagcaggggagaaaatacactatgtcatacgtaaatagaataggggatgaaattctgccttctgagtctgcggtagcaacaagagtaacagaataccgtgatcgcgtgcggtggggtccaataatttccggtgttttagttgctctagctacgcaattaatattaagttcattttttggggcgttaggtgcaggtagaattgctgactctttagcaccaagaagcatagcaacaggtattattagtaatgtaggaatttggtcaactttagctttattactttccctgtttctgggtggttggatagcaacccgtggttgtggaccaatgcaccgagatacagctttacttaacggtgcaattctttgggcgactactttagcaattagctcttttctattagcaaatggagtctggggtgcttttggggttgctgcttacaatgcagcatcagtaattaatcaaattcaaggacaaggtactacgataccacaaaatttacctgctttaactgctgaacaaactcgtgaaattgcagccgcaacttctagaactttatggtggtttgttcttggttctctattgagtttagcagcagcattgatgggtgcagttgcaggtgcgcgtagtcctcggactaataattacaatcattgattttgtctgtgttgaatatttatcatatctgtttttctggtagtgggtaattggtaattggtgattagatccctgatttattatttattaaatgaatcggggatctaatgattcttttcattgttaaatcatttaactttggcgttgatattttcccattaattcggcttttgctaaaacatgacctgccattgctgttaaaatttgatttttactaacaccaggttctaaattcagctttttatctaaagcataaagatggaaaaaataacggtgagttccactaggaggacaaggaccaccataacccaatttgccaaaatcatttttaccctgtattccacccataggaatagttttacccccaactatcttttctggtagttggttaactgaagaaggaatatcataaataacccaatgtacaaaagtcatttttggtgcatcggggtcatcaacaattaatgctaaactttgggtattggggggaatttcatcccaatttaaaggcggcgaaatatctgcaccatcacaggtatattttgcaggaattaaaccattatctacaaaagcactgctggttaatttcatggtttttgctaccttggaattacaactaattagagatagtcctaataatccaaaaatagcaaaggactgagttataaaaactcgccttttagttatatatatcaagataatgtctcctgatttattccctaccacttcaaaaatgcttcttctactcctttttctcttctaatttttgcatcaatttcaaaccagttaataatttgtttggctgtcaaatcttcaatgggtacatcatattctgtagcaatatgttgtaaaatccgtaaggaggaaattgtcaatctggttaaaaacttttcaggggaagataataaagctgcgtcaacttgtgcagattcgtcaggggttaaaaattgggttgatgattgattgggggagatatccatagggtttaaagttgtgtttaagtgggaagtttttttatattaaatcatattgtggtaatttttgaataattgttttttctcacgctccagacgcagagaacgcagagaggggttaatcatggggtttgagtttcattaaccatatttgatggtatattaaatgtagttgagttaatttgaggttaatacaaagatgacacaggaattaatagacctcagaaatagtatcttagaacagcgttatagcgatgctttagctattgttgatgagttagaggggatgagtaagaaagcaattatacaacaaataaagtcttttttaaagattttactaatacatttaattaaaaatcaaattgagcaacggctaaccaattcctgggcagcttctattagaaattcagtggtaggtattcaagatatcaacttaaaggaaaataaaaaatcctattatattaatgttgatgaatgggaagatttaattttagaggaggttatagagaaagctattgctgatgctagtgatgaggttttaaatggtgcatataatcaatttcaattagaggaaatgatggataaaccggatttggtagcaaaaggttgtcaatttttaactttgacttatgaacattcggcgaaaactttaccgaaagcgatcgcggaagttttaatacagttaccaggtggggaaaattggtttaatcgtaagtagttaaatatccccgacttgtgagtttaatttttggtgaataatgtaagtttatcaaagaagtcggggatctgaattgcaggtttaactataaccaaatatcgggatgtaattgggggaagaattgataacctaaccaacctaaaaatattcctaataaagatgtacctgcataaataaaaaattgtttccatttacctattgattctttttctagctttttctttgcatcaaagtaagcaaggatgaagagaatacataaaatccattttataataccaaatacaacaccagacagaccatattttaaacctaatattattgttatgaataaactgtaagcgctagcataaacactagcaaaagcaccagcaatagtaatagcaatagcaatagcaatagcaatagcataaatactgacagtagcataagcactagtgctaagactagaaaaagcaatagcaataggaatagcactaagactagcaatacagtttccaaacttcatttagaggtggcatttcttcaccgacaaaagccaaccacattggtttaagaactcgtggtgaaccatcaatttgaagtctttccagcagttgtctctagtaaagctttttttatatttctttacagacagcatctaattacttaaatttaattaacattagatagcttgacgtttacctcataccattagtattctaaaaacgaatgatttttttgttatgtattcctaaaactccaaaaaacaacaatgagtaaaaggactctgtttgtccctattattgattcttatcaagggaaatacctgaattttccagatattgaacaaaccatccttgaagatattgctgaagtaaccttatataaagtaagttgtgcagaagatctagcaggaaaaatcgatgaggctgatgtcattatctcttggcatacaattccactacagaaggaaattctatcgaggttgaagcaatgtcgaggtattgtccgtgctgctgttggctttgataacatagatattaagtttgctggacagaaaggaattccagtttgtaacgttcctgattatggaactgaagaagtcgccgatcatactcttgcattaactctcgctttaattcgcaaacttccctatattgatcaatacgttcgccatgagaagtgggactggagcgccattggaagtgtccctcgaattcgaggcatgaaattcggaattgttggctttggacgaattgggagtgctgttgctaagagagcgcaagcctttggatttaatgtagcctttttcgatccttacgttccgagcggtgttgagaaagctcacggaataactcgatatgaaactctgcacgagctgatagagtcttctaaagttatcacaattcataccctgttatctgaggaaacctatcacctcataggtcgtccagaattcgatctcatgacgccagaaaccattttgattaacacctcccgaggggaaaccctcgaccaagaagtactgatagaaagcttgactagaggtaaaatcggatatgtcggacttgatgttttagcagacgaaccaaaaatccccgaagaattgaaaaattctgatcgcacaatcttgagcgcccattctgcgttttatgctgatgaatcgttaaaggaactccgtcgtaaagccgcgcaatctgcccgcaaattcttactggatcaaaaagagcgctcactcgtaaacgagtgttttcttaacttcaaataaagaagactgtttgatgaggtgaaaacaaatattaccatcaaatattaaatcaagtttagctaaattcattggcaaattgaaaattaccaaaaagaaggaatgaatgctatgatgacaagtcaaccaactaaatcagcagacttagcttgccaatggcaatggcagcaacagaataccattacctcaatagagaaactgatcgaggttttcccgggattgtcggatcagacttataacgccatcacagagcatttaaaatctcgtcgtctccgtattaccccccacatactcaagcaaattcggcggactgaggataattcagctcccttgctagatgatcccatctggcgacaattaattcctttttggaatacagagggagaaactaattatagctacgacggtcacactgaaaattgggaaatgccccatgaaatggtgacccccattggtcagcacaaatacgataaccgtataattgtccgcctatctaacgtttgtcatagctattgtcagttctgctacgagtccctacgcaccctcgaaaaaaaatcctcgaaattacccctccaacagaaacattggcaagataccatcacctacgtccgtaataatccagccattgaagaagtcgttcttagtggcggagaacccttgatgcacggcgatgatatcttaattgatggtgatgtctccgaaaacgcccccctcgcgattattcatgatctcataccaggcattcctcatgaggaactgttattggcctatgatcgcgcagcggcaggggaatccgcgaaatatcccgtctggttagtgatcaatgtcggcttcaatcgctcaggatatagaaatatcgaagactttactagatttgtccgtcgggcgcaggaatgcgaaaatcttgaagttaaggcggtttatgcccatctaaccaactccaatgccgaagctgatatcaatcttgcccagattgaagagtttgatcgattagtaaaaatcgctaaacaaattctgggggagcaattagaaaccagcctttttgccagccacagcattctccgatggggcgaacactatcccactaactgggtgaggccggggattatcctttacggcgttcatttttatattaaagacttagtagagcaaaaagtcctagaaatcgcccaaaaattccaacctgccattagcttaaaagcaagaatcactgggattttggagtttacacactctgaggctattggctacgggcaaaaatataccaccgaacctggtcaaagactagctaccgttgccattggttttggaagcggctatccctttcgttcaagtcagcttgagacgattattcacgggcatggtgttcctttatttggcgatgtcggcatggatgccctgcaaattgatatcactcactgtcctaatgttgcagttaatgactgggtgactcttatcggacaagagggacagcattgcattgaagttcagaccttggcaaatttagcaaatacgagtccctatcaacttttgagtggtattaattgctatcattcctattacaattttggaaaccatacttcatgaaaatttcatttgaccatcggctcgaccgcgttgttgaactcaatcctccctttcacatcccacaaaacccccaagaggctcggtcactatcccagaaagttgcttacttgttatcgggagaacatgaaacccttatcggtgcaaaagaacttttattagaactaccgcagaccctttcgcaagaacttattcaagcattcgagcatcgaaaggtagaggctttgctagaaattcaaaaaactctctatgctatctatgaaattagctttagcaaccccctttcacatatatgttttcatgagcatagcccttggttgatcgaaattcgcaacaccattgagaaccaatggatgaaaaatgaaattgagatcatccgcgaacaactccccacacaggcagaagccaaagatggggatgccctgtgtcactggtttgtcaatcaggccaaacaagaatctcaaaacgacaaagaaattgtcaatttcttagaacatcacgcctctgtcgagcaatttaatatctttattttgtcagatgcccatcttaactatcggttttatgatgccttggcactagcacaacattatttttctgagttggttaaaactgagatcattcatcatatgtgggatgaatgtggttgcggcgttagtggcaaagctcatacggtgcaatttaccaaagccctgatggagttaaatcttcctcaaccattgatcccaatttgggaagattggcgaccctatgctggtcataacctttatttttgttttgggttgaaccgcaaatactattttaggtctttggggagcttagctatgccagaactcttcgatcctgatcgcaatcgtgccgtcgttgctggatttgaacgagcctatcgcgaggtaaaaccagaatgcgaatatttccgcaatcatattgaaggggacgaagaacatggagagcggtggttagaatacgttattactcctatcgtcaaagcccaacccgaagcaggaatggaattagccattggcggcgcactccgcatggaagcaatgcgacgttacaatgagtatctcgccacgaaattccaactttcagaacaaacttccgagcaagtaaaggttgtttgttaatggcaatgaagacaactttcccttttactcgaattatcaaagaccttcccgctctcgtgccttttgtgagtataaaaacaatggaacgctcgaagggttattccatcaaacttcgtttaggtgcaaatgaaagtcgtttcgggatttcaccccttgctcgagaagccatgcgagaagcgattgaagatatctccctctatggcgatcccgaaagctacgatctgcgaaccgcgatcgccaatctctacaaaattgatcgcgacaatattgttgtgggaagcggtattgatgatttgctcggtcttgttgctagaactttcatcgaaccgggacaaaaaacggtcatgtcaaaaggttcttatcccacctttaactaccatgttgtcggatacgacggacaaatgcttcacgtcccttatcaggattttcacaacgatcccgaagcgttggtcaaaatggcaaagattgcggacgcacgcattatttatctcgttaatcccgataatcctacgggaacctatcttccggctaaaaagattcggagggcgatcgagcaattaccgcctcaatgtatgttgttgctggatgaagcctacattgactttgcccctgcgactgccctattgcccgtgaaaccccttcatcctcaagtgatccgcctgcgaaccttttctaaaggtcacggtttagctggtgcgaggattgggtatgccattgccgatcaggctatcattgctgcttttgagaagattcgcctccattatggagtcaacgcggtagctcaagctggcgctctcgcttccctacaagataccgattttcttctagcggtgatcgccgaagttgaggccggacgaaatgaatatgcgaatttggccaaagaattgggactttctaccttaccatcggcaactaattttgtggcgatcgatatgggaagtcaagagcgcgctcatgctatggtagacaagttattggaattgggtgtatttatcagaatgccaagcgcagaccctttaaatcgctatattcgcgtcactgtgggaacccctcaagagcgttgggagttttctcgtatttttcgcaaagtctatctccaagaataataaaacggaaccccaagatatttttttctctagaggtttacatgacaaagaactcttcattgctacttaaaggttttgaaattgaaacctatgctggaactccagagggcgatattatcggactgtctgatcgcgttgttccttatctcgagggttataaccaagaaccggatagtcgcattatcgaatgtattaccgaacccctgtcggagtacaaacaagttggctctgctgtccttgcttcttaccgtaagttaagaaagtatttgaaaactttgggaaattatacgctaattccgggcagtgctttgcatttaggagggagtgatcgcttctatcgagcgaatcccaatcacgcttttcatgactatgtttccaaagtctacggctcaagccttctcacttcaagtattcatattaatattggcttagacgatcccgagttgattttgcgagcctgtcgtctcattagagtcgaagcacctttatatcttgcacttagcgcatcatctccatttcttgataataaagtaactggttatcattctatccgctggtcaatttttcctcaaactccgtctgatattcctctctttgaaagtcatgcccactatattcaatggattgaagaacagttggcactcgaaacaatgaaaaatgttcgtcatatgtggaactctgttcgacctaatggaaacaatagaccttatgatattaatcgaattgagttaagaatttgtgattttatgtacgatccaagtaggattttggccttaactgcatttttagaagctcggctttggcaaattatagaaaatccaaatctcgatcccttaaaaatgagtcaattaccatcaaacaatctgggcgaagatttgctgaaacttacagcaggcaatgaagttgctgtaagtttttatagccttgatgcagaactaaagcattggcaagatggaagaattataaaagtccgagactggatttcagaaatgtatgaagaggctttagtaactgcgaaagcaaaaggatttgagttttttctaaaaccaataaaaacaattttagaaggtggcaatacggctcaaaattggttgaatttgcatgaaaaaggttggagtattcgtgaaattatccaacaggctattaaagaaatggaagataatgaacgaaaattcagattcgaggtaactgcccaggtaggaactcaagggatattcccataaggggagaaatatggtagtgttcaaacatgagtccagaagaaaaagatcaaaaaatagaaaggttagagcaagaaaatcaggcactgcgggaaaggatagcagagctagagaagcaattgggattagatagcacaacaagttcaaaaccaccagccagcgacggactcaaaaaatcaaatcaaaaacggacaaaaagtttaagagaaaaagggaaacgggcatcaggaggacaaataggtcatccagggcagacattggaacaagtattgcaaccagacaaaatagtagaacatccaacaccatgctcatgtcatgaatgtggatgtgatatgtcagtggtggaagcttctaaaatcatcaagcgacaggtctttgatataccaaccccaagaatcatcgtcacagaacacagagtcacagtcaaaaaatgcccagaatgtagaactcagatacaagggaattttccagaatcggtaacttccccagtatgcaattacaaacaccgttatcccaagggtattcccaaaaatattgctgctcgtctgattcaactgtatgagcaaattctacaacgaggactgagttttcactccgctctatcacccctgacctgcaaaggtaatcgtggtcgggtgaaacgacgtgttggtcataacttgctgctgcgatttcaaaattttcagggtgatgttttacggtttctgagtgaacctgatgttccctttaccaataatcaggcagaacgtgacttgcggatgatgaaatgtaagcagaaaatttccggtggttttcgctcctttgattttgcggtttcattcgctaatatccgttctttcctttccactgcttctaagcatggtctgaatcttttggaagttatcactcaagcactgcttggtaatacctctgtttttctcgcctctcttactactagctaggcagttacatatcatcttgtaattgacgtgcagcttttacagcttctaaaaaactttctaatctttgttgacgatcagataattttttttcgacttccatattttattttccttatccgcgttcatctgcgttcaacatcctatcttttctgtatcaaatacccgcaacgatgctcaccattaattaaccaatgcgtcctttccacactacaatccggtaaaatcactccaaacatttccaactcatgaccacacacactaggaaacgactcagccacattagaaatagcgcaggtgtgttccataaataaaaacctatcaccaccgttagcatctgattctacagggtgaaactcagccataaaaccttcagcttttcgcaattccaccaaagcggcaacccgttcctttaaagaaccattacccaccctttcccgatattccagcgcctttctttcccactgtttttgtaaaatcgtttttacctgctcacgccctacagtttccgctaaagtatctaacagcgaaaccgcaaactctccataaccaccaccgacactgctaacactcttttgtaaatgttccctgccccgttgacttaaactatatatatgttgaggtctacccataccagaattttccggtatagaatatatcactaattcttcagcctccaaatcctttaaatggcgacgaatcgcttgggggctaacttctaatatttccgcaagttcaagagccgtagcttgtgagtgttttaaaagatactctaggatatcctgcttagtagaggactgctgggtagtggccatgttagtcccaataaaaatttccaaaaattcaaaaaatctctaaaaaaatttgacttaaacaacattgttgttgttaatctatcgtacaatagatttatattaaacaacagccgagttgttttagtgtgtaaacctattctaacagccctgttagcgatcgctaacaaaaaacgggaatcagctttatagaacccgtcgcctatcctttaaagagaacacaagagaaccgatgagcgcatccgtcaaaaccttagttaaccaaccttacaagtacggttttgtcaccgacatcgaaaccgacaccatccctcgtggactaaatgaagacattattcgcttaatttccgctaaaaaagaagaaccggaatttatgctagaatttcgtcttcgtgcctaccgtcaatggttgaagatgacagaacctacttggcctcatgtcacctatccacctattaattatcaggatatcatttattattccgcaccgaaacaaaagaaagaaaaactcaacagtttggatgaagttgatcccactttattggaaaccttcgagaaattaggtattcctttaaatgaacaaaaaagattaactaacgttgctgttgatgcaatttttgacagtgtttctgtagcgactacttataaagaaaaactcgctaaagatggcattattttctgttctatttccgaagcattacgggaacatccagaattagtaaaaaaatatctgggtagtgttgtacctattgctgataattattttgcggctttaaattccgcagtattcagcgatggctcttttgtttatatccccaaaggtgtaaaatcaccaatggaattgtcaacttatttccgcattaattccggtgatacaggacagtttgaaagaaccttaattattgccgaagatgatagttatgtttcctatttagaaggttgtacagcaccgatgtacgacagcaatcaattacacgctgcggttgtggaattggtagctttaaataatgcggaaattaaatattctaccgtgcaaaactggtacgctggggatgaaaatggtaaaggtggaatttacaactttgtaaccaagcgcggtttgtgtcaaggtgtcaattctaagatttcttggactcaagtagaaaccggttctgctattacttggaaatatcctagctgtgtgttagttggtgataattctgtgggtgagttctactctgttgcattaacaaatcataagcagcaagctgatactggcactaagatgattcatattggtaaaaacactcgcagtacaattatttctaaaggtatttctgctggaaaatcaagtaatagttatcgtggtttggtgaagattaatcctactgcgaagggtgctagaaattattctcaatgtgattcgatgttaattggggataatgcacaggctaatacttttccttatattcaagttcagaataatacgggtaaggttgagcatgaagcatctacttctaagattggtgaagatcaattattcttttttgctcaacgtggtatttccgcagaagatgctatttctatgatgattagcggtttctgtaaggatgtttttaatcagcttcctatggagtttgctgttgaggctgataagttgttgagtttgaagttggaaggtagtgttggttaatctgttttctttgaggttttttttgaaacgaaccgcaaagtacgcaaagttcacaaagaaagaagagagaagagagagagaacatgattattgaaaatagtgatttgattttgtctgttaaggatttgaaggctgatgttgatggaactcaaattttaaaggggttaaatttggaggttcgcgctggtgaagttcacgcgattatgggtccaaatggttctggtaagagtacgttttctaaagtgttagcgggacatcctgcttattctgtgactggtggtgaggtgattttccaaggtgaaaatttactggaaatggaggcggaggaaagagctagaagtggtgtgtttttggcttttcaatatcctttggaaattcccggtgtgagcaatttggattttttacgggttgcttataattctcgtcgtaaagctcaaggtttggaagaggttgacgctttcgattttgatgatttggttgaggaaaagttggaagttgtgaaaatgaatccttcttttctcaatcgtagtgtgaatgagggtttttcgggtggtgagaaaaagcggaatgaaattctgcaaatggctattttagaacctaagttagcaattttggatgaaactgattctggtttagatattgatgctctgaaaattgttgctaatggggtgaatcagttaactaatgctgaaaatgccacaattatgattactcactatcagcgtcttcttgattatattgtccctgattttgttcatgtaatggctcaaggacgcattattagaagtggtggtaaagagttagctttagagttagaatctcgtggttatgattgggtgttggaagcagctttaggagtaggtgtgtaatcatgactattgatgtttctcctagttctatttctaattctttgttaaatcgagatgcttttttaactggtttattaaatcaggtttctgcatctgaaaaaagcggttgggtacaacaaattaagaatgatgctgttaagtgggtacgtcattctgttattcccaacacccgcgatgaagaatggcgttttactgatttatctccactgaaagaggtaagttttaatgtagggacaattcatgaattgtccctaccagatgattttgctttacctgaagttgctcaccgtttggtttttgtaaatggtgtttttgcagcgaatttatctgatactgaaaatttacctgctggtttaaaggttggtaatttagatgttttagatgatgatgttgccaaggaatatttagcacagcccttcgacttcgctcaggacaagtctgaggtaacaagggatgtttttactgctctgaatactgtcggtttaaatgatgtcgcagtggtttgggtgggtaaaaatgtggttgtagaaaatcccattcatctgttatttatttctgttgctggtgagtcagctattatttctcaacctcgttgtttggtaatagctgaaagtaattctcaggtgagtttgattgaagagtatgttacaggtattggagaatatttaacaggcaagatgcctgttccacaagaggagcaagtttactttaataatagtgtgacagaaatctgggtaaatgaaaatgctcaggttaatcaccatagaattgtgttagaaagtgatgctgcttttcacattggtaaaactgcggtaacacaagcgcggtatagtcgttatacttgtaatactgtaacaattggtggtaaaatttcccgtcataatttggagattttacaaacaggagaacaaacagaaacaacactcaatggtttaacagttattggtgataaacaattagctgatactcacagtgctatatccttaaatcatccgcatggtgttagtaaacaactacacaagtgcattgtaggcgatcgcgctcatggagtatttaacggtaaaattttcgttcccaaacccgcacaattaaccgacgctgcacaattaaaccgcaacttattgttatcatcaaaagccagagttgacaccaaaccccaactagaaataaccgcagataacgttaaatgcgctcacggtgcaaccgtcagtcaattagaagacgatgaaatcttctacttgcaaagtcgcggaatagatgaaaccgacgcacgcaaactattagttaacgccttcgcagcagaaattattaacttaattcctgtttcatcattgagagaaaaactgttaaaaacagtcgtcgctctcacaagtaagtaaagcattgtaagttcgtagtgagcgattcatcgctcaaacataaagattttaaggactaaagtccttactacgaactttatattttctgttgaattgtcgaatttctaaaatttagaaattattctgtactcctgaaatacttattaaaaatgacattcacttctaccaaaaccctcgctgataaagttcgccaagacttcccaatattacatcaagaagtccacggtaaacccctcgtttacctcgataacgctgcaacttcccaaaaacctgtagctgtattaaacgcatggcgtgattattacgaacaatataacgccaacgtgcatcgcggcgcacattatttaagtgccaaagctaccgacgcttacgaagcagcaagagacaaagtagctaattttattaacgccaaatctcgccaagaaattgtttttacacgcaacgctagtgaagctattaacctagttgcttacagttggggaatgaacaacttacaaccgggagacgaaataattctctcagttatggaacaccatagtaatatagttccttggcaatttgtcgctcaaaaaacaggtgcagttttaaaatttgtcgaactcactccagaagaaacctttgattttgaacagtttaaaaaactgatttccgaaaaaacaaaactcgtttctatagttcatatttctaataccttgggttgtattaacccagtgaaagaaatagctgaaattgctcaccaatacggtgcgaaattcttaatggatgcttgccaaagtgtcccccatactcctattaatgtccaagaaattgactgtgattggttggtagcttctggacataaaatgttagctcccactggtattggtttcttatatgggaaattagaattattagaagcaatgccgccattttttggtggtggagaaatgattgcagaggtgtatttagaccattccacctatgcagaattaccccacaaatttgaagccggtacacctgctattggggaggcgatcgccctgggtgcagctatagattatttaactaacattggtatggataaaattcatgcttatgaagcggaattaacagcctatttattcgatcaattagcccaaatacctcaaatcagaatctacggaccaaaacccgatgctcacggtgaaggtagagccgctttagcagcttttacagcttctgaagttcacgccaatgatttagcaactttgttagatcaagaaggtgttgctattcgttctggacatcattgtacccaacctttacaccgtcatttaggtttagcgggaactgcacgagtcagtttatctttttacaatacccgtgaagaaattgatgtttttatcaaagctttgaaggaaactttagatttctttgctagtgtgtttggtgaatagataaataatattttgggtgggcaatgcccaccttttttatttctcacgcagagacgcagaggagcagagataatattaattgcttctggagaagatagttatgtcatacagtgaatttactctagacaaagttagaaaatcctttgctttaactattatagataaagttaatatttttgcttctattccagaaattgaatgtccagctttattagcagagttattacaagaaaatgtccctttagcacttgcaagtaatacggaaaaatcacgctcggaaatgattattgcaccgattttaattagtgtgagaaagtatttaaaaaatcaaattagtctattttctggtattgattttactgtagatagtgaaaagggattaaatggtaattgtgattttattattagtcgttccccagaattattaattgttaatgctcctgtggtgacaattgtagaagcaaaaaaagaaaatattaatgcaggtttgggacaatgtgtagcagaaatgatcgctgctagaatgtttaatgaacgtgaaggtaataacattcaaacaatttatggaactgttactactggaactaactggaaatttttaaaacttattgatcaagtggtagaaattgatttgagtgaatattatattaataatatcggtaaaattttaggtattttatctagtatcgtgatggaataggtattgtaaataataaagttttagtgtaacattttaactcaaggaattagaaattattactcccagtggcagcaaaacaattatagtacaagcaccaaagacaaggaggtaattatgtttgtcacccaattatatacagacaattggacaggtaacaaaaatgaagaaaatgtcattaaaaatcctactttgcgacaaatagaagcagctatttttgacttagatggtaagattaaaactttagtcagtttagaagctgatgatgatagttatatgatgattggaggaggtaaatccgggttttctggtaaatacgttgttacagcaactttagacaactataatttttattctcttttagatcagccacgctacgatatatccaagctttctcattcttataaaagagtcataactttaattaaactttctgatcagctaaaaaaacaaaaaaataaagattctcagaaagataaaattattgtagttacacctgaattatcaatctctaagccaataaaaaaattagttgttggcggtcaacttggtaattatccttctcagatgtgtgttaatttaccccaatgtttaatagctgcaatcacttttgctgaatctggtgaactcgaatctttatttacttgggaaaaagatgaatctttggttaatgtataaaaagtaaatcattttttattaatgactatgcttctccaatcaacacccgcagaacaaagaacagttttatatgacgttagctgggatacctttgaatccttgctaaaagatacaggtgaaaatagaggttctcgttttgcttatgagtgcggtactttagaaattatgactccactatttgaacacgaaaacccaaaaggcaattttagtaattttatcgttgctttagctgaagaattagatatagaactaagaagtgctggatctaccacattaaaacgcaaaataattaaaaaaggcattgaaccagatacttgttattatatccaaaatgaaccagctatcagaggtaaagaaactttaaatttagaaatagatcctcctccagatttagcaattgaaattgatattactagcagttctgtaaataagtttaatatttacgctgcgttaggtgtggctgaactttggagatatgacggtgatgttttgaggttttatcaattgttagaaggcgagtatattgaaattaattttagtgttgcttttcctgtgatttctgttagtgatatgactagattcattcagcagagtaaaaatatgggtgaaattgctttgttaaaatctttccgtgcttgggtgagggggaagatcggttagctcttaatccaaaaaaccgagcaaaagattgattttatctgtatcaataatactctacctcttatagtaaccaaaaggcataatagaaattctgccatctgacacatgaattaccttcaaaaaaccacttattgtcaattaataaatgggacagaacccttaactaaatcaataacgtaagtgaggtaagtttcaatgtttaatttactggaagaactatccacaaatgcacaagagttgttagttggaggacaaggacaagaacaacaaatgccacaaataccacaaataccacaaataccaggacaacaaggacaaggacaaagtagttctcctagaccccctcagacatcagaaggagcaactgggtttatagttcctgacaacaacccagagagctacttcacctggagactagacaaagcaccacaaatgtccggtcagtaaatctactccatactaaactaaggtaaacgacatttttgatcacaaatcccccgcaagatgcgggggtaattatgtgtcaattcccttatccccccaacctgccagattatcttataattgtcaaggggcgatcgctctctacaggtaagttcaagggggatagatgtcacttaaacggttgctgttaactgcgctaacattgttagcgattatgttgtccggcttgtctttatttgctagttggcaaaaacctcagtttcaaagtcgtttggaactgtaccaaactaatattgtcttgcaagcccaagcatggcaaccagaagatagcaacgacgagagttttcaagctcttcgggcagcaatagtaggtgataaacccctagaaagtgcagccaagcaatatctagaggcgcgtgagtctgtaaaaacaaacttggataaaaccaaaaaccaactggacaagtttcgcgctcaagatatcaccgctgtcacacctgccaaacccctaccaaatgaacccctgcaaaccaaaacctctcctcaacaacaacaaaaagagctagagaagtctatcagcaaactgcgaaaattacgggatgaattagacttacgcttaggaatattacaagcacagcaaggggaaacagataaagcccaaacaacttggagtcaagtacaagaaccctctgaaaccgaatttaccgccaccgctaacgtcctcagtggactatggagcaacccgccgcgtctactcccaaatgctcaaccactgatacaaaaaaatttagaaggttggtttcgctccacggctttaactcagctttaccaactgcaacaacgtcaagctgctttagcagatgttcaggctgcacaacaagcggccgctaccgacgcagtatttaaattagccttaattgccactattcccagcttaacagcctttataggtctaatcttactaatagctttaattattcagcttttactcaagggcggagagtctatcttagcaacaaatgcccaaaagccttggtcaactccttggaatgtggaaacaattttacaggtttttgtcctgggatttttcttgatgggacaattatttatacctgaattgttaaacctcctccctatcccccgttcctcggataatgtgcgagttcaggctttttctgtcttggtgagttatgtactggttgccctgggtgcgttctcagtgctgtatttttctattaaacgttattttcccttaccagaagattggtttcgcttccggtttttcagtaattggtttttctggggactgggtggctactgcacagctttacccatagtcgtcatagtatcattaatcaatcaacaactatggaacggacaaggcggaagtaaccccctgttacaattggcgctagaaagcagagatgatgtagcattgggaatatttttctttactgcggccatagcagcgccattttttgaggaatttctatttcgtgggtttttattaccctccctcactcgttatttacctgtttggagtgcaatttttttgagtagtttgttatttgctgctgctcacctcagcttatcggaaattttgccactcacagcattaggcatggttttaggaatagtttacacccgatcgcgcaatcttctcgctcccatgctcctccacggactttggaatagtggtactttgctcagtttatttcttttgggcagcaataattaaaaccgacaattacagttgaaaaaatcaaaaatatttgattatatcgacatataaatctgaaattctcaaatttccagcagcgcaacatcaccgctatagcaggtaataggtgacagttgataggaaacccaacttataccagtccttgaggttttgggtttcttacctcaaccccacctacatctgtaaaattaattttgcagatgggtataaatgaaaaaaattcccggacataataacaatcaacccgtaaacactagagtagtatcacagatgctgcccattattcaggttaatgatattcaactttgctgaagttgaacatataaatctgtaaaccatctgcaccaaaatttatcaactaacttaccaaattttagatttgcaattttggatttttgatttgacattgaagattcaaaatcaaatttgtttatctaaccttcagaattctcttctgtggttaaatttctcatttacttaaactagaaatactctgataattacatacatatacaggagcttcactaaatatgactaatcttaacccatctcatgctaccaaacaacttttatctgggtactgtggaattattttggggggatttgggatacataaatttattctgggttatgccccagaaggctttatcatgctagttatttctgtagtcggtggttctctcacttacggatttacactaataattatgcagcttgtagggttaattgaaggcatgatttacttgaataaaaatcatgaagactttgttaatacctacttcgtcaaaaagcagggttggttctaaaaaaagaaggcaggagttattaattttggatttttgattttggattgtttttgtgatctccaatctaaaatctccaatctaaaatctcaaatctcaaatctcaaatctcaaattttttccctattccctattttcttaaaatatgccaatatccaaatctaaatatctcacattgctaatattattactaatatctatggtgtattttaccactacatcccattgggaaatgaactatttctacaaaagtctaatttttatgttgcctatacaacttgtatctgtgatatattttacctataggcactggattccttgacagtattttacaaatattactaaatattttaatttcttaattaaatactatcacagttggtcatagttccagatttcgcctactctcaaagtagaactgcctttttttaggtaggcattgcatttttgtagcgaatgtcataacttgtcatgcaacttgttcccgaaaataaacttaccccagaaaccccacccgccaataaagatacaaacacagagaaaattattttagatgtagggggtatgaagtgcgctggctgtgtgaaagcagtagaaagacagctaacccaacatccagacgttaaaaatgtctgcgtcaacctagctacagaagtggcagttatagaagcagaagttggtgctatggatgccgatgcactggcacaagcattaacacaaacattaacagctacaggttttccttctcaaccccgcacaccgaaaactcaagcagggaaagaaaaatatgatccagacgcaaaacagcgtcaggaaatgcaagcggctttcaaacaattagtagttgcttttgtattattgttattttcaggaataggacattttggtggttttattttcccaatattgaataacatctggtttcacagtggactagcaacagtagcattactcattcctggtcgtcccattattatagatggctggcaaggttggcgacggggaacgccaaatatgaataccttgatcggtttgggaagtctcacagcttatattgctagtttggtggcgctgttgtttccccaaatgggttgggaatgcttttttgatgaaccagtgatgatgctgggttttatcctcttaggcagaactttagaaaaacaagctagaggacgcgcagcatctgcatttcgacaattattagcacttcaacctcagatagctaggttaattgttaacccttgtggtgagcgaagccgaaccacagactcagataaattagtagcaggggcaaatattattgaaataccagccgaacaagtgcgggttggtgaatggttgcaggtgttaccaggtgataaaatccccgttgatggtgaagtgcgctttggacaaacaacggtagatgagtcaatgttaactggtgaagcagtaccagtgatgaagcaaccaggagatgcagttgcagcgggaactattaaccagtctggtgcgatcgctattcaagctaccagaaccggcgacgataccactttggcgcacattgtcgctttggtagaaaccgcccaaactcgcaaagcacctgttcagaaattagcagatacggttgctggttattttacttatggcgttttaacagcttctttgctaacttttctgttttggtacttttttggtactcatatttggccagaggtgaatattatttccaatggtatggaaatgatgagtcatgcagcacatcatcaaaccgccaacattgaatattcttcacttttaattagtttaaaattagcgatcgctgtgatggtggttgcttgtccctgtgctttaggactcgctacccccacagctattcttgtcggtactggaatgggtgcagaacgcggtttattaatcaaaggtggtgatgtgttagaaaaagtccaccaactaaataccgtagtctttgataaaaccggcactctcaccacaggcaaccccacagttacagactgtttaccatttacagacttagaaccatcctcacttctgcaactagcagcagcagtagaaagcggcacctatcaccccctagctaaagcaattcaacaagaagcacagcagctaaatttatccattccccacgcagtagactttcatactgaaccaggaatgggtgtatctgctgtcgtggatggtaaaactgtgttgttaggtaactgggaatggttaaactggcacggaattactgacactgcccaagaacacgcacaaagattagcagaacaggggaaaacagttattagtgttgcagttggtgataatttagttggattaattgccgtcagtgataccctcagaccagatgccaaagcaacagtagacaaattgcgtcagctgggtttgcgagtaattatactgagtggtgatagattagaagcagcgaatgcgatcgctcaacaactcggactcaacagcaccgatgtcatggcaggtattcccccagcgaaaaaagccagcaccatccaagctcttcaaactggggagataagtaaaaccactagcgttgctatggtaggagatggcattaatgacgctcccgccttatctcaggcagatgtcggcattgctttacattctggaacagatgtagctgtggaaacagccgaaattatattaatgcgtgatagtctttctgatgttgtggaatcaatacaactcagccgtgccactttcaacaaaatacgtcaaaacttgttttgggcttttgcatataatacagttggtattcccttagcagccggtgttttactaccccattttggttttgttcttagcccctccagcgccgctgccctcatggcttttagttcagttagtgttgtcaccaactccattttattacgacgctttacccattgactataacaaagaaaataggtgcaaggttttggaaactatgagtaggaaaacctcgcactttgttggtttttacctcgtttccaaatacaaaaaactccttgatatccttaaacttctgactccttgatagcgacttgtcctgagcctgtcctgagcctgtcctgagcctgtcctgagcctgtcctgagccgtgtcgaagggcggtgtcgaagggcggtgtcgaagggcgcagtcgaagggcgcagtcgaagtaagcgtggcgttagcctcctagttatgcaagaaagactctcaaatgagaataacaagcagagatagtccgcaaaagtcctagataataactaggaacttgggttattattataatcaataaaatcactaagttcggatttttatcaatttactgttgttaaaactcaaaacaataaaattcttttttactcattaaagtgtgataatatgcttttataaaaactaaataaagacaaatagccttacattgaatatatttaagtgaatatacggatacaaaatcaaagaaaaaacagtattattatgtaaacattgatgtttaaaatattcctcaaattttaccttaacttaaagaacaggattatgatgattggagatgaagctcaaatactaaaaaataaccatagtgtaaaatttatatctgactttggattttttacgcaagcatctaccatcaaatctatatgatactcaataccagtagctgggatgatgatttaccgccagatcccgaagaaatatatcaagatttactctgcgctctggatagaaaattaggatttgggttatattttgtacaatgtactcctgtggaatcagattgttttatacataaaattccccaggatcttccgcataaaaatattgctgtattacgcttgctagaaccagtggataagctatatcagcaagtagcgaattatattcaaggtcaaacagttgacatcttattaattaaaggtttggaatattccttgtataaatatgaaaaaagaaactttggcgaaataactgaaggtcagtttaacaatttaactaaagtaccaccaatactaaatcatcttaaccaacaaagagaaagatttagggatgattttcccttttgctttgtatttttattgcgttcattttcactcagctatttaatccatcgcgctcctgatttttttgattggcgttctggagtatatgaattaccaactacaccagaattagttgaagaagaatcacgtcgtcttttactagaaggagactatgaaaaatatctacaacttacttcagaagaaaaaattgaaaaagttctagaaattcaagaacttctggcagaaaaacatcaaacagatagtaatagagcaagtttgctttttgaattgggaaatctactttattctgctggtgaatatgaaactgcaattacattctatgaacaagaattaaaatttaaacctgatgatcattttgcttggtacaaccgtggtcatgcactcttgaatttaggatgcaacgaaaaagcagtctcatcttatgaaaaagctttagaatttaagcctgatgatccatatttttggtacaaccgaggtaatgctctgctgaacttaggacgtaatgaagaagcactttcttcttatgaagaagctttaaaatttaaggtagactacccatatttttggtataacaaaggtaatgcactacgaaatttaggacgcaatgaagaagcaatttcatcttatgaccaatctctcaatttaagacccaatgattgttttacttggaataatcgtggtatcgcatttcggaatttaagcagatatgaagaagcaattttttcttataaacaagctttaaaaattaaacctgatgaccactatgcttggtacaatttgggtatcgcactccgcaagataggatgtaatgaagaagctgttttctcttatgatcaagctctgaaaattaaacctgatgatcactatgcttggaacaatcgaggtaatgcactggatgatttgggacgtatggacgaagctctgttctcttatgatcaagcattaagaataaaacctgatgataaatatgcttggtacaataaagcttgttgttatgctattcaaggtagtattgagcaagcactagaaaacttggagcaagcaattaatctcagacctgaagagtttgcaacaatggccaacgctgatcctgattttcattgtattcgagaagatgcacgttttcaagatttaatacgtaggggtatgatgaattaaatttgattaatttaaaattaaaatcttttggtgaatttattatgaaaatattttttgatcaggtacttgcatttgtcgtctatatatgtgtatatatttttgctaaaattttcactgtggagattttaaatatctgacatttttagcttcagacattaaaattatatcgcttgctttttattgctgacttcatctaactttttagcatcatcagaactgcatcaactaagttgtttacctatgtccaacaatactgaattactcaaaaacctctataatgctttcaacccattccaacccttacccgcaggtgatcctaactatgtagactgtcaagatgtgcgaggagaagcagatattttagaagaattgggaaatcgtattcagttagcaaatcaaaatacttgtcaattatattctggacatagaggagcaggtaaatctacggaattactcagactcaaggaatatttggaagcaagacaatgttatgtagtgtattttgctgcggatgaagaagatatagattcagaagatgctcaatatacagatattctcttggcttgtactcggagattactaaaagatttacgcgcaattggtaatcctcaacctgtgcttaattggctcaaagatcgttggcaagatttgaaagatttggcgctaactgaaattcacatcgaggatatgaatgtagaaatgcaaattagtcagtttgccaaattaacagcaaatttaagagcagtaccggcactaaggcagcaaatacgagaaaaagttaatccccatacagtgactttgattaaggttttaaatgagtttatcgccgatgtgaaaaagcgcctacctgctcactgcacccaactggcagtaattattgataacttagatagaatggtgttagttcaagatggcgatcgcaccaattatgaagaagtttttttagaccgctgtgaacaactgaaagccttagattgccatttaatctatactgtacccattgctatggtctattctgccagggctacagacctgcgtgatatatatggtgatccgcaaattttaccaatgctaatggtacgcactcctagaggagaaatatatcaaccagggctaaaaaaagttaaagaggtcatttcccggcgcatcaggcagtttgcaccagataaaccactagaaacggaaatatttgacagttctcaaaccctagaacgactttgtttgatgagtggaggtcacgtcagaaatttgctattgttgactcaggatgccattggacgcactcaagatttgccaatttccgaaagagcagttcgacgcgccattactcaagctagagatacttaccgccgcgctgtggaaaaccatcaatggagtttattagcagaagtctccctttctaagcgtatcatcaatgatgatcaatatcggagtttgatgtttaatcgctgcctgttagagtaccgctatttggatgaagaaggggagatgcagcgttggtatgatattcacccactgattcaaggtattcaggaatttaaagaagctgtagaaaatctcccatgaatttagattttagtgactgggatcaagacgtaccccccgaaggatacgaagaatatcaaactttgctcaacgctctgaaacgcaaaaacaacaatgagtttggcttattgtttgttgagtgtaaacccctggagactgagaaacttttttctcggattctccatgatataccagagaaaaaactagaaattttacgtctatttgagccagttaatactttatatgagcgagttttaaatctctacatccatcagcaatttgatatcttatttatcaaaggtttagaatattcgatctataagtatgaaaaagaaaagtttggcgaaatcacagaaacccatgctcatgatttaagcagtgttcccccaattttagatcacttaaataaactgcgagagagttttagagataatatccccattacctttatttttttgggacgaccttttttaattgattattttattcatcgcgcccaggatttttttgattggaaatccgcaaatgtattgaagttaacaacagtcccagatttcaatccagaagaatcagttagtagttctgggcgcaagtcaaaaatatccctttccccttgacagcaaaaattttagattttagatttgggattttagattaaaatcaaagtctaaaaatataaaaacaaggtttcaagcctcttctttaaaggagaagataatccaaaatccaaaatccaaaatccaaaatccaaaatagattgattccttaaccaacaggtatttccataatattgggttaaaataaaaatatacaataattcgggggggccagtttactggtcataagcgcctatagagactatcttcggaaatctccaaggtttaaagtccagccagctaaagcaactacagcggctgtaccaccagcgtatatcgggcgatcgcatgacaacaccggagttcgcccaaaggctggcagcaattagtacggaaataaatcaacctgtatgtgcctacctcaaccgtcgcggacaagtgatccgggtgggggtaggcactccacgtcaaacccaaatcccacccctagaactgccccgttatggtgcagaacggttgagcggtattcgttgtatagccacccatctcaaagcagaaccaccgaatgaggcggcactgacagcaatggcgctacaacgtttagatgctttagtaatgctgaatattactggcacaggatttacccgtcggggtgggggagcgactgggtacgtaaaagaagcttatttggcgcatttggtagctaatagcagacaattagttttaactcagtcatcaggaatgaatattccagactcagccttatattccagcgtatcgccacctctgagtttagatgcgatcgccgaacaggattttctggacttggtagaaagtctagaagaagaatttcagagagaatatattgctcaagaagtagacgctgaccatgatcgcgtggttatagtcggggtactaaccgatgatatgactccccaacgatttcaagacaccatagccgaactagcaaggttagtggatacggctgggggtgatgtcttgcaggccttacaacaaaagcgatcgcgcattcatcctcaaacagtaattggtgaaggtaaagtccaagaagtagctttaaccgcccaaaccttgggagcaaatttggtagtttttgaccgtgacctttcacccgctcaagtccgcaacctagaagcgcagattggtgtcagagttgttgaccgcacagaagtgatattagatatctttgcccaacgcgcccaatctggtgctggtaaattacaagttgaactagcgcagctagaatatatgctgccaagactcaccggcagaggccgtgccatgtcccgactagggggtgggatcgggactcgtggacctggtgaaaccaaattagaaacagaacggcgagcaattcaaagaaggatttctcgactacagcaagaagtaaaccaattacaagctcatcgttgtcggttaaggcaacggcgacaacatcgggaagttccttcagtggccttagtgggttataccaacgcgggcaagtctaccttgctcaacgccctcaccaacgcagaagtatatacagctgaccaactgtttgccacacttgatcccaccacccgtcgtctgattatttctcatgcggatacaaatgaaccccaggaaaccttaatcacagatactgtagggtttattcatgaattaccagcttctttaatggatgctttccgcgccaccttggaggaagtcaccgaagcagatgccctactacatttagtggatttatcccatcctgcctggttaagtcatattcggtcagttcgggatattcttgcccaaatgcctattactcccggtccggcattggttgtatttaacaagatcgatcaagtcgatagtgaaactctggctttggcgcaagaagaatttcctctagcggtgtttatttccgccagtcaacgtttaggtttagatactgtacgcctacgcctgtcccagttgattcaatatgcagtagacggcggttgagcttgaaaattttagattttggattttggatgatttgctggtagctcttgcatcgttctggccaaggatgagacagaagctaccttttataattgaaaagtatttgctcaaattgaggatattatgactgccaaagtagaaatctacacttggagtacctgcccattttgtaaccgtgccaaaaacctactattaaataaaggcgttgatttcatcgaatacaacattgatagaaatgaggtagcaagaaatgaaatggctcaaagagcaaatggaaagcgttctctgcctcaaatttttatcaatgatcatcacattggtggttgtgataatctttacactttagacagtgcaggtcaactggatactcttcttggaggttctaaggtttaggtcaagcgtcttgagactccctcacaggggtaggtttttaatatgatctgtgaaggcaagaccaggaagacaaggaaggcttgtcctgagcgtagtcgaagggatggacaaggaagattttatacggacaatggttttttaacggactatttttgtgactaagaatacagagtttgtactgttttcctcccttgtcaccttgtccaccttgtccaccaagtcttgccctcacgacaatgtaaaatacctacccttgtgagcttgagactcccccaccaacctaacggtgtagcgggagattcaagttttcttagaaacctgctttttggaattataagtagggcttgctgacaaaatgcaaaacccagataaatcaaaggtaaggtggtcagtgaccactaacgctcacggcgaagccttgcacttttattgagttcgagagatggaaaagaaatcttgaaatctcatcctgactcctgtaagggcgaagcattcgggcgataaatgatcaatttttatcacaggttattttccgaatgcttcgcccctacttcgcccctacgactcctgactcctatgccctcatgaaaagactttctcagcaacccctaattaattttttttgataattgaggtagaaagggtgaaactggcttttattatcgatcccatccatcagcttgacccttgccatgatacgagtgttgccctcatggaagcagcgcaaattcttggtcatgaagtttggataacccaagcgaatttgttaaatgttgtggatagcaaagcttgggctgttttacagcaagtagaacttgtaccagtggaattaatagagggacgttgggtagccgcaaatccttggtataagttaggttctagcgtcttcactgctttggagtcaatggacgctgtatttatgcggacagacccaccagtcaacgattcctacctgtatgctacttatattttggattacattgaccaaaataaaaccctggtaattaacaaccccaatggtatcagagccgcaaatgaaaaaatgtatgccttgcaatttactcaagccatccctgaaaccattgtgagtgctgataaaaaggtgatccgccaatttgtagaagctaagggtgcaacagttctcaaaccattgggtaacaaagccggggaggggattttatttttacaatcaggcgatcgcaattttaactcaatagtcgaactcagtaccctccaaggtcgattaccagtaatggtacaaaactatttacccgcagctaaggacggagacaagcgaattatcttgctcaatggcgaacccattggggcgattaatcgcctttctagtggtagtgattttcgcaataatatggcaacaggtggtactgttgctcaaacggaaattaccgcaagagaacaggaaatttgcaccttattggcagaaaaactgcgtcaagacggcttgatttttgttggtattgacgtgattggtggctacctcacagaagtcaacgttaccagtcccacgggcatccgagaaattgatcgcctagatggtactcaccttgctcatcaggttattcaatggctagagcagttaagcttctccggtctaaagacacggagatttctgaagagtccataaacgaactttctgaggctggcttaaacagcctctactgattccgctaagatcaactcctagcatcaccgctacttttctcaaaatattagcagcaccattgcagtctgcattaattttgaacccactagaagttttatatagggtttgctgaataaacctaaaaccttgatatatcaaaggttagagcctgataaacacagaaattagtgcaagggttttgaagggtataccggaaaaagtgtgcattttttgggatttcaagagatggcaaagaaattttcaaatctcctcctgactcctgactcctgactcctatgccctcacggaaagactttctcagcaacccctaaataaaaaaaactccaataaaatacggggtaggcaggtaaattgctgacccctatcctggtgataaacctaaaactaagaaattgtataaagcacaaacgccagaactgagactgcaaacttaatctaaaatctcaaatctacaattacttagggtttgctgaaaaagggtcttcgttaaggcagggaatagggaataggcaagagtttgggtgatctgttagtaaccaattctttgaaatttcacccggaaaatgcacgcttttaggagtatacccctgaaaaatcctgcactgatttcctgattttccacctgaaacccttgatttatcaaggttttgagtttattcagcaagccctacttaatttttaggtggtgtgcgtcttcgttggagaaaatcaggaatatctaagatcggtttttctttaggttcaagagttggagttgattgattaacagttggttgattaaccatttgtactcctagcttcttgggagatggagtcactactctgggagtggccacagtttgttgtggagcagcttgaatttctccagtaaacccagtcgcaatcacggtaattctgacttctccttgcagtctgtcatcaatcactgcaccgaaaataatattggcattgggatcaaccacctcataaattgtttccgcagccgcattcacttcatgcagagtgagatcactaccaccagtgatattgaagacaacccctctagcaccttcaatagagcattctaataatggtgaggaaatcgcggcgatcgcagcttctctagctctagatttgccagaactcacaccaatacccatcaatgctgatcctgcatctgccatgactgctcgcacatcggcaaagtccacattcaccaaaccgggaatcgtaataatatcagaaataccctgtaccccttgacgcaacacatcatcggcatagcgaaaggcttcttgcacaggtgtttgttcaggaattacctccaacagcttattgttaggaataataatcaaggtatcaacccgactttttaatccttcaataccctgctcggcttggctagtgcgtcgccgtccctcaaatacaaacggacgggtaactacacccacagtcaaagcgcccatttctttggccacttccgccacaattggcgcagcacccgtacctgttccaccacccatacccgcagtgataaaaactaggtctgcaccttctaaggcggtagcaatttcatcacgtgattcttccgctgccttttgaccaatagcgggattaccccctgcacctaaacccctggttagtttctgcccgatttgcaaacgactgggagcgccagctaaagtcaaggcttgggcatcggtgttaattgaccaaaattccaccccagaaacatcagattcaatcatgcggttaacagcattgccaccgccaccaccaacaccaataactttaatattggcgactcggcccggaacaatttcaccaatgcggctattttccgtaatttttttactgtcgttactttgggcaaagtttagcccggaactaccaaagggattgttagagttaacggacaaagataaccctgtttgtcccgcagattgggcatttttataggtaagctcttggttattatcaaatgtcattggcttgatgaaggtagataaacgacttgttttggtgttattcacctaagagtcaaatatagttgagttggagactgtcaccgtctatgacaatcaatattttttattgttctgctgtgcaaaacctagacaaatctagacttttccttcttactcaaggggagcatgggagcggttatccctctgtaagtctctgtaaatctctgtaagttttggcgctgtctgcgaaacccgatcataattagctatgggatcatttggcaacttaggcgatcgcctatggcttagagcaaactgggctgtcagcactgcgctccgcgcaatcgcataactaattctagaaaagtatacctacattgtccgaaaatcggtttatataacttgatctagacattaagattttctatactatgttgctaaattttcccagtattgctctgtgaatttgatgctcaatatccccccactatttctgctcgaaacttttattagcaatcaattttacagctttatttgttcattttttcgataactactaaatttttcagtgatttactgtgtaaagcattactttttactccagaagatatatcaaaaatgcgtttggtttagtttttggttataaacctatgaggttaaatactcacatacaaaacgcagttaccaatggacgacggtagttttgattgggaaaccctacctccccaccaaggtgtaagaacgctgcacccaaacccttgattttttatcgacctgcataaagattattcccaagaagtttctattatttatcctgccattttaatcaaaagttcatgccaattgttatttcaatggtgcaaaccgtaaaactaactaatatttttatcatttttatcctcaaaaactggtttctgtactcaaacaggctcaagcttgttaggtatctgggaagttaatttgttatttttggttcagttgtactaaaggtcgttcaggatttttgatatcaatataggctaattgtttgggcttgaattttgctggtaaatgccgcatttgcacaagtaactggattttttccggtaattgggcattaggaacaccaagatggacatttcctaattctgttttcaaaattaaatttgtgggatcttggcaatcaatttccatcactttaacagaactctgactgacagcttgataaagttcagtccaataggggcaatatttttctggtgaaccaagaactttgagggtaggcaatttacctgtggggttaagtgcagtgtattttgttagaggaatcaaagcgccactagcatctagtaaactgacatcatcctgtttgcttccagcaggagtattttgcaaacatgaagatgttgcttgtttgccagagtttgccgaagattgaggctgagtattgcaactggttgtgctttgttttggtagggtgtgaatcattgccactggtaatctcttttgaatttcaataattaaaccaggaggaaacagacgacggctgacagtggcttgtgcaatagcgggttgtgcttctaaagtttcggcaattgcagaaggttcaattcgccataaagattggggataggacagcgccaacagcgactgaatggtttccttggataataattgattgcctgattttaggactatttgtgcaggtgtttttaacacccacattggttggagtgttacccagagcaatccacctgctagactactggcagcgagtgttcgccaaatagtgtggatgatttttatttgctgctgcctacgtaattttttacggcgttgagctaaattcttgcgggaaactgatactataccggccatgaaaacccctttctggtttgagtctaattcctgaaaaccacggtaattggtgattggtaaactcttaagcttaccattctaaccagttatcagtatcacaggagtcgttagtgttttggataacaggagttttttcattactttctactggtaaattcactagaaattcttgtaatcgcatacgttcaatataaggccaacccccctcagactcaatatctctgagcagtgcgtagagtctttggcggttatcgggcaaactatcttgaaaaattccatcacgaatttctttatgtaacttttctaattgtctcagcaaagataataatgctgtaacattgccttggcaagcgtgggctgcatcttgcaccgcagatgcgatcgcttgcaacttagcagataaatttcccgatggcaaattttggtcattgttcatgtaattttctgctgctgttctataaaagtaatacaatacccgaaacacccgaaaaaagggaggatgggcaggggtaagagcgaaatcacaaaaagcaagcaaaaatcaagcgaagaactactaatgacgaggcgctaattgtcaattgattgatgccaatgtgaatggtagtttgaatattgtacgtaaagtaatccccacagatttaatgtgagggcttaattacgttttagtgaattttggggattcatttccgactaacaaatagcatcagagaaatcttatgctttttggcactataacttggctaatttccctatcaaaccaaagattgtatgtactagcaatacatatacaatacaggatgatttgggtcatgccgcttttacctgatgtaagagcaaagcgcgaagtatagcctacttcgcattaataacagatgccttgaggcgttgttgtggtctactcatccatttagccaaaccctgccaaatgccactcagtagactgttggtttgaagctaaggaaaaagcaacttccatctaactctgatgagagaaactgctggttctgaagctaaacctgaaaactcaaaacggaatgcgttttattacgtttagtagagccgttttacaacttaaatattaatgacattgaggttgaccatgaggtatcgcgctttaatagttgcattcttagctttatgcttggggctgataactgcttgtagtgatgcgccttcatctagcagcagagacttgctgacttacgaacaaattagaggtactggcttggctaacaaatgccctcagctggcagaaacaagccgtggttctattgctttggataacggtcagacctacaccatcaaagaactgtgcttagaacctaccaattactttgtcaaagaagaacccgctaacaaacggcaagaagctgaatttgtagctggtaaattggtgactcgtaacacatccactattgatcaagtacaaggtgatttaaaaatcaacccagataacagtctgacctttgtagaaaaagatggtcttgatttccaagctatcacagtcaaacttcctggtggtgaactagtacctttcttatttactgtcaaaaacttgattgcacaaacacagcctaatttgaccagcattaatacttctactgattttgaaggtaagtttaaagttccttcttatcgtggtgcttctttcctagatcccaaaggtcgtggtgttgtcagtggttatgataatgctgtggcattaccagcccaagccgacgatgatgatttgacacgagctaatgtgaagcgtacagaaatcctcaatggcaagatttctttacaagtagctaaagtagacagttctactggcgaaatagctggtacttttgaaagtatacagccctctgatacagatttgggtgctggcgaacctaaagaagttaagattcgtggtttattctacggtcgcgtagaaacaaatcgcggctaaattcctgttgttatagcaggagtcaggagtaaaacccttttttagtaggagtttcatgattaattgatgtcctaactactctgtctacagctataaaaaaattcatccaactgccctgctttttaagagggtagttggttttttttagactggtaaacttttggctaatttctcatcacctgtgatttttccattgtgatttttccgtaaataaacagttgtcaaattcatgttttgggaaattaggtgaatttattaaaattaaatacgtactattactcatcaataatttttattaatttagaaaaataatagatagaatttttggctatttattcagtacatttcatattgcatttattaagttacgtaatatcccggtttgacattagggaaagaattgtatattttgattctatgcgagttgtttaataaactacaacagaccattgacttcgatcactaaaaagcaactctgctgaaaatcgccctagattttcaacccatgctcaaaatcttttctagccaaaaattttagtctgcctgatggctttatgagttgttcaataacgtgcatatctgcctatagcgcgtctaaaaattaagtttaggagcgattaataaacactctatttgctaaatcctgaatgtgctatgcctactacagtcacgaacgaactaaaacatgagatttcacagttgttgcgagaatatgagcaatgtccctcagaacgccttcgtaatcaactggtgaaactaaattttgggctggtgagaaaagaagctcactactggatcaatcaatgtcatgaaagctatgaagatttgatccaagtcggctgtttgggtttaattagagctattgagaaatttgaactttctaaaggacacgcctttagttcttacgctattccttacattcgtggggaaattcaacattacctccgggacaaaggcgtaaccatgcggataccccggcgctggttagcactgcaacagcaagccataggtgtttcccgttcttggcgggaaaaatacaaccgccaaccgactgatgcagaaatagctggtgcattggaaatttctcaaagtgaatggcaggaaattaaattagcatgggtgaatcgctctcccctgagtttggatgtacccatacaggatggagaagaaggatctaccagtttgggggaattggttcccgatcccaattaccgcagctttcaattagcgcaagaagaccaaatcagattacaacaagcattagtacagttggagaaccgcacccgggaagttttagaatgcgtgtttttacatgatttgacacagaaacaagttgcagaacatttaggaattagtgtagttactgtttctcgtaaagtcaaaaaaggattggatatgctgaaaaaaatcatggtagcgcctgaaaattaatagccaatcctctgaaaccatgatttgctggagtgttaaaaataactctggaaatgtaaaatttaggttataaagaaaacagacttggcctgtaatcacaatttcaggcgtgttgatttccataagtaaactttcctatagctttcgagaacagctaatgggtataaattcacaaattaattcacagattgtagctgcggctattttaactttggcgatcgctggatgtacagttaatgatacgccagaagctactaacactcctccagctgcaccaattccccaaacagcggcagaaaaaccagaagaaaagacaccctttgctaatcctgtggtgtcttctcaaaaagatcaagcaataaaggcaaataatcccggcttgattgaatccactagaggcgatttgcgcgtggatttggcacaaaaagggcggactgatccatttgcggaaattattaagcccttatgggtaccaattgctgccaattctgagccaaaagaagttcctaaactgcctcctttgccatctccacaacaaagaggaacaaatcaagctcaggggggacaaaatagccagggtcgtgtacaaattactactcctccacctcaaccaaaacctcctttgactccagttttgcccatggttttacctcaagttgtggctaaagagcctgttaagcctgtgttaccacctgctccccagcctgaagatgctcaagcggttttggtcagtggtatagttgttattggtaaagaaccccaggcaattattaaagtgccggaagaaactaccagccgctatgtacaagctgggcaaagattgggtaatggggttttgattaaacgaattgagatgaacagaggttctaatcctgtggttgtgtttgaacagttcggaattgaagttgctaaagcagtgggagaaaaaccctctaccgaacctgcaaagtctgaacctgcaaagtctgaacctgcaaagtctgaacctgcacaacctgctgttggggtttccatttcaatgggtttgtaagagttggttagctatctggttacagcagaatatggctggcgctacgctgtcaggagtcaggagtcattttgttgtgcagtttgtacttcattcattgacaatctgctgtaagtttgctgtaaatttatagatataacatcaattctggcaattaaatttgttgcataaccggaaatgtccggttttatattatagtgatgattttatactttttatggaattatggaacagactcaacaaaaaatagaatttcctaatttacctttggctgtatatcgagaaatagcggcacatttgcggcaggtggaaggggttgatgtggatttaattcctcaaacttcttcagattttgattatgatcaaagtcaaattgctggtttgtctatttcttgccaaccaaatactaatgaggaacaggtgaagctgattttagattattataacagtctaaaaacctgattctatagccgttaacccttatgggaatatccccggttttcctacctcggcagttacgcttatttgttgtttaatcatcgtaggttagactcaataatagtgaaccaataggtatgagatatgaatcaaaaagacgataaagctttatttcagaaaaagtcgttaaaaaatgccttgggtgcttttaaatttcctgaagatttaacagcacgtcatcaaataattagcaaatgggttgaagctttaaattcaggtacactggataaaatcagcgaagtttctctacagggaaatttcttaaaagagatatttcaagatgtattaggttatcgttctgtaattgatggtggtggtaaaaaatgggaactttacccagaaaaaaacattgctgatggtggggggtttgctgatgctgctttaggatattttaccgcgacagaaaaccaaaaaggtcaggtaaaattacaaggtcaagtagtagcacctattgaattaaaaggaactaaaaataatttagatcgtgctgcatcaggaagggataaatcagcagttgatcaaggatggcattatgctaattatactcctgattgtcgttggatcattatttctaattatcgagaattacgattatatcatattaataaaactccagcttattatgaaaagtttgtattagcagatttaggagatttgcaggagtttaaaaaattctattttattctttgtcgggataattttttacccatcaaagatgtctctgttattgatagattattaaccgcttctgatcaagcacaggaagatattaccaaacaactgtatgaggaatataaacaagtcagattaaacattgttaaacattttcgtttttttgctgcattagatattcctaaccgtgatgcggtattaattgaaaaagcacaaaagacattagacaggattttatttattgcattttgtgaggataggggattattaccagaacagacaattactaaagcccatgatagcaaaaatgcttataataatcgtccgatttgggaaatttatcaagatgtttttcgctgggttgatcaaggtaatgatgatccaccaattcccggttataatggtggtttgtttcaacatgatccgctattagatgaaacattaaatattcctgatcctttatgtacccaactgaaaaacctgacacggtttgattttgattccgaagtttctgtagatattttagggcggatttttgaacagtcaattacagatttagaagaattaaaagctgatgtttctcaacaggaatttgataaaaaacaaggaaagcggaaaaaattgggagtgttttatactcctgcttatattacgcaatatattgtcgaaattgccattggtggatatttacaaaaacgggaaactcagttaagacagcgtttacagttagcagaatttacagatccagaaaaacagcgatcgcaagaaattcaattttggttaacttaccgaaatgagatattagtaaaaacgcgagttgttgatcctgcgtgtggttcaggtgcatttttaattgctgcttttgattatttgcaaagtcagtatcaacgagtgcatgataatttgcggtttttacaatatcaagattcagaaaatctagaattagataaaactattctgagtaataatttatttggggttgacttatctccagagtcagtagaaattactaagttatctttgtggttaaaaactgcaactcagggtaaagctttaacttatttagatgataatatcaaagttggtaattctattgttgctgatgcagagtttacagatttaccttttatttgggaaaatgaatttccccaagtttgcgctgaaggtggttttgatgtagtaattggaaatcctccttatattcgtcaggaattattatcaccttttaaaccttacttacaggaaaactatcaaacctatgatggggtagcggatatctatatttatttttatgagaaaggtttgaatttattgaaaccagagggaatactttcctatattgtgactaataaatggttacgttctggttatggcgaagctttgagaaggttcttttctcagtcgagtgtgtttgaacaaattattgattttggacacgcaccaatttttgaagatgctgatacttttccctgtattgttgcagtcaggaaaactaaagtttcggaaacggagagggaaaataaagaagttgtaatttgtattgttccccgtgaggagttaccgaaaattaacctgactcaatatgtgcagaatgaagagaatagttatactataccttggtcgcggttttctgctaatgcttggagtttagaacctcctgcggtggatgagttaatgcagaaaattcaacgggttggtgttccgttaaaagagtttgctggggttaaacctttatatggaataaaaactggttttaatgaagcgttttttatagatgatgcgactaagagaaagctgattttagatgatccgaaatgtgcggaaattattaaaccaatattaagaggtcaagatattaaaagatggtgtcctgaatgggataatttatggataatttttactcgtcgtggaattgatattgatgcttatcctgctgttaaaaatcatctgagtcaatatcaaaagcaattagaaccacgtccgaaaaattggaatattagcaaagatggtaagtgggaaggacgaaaaccaggtacttataaatggtatgaaattcaggatgctgttgattattggcaattatttgaacaacctaaaattatctatcaagagattcaaactttcccgctttatgggtttgataattctggatttttgggaaataataaaactttcatacttcccactcaagatttatttattttagctgtacttaattctcctttaatttggtggtatagtcaacgaatttttacaaaaatgctatctgacgctattagtccaatgggatttttatttgaaactttacccattgcacaaccgacagcagaaatacgcgcagaagtagaagaaattgtcacgcgtttaatagaaataaccaaactcaacggacaagtttataaagacgttctcgactggttgcaaatagaatacaaaattgaaaaactaggaaataaactagaagatttcgcaactttagaatttgttgaatttgtggaagaagtgagaaaaagaatgcccaaacccaagacagctaaaaaagcatctgatccattaagtataccagcctttaaagccttacgtcaagcacataatgattatgttccagaaattcaaaaccgcaaaaatgaagctgtgaaattagaacagcgacttgcagatttagtgaatcaaacttatcagttaacaccggaagaaattgacttaatgtggaaaacagcacctccaagaatgccgatttgaattaaaaattaaaaattaaaaattaaaaattaaaactcgttcccagtctccgactgggaatgtaatatagagtctctgactctagcatacatcagaaggcagagccttcaattattcattcccatacagagtatgggaacgagtaatagaagtcggggatctaaaaatccgcgttcatctgcgttcatctgcgtttaattattttcattgtctgaatcaggatatccaggatttaaggatttacaggatgttttttacgaattaccaattaccaattacccattaccaattacctaatgttataatcaaaaaattacaacttgatgccatatcaaaattatgatcattgcacaagaacaagaaacccaagaaaacatctaccaagatgtaatatttccccctggtgatttatatagtgatgaacctcccgtagaaacagaactgcatctagagcaaattatgctcttaattaaatgtcttaaatggttatggaaaaatagaaatgatttctatgctgctagaaacctaaccatttactatagtccaaatcagaaaaaatcagaagattctcgtggtccagatttctttgttgttttagaaactgaacgcaaaacccgtaaaagctgggtagtgtgggatgaagatggtaaatatcctaatataattgtcgaaattctctcacccagtacagcaaaaacagatagagaatttaaaaaacaactctatcaaaatacattccgcactccagattatttttggtttgatccttacactttagaatttgcgggttttcatttattagatggagaatatcaaccgttgacagcaaatgaaaaaggacatttatggagtcaacaactaggtttatatttgggtgtttataatggtttattgcggtattttacacgggaaggaattttagttcctacaccggaagaaagtgcagaacaagaagctaaaagagcagaacaagaagcagaagcaagaaaagctgaagctaaaagagcagaagcagaagctgaaaaagcagcacgtttagcggcaaaattgagagaattaaatattgacccggagacaatttaaagttactaaatgtaggttgggttaagcgacagcgcaacccaacaaaggttttaatgatgttgggtttcgttccatgcttcgcaacgctaacgcgaacaacccaacctacctattgatttttcgataacgttatcgcttttctgatataatcaaaagctcaactcctttaacatagaatttgatgtatgagcaagggaactctgtttgacaaagtttgggacatccacaccgttggtacacttccatcaggactaacgcaactattcatcggactccaccttatccatgaagttaccagtcctcaagcctttgctatgctcaaagagaggggtttaaaagttttattcccacagcgcacagtggccactgttgatcatattgttcctacggataaccaagcgcgtccgtttttggatagcatggcggaagaaatgatccaggcgttagagcaaaactgtcaagaaaataacattactttccataatattggttcgggaaatcaaggtatagttcatgttattgcccctgagttgggactaacccaaccgggtatgactatagcttgtggagatagtcacacatctagtcatggtgcttttggggcgatcgcttttggtattggtacaagtcaagtccgcgacgttctcgcttcccaaaccctagcattatcaaaactcaaagttagaaaaattgaagttaacggaaaactcagacccggagtttacgctaaagatgtaattttacacattatccgcaccttgggagttaaaggtggtgtaggttacgcttacgaatatgcaggaactacctttgaacagatgaacatggaagaacggatgaccgtttgcaatatggcgatcgaaggtggtgcaagatgcggatatgtgaaccctgataaaattacttacgaatatctgaaaaatagagacttcgccccccaaggtgcagactgggacaaagccgttacttggtgggaatctctgcggagtgatgccaatgccaaatatgatgatgtagtagtatttaatgccgaagacataccccccaccgttacctggggaataacacccggtcaaggaataggcgtggatcagaaaattcccgcagctgaagaactagcagaagaagatcgcttcgttgctgaagaagcttatcgttacatggatctttaccctggtcaacccatccaaggtacaaaaattgatgtttgctttatcggtagctgcaccaacggacgcatcagcgacctaagagaagctgcgaaaatagcccaaggtcgtaaagttgcagcaggtgtaaaagcctttgtcgttcccggttcagaacgggtgaaaaaagaagccgaagccgaaggactagataaaatctttgttgaagctggctttgagtggagagaaccagggtgttccatgtgtttagccatgaaccccgacaaactacaaggaagacagatcagcgcctcatcatctaaccgaaacttcaaaggtagacaaggatcagcatccggtcgcaccctgctaatgagtccggcaatggtagcaactgccgctattaagggtgaagttgctgatgtacgcgaattgctgtagaccgaaattgtcggtaaaaaaactacatcttttttatctcacgcagaggcgcagaggcgcagagagaaattaaaagtgtggtttacatacataaagtttcttaaactcttctttctctgtttcctttgtgtctctgtggttcattcattaaaaaactctagaaacacaagaaaaatctctcttaaactctttccttcgtgtcctttgtgtactttgcggttcattaaaactatggtaagtgaaatcaaacagataagcgatcgcgccgttcctttaattggcgacgacatcgacacagatcgcattatacccgcccgctacttaaaagcaatcacctttgatggtttaggagaaggtgcgtttattgacgatagaacagctttaaatggtcaacatcctttcgatcttccccaataccaaggggcaaagatattaattgttaaccgtaactttggctgtggttcatccagagaacacgcaccccaagcgttagctaaatggggcatcaaagccattattggtgaaagctttgcagaaattttctttggtaactgtgtggcaatgggtataccatgcgttacagccgaaccgagtatagttaagcaattgcaagatttagttactgctaatccccaagcgcctattaccataaatgtggaaaatttgcaagtaaaaattaatgatcttactttcccggtgtttatgggtgagggaactaaaaccgcttttgtgtctggtacttgggatgcttgcggacagttggtagcaaatgcagaaaaggtgaaagcaacagcaggtaaattaccttacattgcttggggtaaattagctgctagttaggtgactggtgactggtgactggtgactggggactggtgactggggactgggtaatcacttttatgttttttaatcagcttccctattccctattccctattccctattccctattccctattccctattcc

SEQ ID NO: 24 - DNA, 68855 bp, Sphaerospermopsis sp. LEGE 00249
  LEGE00249_36
ttaatgaacctgcaacgggttcacggatgccgtcgatgtcaacgggaggagcagcgataaatgcgatgatgaagcaagtggttgctgctaacagggtggggatcattaatacaccgaaccagccgatataaaggcggttgttggtgctggtgataaattcacagaaacgatcccatacgttggcgctttggcgctgttgaatggttgcggtcatgtttttatgattgctctgtttataatatcggcgagttgtttttctcacctctgcacaaatcataaactgtctatttagttttgtaaagagaattaaaattagttttgtttataacttttatagatttttctaatgtagtggcgttgacagaaatgatcatgggacgggcaagatgcctatcccataagattggtagatgattgataggtgaagatcaaccaggaggccatgccataggacgaccgcctaagatgtgtatgtgtaggtgatagacagtttgaccgccatcgttaccagtgttcataaccaagcgataaccgttttctagtcctgcttgggcggcgactgtttggactgttaataatagatgtcctaataatgcttgatcttccggttgggcggtagctatgttaactatgggttttttgggaatgacaaggatgtgaactggtgcttgggggttaacatctgtaaaggctaaagccaaatcatcctcataaacgatgtttgcggggatttcccgacggatgattttaccgaaaatggtatctttggtttcactcatgcggttttacctagtatatctgttagagattttaggggatagttgggtgaggtggcgatcgcttaccgtaggtatcgcttttttgcagagaagggagcatcccaattttgaacaaataaccgcagcaacaccaaaaaatcgctgaaactctcttacctttgtgtccttcgcgccctttgcggttcaatcatatcaacctcttggagaattgtatgtaattagagaaaaataaatttacacatttgggatgctcccgtagagaaaaagttaagctgtaatttattcagtgcatctatagctttattgccaaacctgcggatgtcagcagcaaacgtttaattagtctcgcacccaacaactgggtaaaatgggtaacacaaatcccggatgtagttgctaaagaaatactcaattctgaatttcagtggattagtagagaaagtgatgtacttattcgcgctgagagtcaagaatacggaaaatttctggttcttaatgaactgcaattgcggtataaaccagaaatgcctcgaagaatgcgagcttatgcaggactagctgaggaaaaatatcaattacccacctatcctgtactcattaacattctgaaaacaggtaatgaagaaataccaactcgatatcagtcaaatattgctggtttggaggtgcgtcaagattaccgagtaattaatctttgggaagtagatgttaaaattgccttagaacaacctttaccttctttactgccttttgtaccaattctcaaaggtggtgaagatgaaactataattcgggaagcattgcgtttattaaaagctgatgaacagttaaatcaattagaaacagttctcgctttttttgctacttttgtattagatagtgccttagttcaagaaatcatgaggtgggatatggctgttttacgtgaatcaccttggtatcaggaaatattgaaacaaggggaaaaacaaggtgaagaaaaaggagaacaaaaagggaaaagagaagaaagaatctcaagtattgagttatctttagaagtgaaatttggcaatgaaggattaaagtttatgccgaaaatatcagaaatatcggattttgaaacattaaaaataattcaacgttcaattctcacagttgaaagtttagaggaattaagactgatcatggaaaacttgtaaccattaattactcaaagagtgaattgagaatcaagtaatgcgtaaagaacaataaagataaatattgctcaaatattaccagcttgaaaaattttttgagcagtcaaattcaaatctggaaaagttggtgatattatcttttcatcatttctaaactgcgttacttgatactcaccatcaattaataaatgaatagatatagtaggttgtttaggactacctatataacgaatacctcctaaagctaaataatcaataatccaatattcaggaatgccaatttcttcataatctcgtaatttagttaagtagtcatcacgccaatttgtactgacaacctcaacaattaagggaatagaagcagcttgagttacagttgattgtttttgccacagaggttcattgactaaattagtccggtttaataatagaatatctggaacataacctgattcgctttcaggtggtttgactaatgcttgtttaggaatggaataaggaagattgaatctatcaaattctacagttatttttctagctgtaaaacctatgatatcttcatgtagtcctgttggttgtgacatttccacaattactccattatgcagttcatagcgttctccatctggtttccaatctgcaaattctgcaaaggttactggtttttgtaaaacttgaaccatgatttatataccttaacttcaccgttatgaatgatttaattatacttgatagaaaatgaattgtcccaaatataggactcctatttgatttttgaacaacactcagtaggtatcagttctgtctttcctgttccctgttccctgaccacacaagtaaattcaggaatcaaaccggaagcctatatgatcgctatatcaattaccagcgtctcacatcatctaaccgcagttgcagggagagtaaaagatgcttaacgggtgacgggaaaaatttcccgccaatggtagtatccagtatcgcgctccctttggcgtttatgagttaaacctcaaccgcaataatggtaaaaatagtggttctgttaatgtttctggtagtattatcggcataggaaatagtgtttttcttgctcctcctgttacccaaagctttgcactcatgcaagttccaggggtcaggggtgtgcgtggttatagtaataatcaggaaattggacgtactgattctcagggtaatttaataattactaagctgcgcccttataatgggaataatttgaaaatccaagatgaggatattcctttaaactacaaaattgatgctaatgaaaaagtaattactccaccttttcgaggtggggcgcttgtgccttttcctgtgcgactaattcagagttttgtcggtactttatcggtagaaacatcaggaaaaactgtaattccgtcctatggtcagttaaatatcactgtgaataatcaaattattaactcacctattggtaaggaaggagatttttatttagacagtgttgctccgggaaaatatgcagctaatgtggactatgaaggcggtatttgtaattttgagctaactattccccagtctcaggaacaaatggttaatttaggtaatttaaagtgtatcattccttaaagggtgtttgaaaagtttttaataacatttgtattcggtgatttcactcattgttaatttacctgaaaatctgctttgatataattagggtttattcatatatgaacaatgctggctagagtctggagtgcatctattgttggtatcgacgcggtgaaggtgggtgtggaagtggatgtttctggtggtttaccaggaattgtcattttaggtttaccagattccgccattcaagaatctaaagaaagggtaaaagcaacattgaaaaatgcgggttttgcttttcccatgcgaaagattgtaattaacctcactcccgctgatttaaggaaagaaggaccagcttttgatttaccgattagtgtgggaattttagcagcttctgaacaagtaaaccctgatttattaggggattttttatttttaggtgaagtttctttagatggtagtttgcgtccggttgctggtattttacccattgctgcaactgctgagaaaatgggaatttctggtttaattgttcctatggaaaatactcaagaagctgcggtagtggaaggtttaaatgtttatggatgtagtaatatttctgatgtagttgatttactaaataatccggggaaattcaaacctgttaaattaaatgacaacccaaagacattagcagagacatctttaaatttagcagatttacaagatgtcaaaggacaagctcatgcacgtcgagctttagaaattgctgctgctggaggacataatttaatttttgtcggacctccgggaagtggtaaaacaatgttagcaagacgtttaccaggtattttaccacctttggaattttcggaatctttagaagttactcggattcattctgtagctggtttattaaaaaatcgtggttcattagtacgagaaagaccttttcgcagtcctcatcattctgcatctggtccgtctttagttggtggtggtagttttccccgtcctggtgaaatttctttatctcatcgggggatactttttttagatgaattaacggaatttaaaagagatgttttagagtttttacgacaacctttagaagatggttatgtgacgatttctcgtactcggcaatctgtagtttttccggcacaatttacattagttgcttctacaaatccctgtccctgtggtttttatggtgatacaattcaaccttgtacttgttcacctagacaaagagagcaatattgggcaaaattatcaggaccattgatggatagaattgatttacaagtagctgtaaatcggttaaaaccagaagaaattacccaagctgcaacaacaggagaaccatcaaaatctgtgcgggaaagagtgcaaaaagcaagggatattgcgacaaatcgttttcaatcagaagctaatgttaaatgtaatgcacaaatgcaaagtcgtcatttacaaacctggtgtaaattagatgatgctagtcgtaatttattagaagcagcaattagaaaattagggttatctgcaagagcgagcgatcgcattctcaaagtatcacgcaccattgcagatttagcaggagatgaaaatttaaaacctcagcacgtagcagaagcaattcaatatcgaacaattgatagaatgcaatgattggtgattggtgattgggtaatcaattttatgtttccccattattacctattccctattccccattccccattccccattctcacaaaagtttataatggattgcttgttcaggaggagttagggggatctactaaagatagaaatgtcggtaaaaccgatgatcaattttatttgttttgttttgattacaagttaaacaaagggtttgcaggttactaatatcgttttttcccccacgggataaagggataatatgatcaatactgaggtttgtttctagggaagttttaccacagctttgacattgatatttatctctttgataaacatactgtctcacttctggaggtatgggaatacgtggggttttgttcatattgattgactaaattcttgaaagtctttttctacttgttgggcataattgcgggcatattctataatagagttattataattatgccctgatgtagtttgagcaaattcaattaattcatcagcgatcgcagaaccttgtctaccactacttcgtaattgatcccaagctgtaacttcggccattgtttggattaatttttctaaatgtcctaaatttccatcccaagcttgtaaatggactgtatctttttctggttgcaattcttttaaaacataagatttttcaccatcattgatatgttctaataatgcaggtgcaataccttgaaaacgattttgaattgcaacaactcttgcacctggagtttcccattttggttgcgaaacagtcagataaggttgtaaagaactgggttgagtttctttaaaatctagcaaatagttctcatccggtgaaccattaccttctactagaactatataacgttctaatcctaaactcccattaccagcaatgcgtttttcgacatcgagaatttcataaaaatcaggattttgttctgtggtatgatgccattgtgtaattaagtttttaactttcttttgttctgcatctgtagcttttgcaattcgtttatcatcaactactaaacgtcgcttacctttcttttctttggtgtatttatctaaaaatttagcccgttttctgtgttctaaactgtctaataagtctttaactaaaccttttgcagtttccttttctacagttcttgcttttccatcagcgagatttgcagtgtaggtttttaaataaatctcacttaaatgtaatgcttcttcgtcatttattcccactgcatgagaacccacaataatacttgtgataaatctcactaaatcccaggtacaaggtgcaataactgattcatcaaaatcattaatatcaaaataaactaaacggttatcacctttataacttccgaagttttctaaatgtaaatcaccacatatccagctaagaggtgcattattcaaagatgattcttgaggtaaatcttcatagaataaatgacaagttccccgaaagaaagaaaatggatcagtagagatttttttgtattttaattttaataattctggatctcttccgtggttaaaagtttcaatgcgggttttgatgttgttcataggtggatgttgtttgaatgataatttacaggatttaacgaattaaacctgcatttttaaatatatcataaggtgtaatttgcaaacctgataataattcattactaataatttgctgatttctataagtgacaggtagagaagatgaggtaaagactgtgatagtttgcgaaactgtatctactacccaaactaaagaaattccagcttgtaaataataggtagctttttcaatcatatctccaaaagtttgaccaggagaaataatttcaattactaattctggtatcactggacaaggttcatcttttaaccagtcaataggaagacgctcataagaaacataagttaaatctggtacgggtatccaatcttgtcgatttttggttaatttgacactccattcaattacaacacggcctttttcttgcgcccattttgataataatataaatagcgatcctgtagttgaaccgtgaaaaaatttaggtgacatttgttcatttttatatttaggtatagcttcaccgttaaccaattcatatatagtgtcactttcaggaagtgcggtaaattcttcgagggtgagtttatttttaagttgaatcattttttgtctgaatcaggatgtccaggattaaaggatttacaggatggggttggatgcttagatttggaaattttttgtatgttttataacatggaataattataataaataatatttttaaatttattgtttttaacataaattaattttctcaacataatataatgtcaatatcagtatataatttatatctttttataacatccagaaaatccttaaatcctggacatcctgattcagaccaaaaatatctatggtgaacacagaaaaagccacattcaccacaaacaattatacctctttttataacatccagaaaatcttcaaatcctggatatcctgattcagacaattaaaaaaaatctcaacccagcgattagaaatcgcgtctacacaaacaaagtccacttcggtggactaatttatttatgatgtagcttcgtttattttacgtcgtaaatcatcaaggggtgattcaggttctttaatttctggttcatcaggataaaattctagggtaaatttgactctaaactttccagactcccaatttttaccaggttttaaaactttacaatcaacaccttgctctatccaatcttttttatttttcgtagatggtaaagtacgactatttatcttatctaacttctcatttaattgctttaatccatcattatctaaaatcacttttgatattgcttgatccaattgactgacttttaatatatgtccatcaaaatcaatcacaatatcgccatcttccaaatcaaacacttcaaaattatcttccattttctttcctcctctgcgttttctgcgtctctgcgtgaaaaaaatctaaattgtggtgaacacagaaaaaccctgcattcacccaaaaaattatactacacctcctcacccccaatcacaggtaacagatgttcatataactgcatagcttgtagacaattattaatccccaaaactgctgtattgtattcctgaattttctcctcaacctgatttaacaaacgttgattattagcaattttttcctcagcttcctgttgtaaactcttctctaaataagcacgcgcttggggataaagttgtaaaatctcatcagcttgtttttcccccattggtaacaactgagtcttaatagtttggttgatagtttgacggaaagattgacgaatagtgtaagaaactttcggttcaaaatctaatttcaacaattgtctaattgcaggttgagcttctatcacactttctgcaccataagattgagaagtttgttctaacacttgtcgaaattgataaatcgaaaatgtcccttcattataaaatctaggactttctttcacaaatctatcacattccaccctagcagcagttaccaaagcttgagtaattaatttctctacctctttaacttgtaattcaattcccccatcattacccaacaaacgatacaattgacggtaatattctgattttctaatcttctccattaactgttggaataaattaccaatcacctgttcacaagactcagttaaaatatcctccaactgatttgataaataatagaaagcttccaccaaaatcgctaataaaggtgcggttgcatttctgggatgactcaaagttgcacgacgataagcatcagcgacggaaaaggtatctaataactcatctaaacgacgaatcatttttgattgtaattgtcgaaaatcattttcaaattcctcacaatgattattaatgatttgattgacttcttcattgatatgttgattgaaatatctaccaacctgttggagttgctgatttaatttttgcaactcatattctttcatactttcaatttctcgcggttgactatctaaatctcgttggatagtttgatagtgtttttctagtttgatgcaaatatctcctaagtcatccgcaagatttttaaataactgaggacgtttttcttttgtcaaataccgggtaactgcattgcgaaattcctcaattccgctatcttgaatcaattgtttaattaacggtgttccctgttcatttaaaattctcacatagttttgattaggactttcaaaaccgttaatagaaatgcgaaattgactaggagaaagtttaccagaactcacacaataattattgaaagcataaacaaattgaggtgtttcttctttcccatctaaacctttgacactttctgcaaaaatcgaatctaaaccaaatctatctagttgactggtttgttttaggagacttccataaaaacctaacaaaccactggttttataaactctttgactatcccgaaattgtccattaattaaatcttctaatctttgtcgcagttggttattgtaccaagtttcatcaatgcggttaaaaatataaaaaaccctgtctctaatacctgcattttcccgcatggtttccaaaagttctgtttcttcttttgtcatatctcctgcggatgcaggtttgagaacacagactactgcggatgtatctggatgttgaatttttgcataagttaattgtgcatctttcgctactggtgcatcaattcctggtgtgtcaataataatattaccatcttctaaaagcggatgatgacaataatattcaatccgttttaaaaccgcgctattactacctcgtcttgcatatcccgcagcttctttgaggttagaaaagttaaattgttccattgaataagtagcattattcaaagtattgattctctcccgatttgctacatatccatctaataataaagttaatgctttagctagttttgcacgttctgatttactttctcccccttctttttgaataatcatatcacacccttgatgcaataaatcaattacatcttgtttgttgatattttcaacagtattgaatcccaattgttgacataaaaaaatcgcttgttctctgatttctgcttcactcaaaaaagttaaaactaccctttcttcatttgcagacgcatattcaattttacattctgttcctgttgcgtgtccttctgcactatataataattctctttccaaaagtgcattaattaacattgatttcccagcactaaaagcacctgcaaagacaatttcaaacctgggagaaattgctttatctaaggatatctgcacagatgtgatatcttgagaacgcaaagcaggttcttgatgtagtagttgcagaatcatctcaacttgtgtttgcagttgctgacactggggcgctaaatttgacatggtaagtagtaaataagttttatcagtattgtaatactacttatcgcaacttgggtagatttgacagaaatacaagtattttcaggtgcgtcatactgcaaaaatatgtaaacaatatatatagctgtagacaagtagttaggacatctattgataataaaactctcactacaataaggttttactcctgaatcctttgggttttagcattactaaaaccctacttacgtcctttgatggctatagctataaataagcaaattggttacccggtgatatatgacgcaccctattaatatgctagttgcgtaattcctatcatgtctcaatgacaataaataggacgcactattcggctacaacttgttttagcttttctatttcagatgtagtaggaataatccattgttcaatattcaattcatttaaaatatctttccctttgggattttgattcatttctaaaataactgaagtcaaactttcctgaatttgagttgcttttggcgctaaaacaagctgatgaaaaactgttttttgttcagaagttgctatatatttcaccagactttttgtggtttctcctaattcttcataggtatccttataaacaaaacctaaagatgcgtcattttcctgattagcgacagctttaaccaccgctaaccaactaggtttatcaatcacttctaaaggtttaattccttgactttccaaagcatttaaacctactttcgttgctaacatactcatcacactcagcaatttagcaccttgaaaagatgcaagagaaggattatttaactcattgtgagcaataaaaaccacctcatcatataaattactggaacgagctacagaaataaaattgctgttcaacaaagtaacggaatcacctggattagcataaacgatatcagcatcattcattttttgccgaaattcctgaaaatccattgctaattcaaaatgaactgttgcatgaagattaagacttagatactgtgcaaatctaaaccaacgatctggtttttttgctgtatcatgggggcaaaccattaaagttagtttatccattgttaacttttccttaaattaacaccatcagattgatttttgtgttctcttttctgttgtaatcggtaaattttcttaattgtgattcctgtgacaaaagttcatataaagtatgaaaacgactcaaatgtttacgtaaaattaattcgcttgttgtatttaatttatacaagtttagcaggcattttgcccgcaacacaagacttacagctattttcaggtaaataaaccacattttgatttaggtttcgtgtcaacaatgtaggggtgttcgcgaagcgtgctggaagcatcagcattcggacaattaattatcggtttttacctaagactatcatccgaatgcttcgcccttactgtggtctaaagacatgaaaactgctgtaacaatgtgaggatgataaaatttagctgtataacagctttaggtcaaacctaaagcaccacgagtcacacctaattgattttgtaaaaattgattttgtaactttaatgttttccacagttctgaacctgtgatttctccttggataagttgttgataataatgtatggtttcctgtacttgtgctggtgtttcgttgagaaattcaattctcaaattttgcaaacccaaacctattaatttttgtacgtattctgcccctgtttgagcagcaccattgtatactgtatttctacatcctgcgtctgctttgaggatgtgttcactacctaccctatctctaattttgacctcgtgtttttcgcatggtctaccacagttagtgtagtctgttccttcagaaagaaaagcacaaaaaacgcaatgttccatgtggaacataggaatatgttgatgtattgtcacctccaaaaattgcggtgcataactggtaattaaatctacgagttggttaatatttaaatcgtaggatgcagttaacctttctaaattaaaccgcttaataaaataatctgcggtgagaggattagcaacatttaaggaaaaatccccaatacatctttcccctgcaaaatattctaactggtcgtaatttctaatcaaataaccatctgcttgggaatctttaacctgttttaaaatccaattttctcccggtttagtaatgcggggaggtgctacaaaaatactggggactggggactggtgattggtgactgggtattctttaaagattttgaccgcttctctataattgcgcggatcttcaaattcacagtatattgttttaatatctgctgttaatgctgctttgagttgttgaatatttctgactaaaacaaccaaattatttttacaatcttcatcacaaaacccataactctcttcaaccctctttccttcgtgtccttcgcgttctttgtggttcattcctctggaaattatacttaaattttgattaattaaatccgtccattttgcactatgatttaattgccaaagtttaggtttatttcttaactcctctaattttgctactatttgccgacgcattttatttaactcactcacgggtaacattgcattaccaataatctgattttgcaaacttgctaaatgaaaaggtgtatttcctaaacgtccaaattgttcctttaatttttctgatgttaaaggtttagtatgtgctgactgtaataatatgtctgattcaactttgacaatattaccaagttcatcatcagcaatagctattaatttatctcccacttccccatagacatctatattaataggtttggtaaagttgggatattcaccttcataactttgacgaatttgtttatctaattctgggtcactggttttccaaactttatcaccgatatttattttatgtatgtttaaattatttctcccaaaagttaaaattacttctttacctttgggaataacttcatatattcttcctccttcttctttcgcttctgggtgtccactatcaaacactaccccatcaccaggtttaacaggtgcggaaattttaacggttatttgttcatttttaatgtgagtaacttctcctaaataaacaccgcgttttttaccgaagtttgcatgaaccaattcttgattatttattccctcaaaccaacccgtataaagtccgcgagaaaaggccatttctaaattatattggtcttgacctcttgttcccccttcccttgtagggaagggggttagggggttaggtatttccgctattttatctaatccttttctataaacttgagttacattagcaacatattctgctgtttttaatcgtccttctatttttaaagaagtcaccccagtttttactaattctggtaaaacttctaaacctgctaaatcttgcggactgagtaaatattttctattacctaaatctacaaattttccatctgcaattaaatgatatggcattctacaagcttgagcgcattcacccctatttgcggaacgtcctcctaatgcttcgctggttaaacattgtccagaatatgcgacgcacaaagcaccatgaacgaatatttctaagggtaaaataatatttttttcagatatttgttgttgaattttattgatttctttaattgaacattctcgcgctaaaactaccaattgacatcctaaagatttagcaaattctacccccgcagcactggtaatagtcatctgggttgatgcgtgaatgggaaagtctggggaaagatgacgaattaaacgacaaatacccacatcttgcacaataacagcatcaacaccagcagaaatgatgtttttgaggtattgctctgcttctgtcagttctgaggggaaaattagggtgtttaaggtgatataacctttgactccccgtaggtgtagaaattccattaattcgggtaagtctgcaatggtgaaattatctgctctcattctggcattaaatttctctaaaccaaaataaattgcatctgcaccattttcgactgctgcagttgcacattcccagttacccgcaggtgctaagagttcggggagtttgatttttgtggtggttgtcattttgcgtagtttgattttattgtgaatttattgattatatctaaattggggtatggttgggggtagatgaaaatcctcggcttcttttttaatcatctcaataaattattaatctatttgataattcggggatctggatttatctaagattataaaatttgatgaatactgtcaacgactggttcaatactgcatcaccaaccatcaattcatctataggccagcgatttcctaacccaaaggtaggatctatatctgcttcatgagcaattttatttctacgatacacgatagaatttaatgagaaattaaatcccgaacacgctgaatactaatccgaaattgatcaagtgctgactgcataactcgatgataaggcaataattttatctgctaaattggaaaacgttgttttaaattcttgttgctttctttgattagcttctaatactctaccatactgttttaactgttcagatgttaaagcataaatagatgtagaatgttcttgagatagggcaattagactattgaaattagatatttttgtcatggtcaaattaacattcattccctgttcagcatattaggcaacaacaaattatttatttctagaattggttttaacttatgattaactgtattttcaattttttctatccatatttgaaatgctgtggtttctttacccctaataattctatagttttgaactatagttcctaaaaatttcaatctaaattcaggaaatggataattagcttcctttaatataggattttcacttgcttttcttgcccaggcacaccattttggtaaaattctagctagagaatctatagccataactgaaaagaaatcggcagttgtgggaactaagaaaaaatcgctaatcattaataaattttgattgatagatcctaaactgggactcatatcaattaaaatgtagtcagcgttaaatttactcgcagtctcttctaataaatcataaattgcacctggtaaattttttagtgtttgaattgaaccactaagttcttgggcaattcctaacgttacttcatattcaccaaaacccacatgacctggtaataaaaataatccttcttgtccttgtatgggtatacaatctacagcttcaatagctcttggttgagattcaaaagcaggtgctaaacctgttttaatattagaatgtgtattgtagatattttctattcttgcttcgtcttcttctgtttcttcttttaaagccatccctgtcagattacattgaggatctgtatccacaagtattactctcttgccttttgcagcaagcatccaacctaaattaaaggtagtggtggttttgctaacaccacctttatgattaaataaggcgattttctgaaccattgtaattattttggtaaatgtctcattggaaaatctgtattacttagtatagcctaagtaaattatttctaacttaatacgctcacaacatttgtaataattgaacccgtatctatttctgttattaaactaaatcaaaacactattaaccagcactggttaaactatatcaatactaaaagaaagcctgaaaatcaggtttaatttagcaaataaccaattctggcttgactatatttattcttttaaaaatggctcaggtcggatttgaaccaacgaccccaggcttatgagtcccgtgctctaaccaactgagctactgagccaaacgtttcatcaacattaattaatatagcacactattttggctgtggcaatgaccaaaacaaattttttgccaaattttttcttccatatagccgtagacagagtagttaggacatcaatataataatgaacctcttactacaaaacgtttgtactcctgcctcctgcctcctgcctcctgctatatttccaaaataaaagagggagtcaaactccctccacaaacaagacaattactaaattaaccagcagccaagtatttacaggcgtgcctgtgtccgtgatggcaagaaagcaatggggttaactgcgcccttacctgcggggtgaacttcaaagtggatgtggggacctgtgctaaaaccagtgctacccatcgctgcaatggtttgtccttgttccacttcttgacctacttgcactaaaatccggctgttgtgagcatagcgggtcaagctgccatcagcatggcggatatcaactaacagtccataaccaccgttgttccaacctgctctttctaccctaccggcagacgaggcgtaaattggtgtacccacgccgttagcaatatcaatacctctgtgcattctaccccagcgccagccatagccagaggtaagcacacccttggcaggccaaatatgcgcgttggaagaggaaggctctgtagtttcttcaacagatttgggcagatataaatctactgctgccaaaggtggtaaagctggggatactctggttccgcgcaagttacccaaggagtcactagagttgacaccagcggtaggtacgtttaacctaatgctagaagaactaccagaggagttaccaggtaaagctgtttgccttgatatgaattgggggttaattggctcgttattgggtcgagccgcacttattaagggcttaatcggtggttgactatagcctggttgtatgggcttgggtacagaaattgataccgcattcagttgagcattaactggaaaatttgtttgattattggctttctccaccacaacggggactggtgtattttcagtttcatccacgttagccacagttacaccagacttttgagcgcggtatttttcccttagtctttcaatttcggcttgcaagctgcggatacgctcaggacctttgagctttgctgttttttcaggtagttgttgctctgtttgtgtttctgtcgcaatatccagttgtgaattatcaccccccactgccaaggaattaggagcagtgaattcagtttctggggttggcggcagttgattcccagctacaggtacgggaatggcaaaactgttattgttgctttccactggtgactgtttgactacaggtacgggaatggcaacactgttattgttgctttccactggtgactgtggaatcagaggtagattagcttctggatcaggtttactcagcggagaaacagcaagtttgggattgctgctaggccggatgaaagtaggaatgattgctacagttggctgagtgtaactggtacgctctgctttagctgtgggaataatcagtttttgactgatttgcagctggttgggatcatcgagattattagctttgatgatatcggaaacagaagtcccgtaattatcagcaatctcggctaatgtgtctccgggtttaacttcgtaggttgtcgttgctaattgcgcgacaactgcgggtgcgggtgcaggtgtcaatgctttctgcactggcgcacttgtttgtttatcctgttttaacctggatatcaggtcggcttggtgagcatctatcacctgtgacgactgtactggcaaactgttatcagctacagttgttggttgtgctacgtcaataccagtttctgagaacttattggtctcatcaggccgcaactgggcaagactatttcttaaacggttggatttttcctgtaagcgattgagtgcgaactcttgctgcgcttttagttgtgcattaacatcattgctaactgggtttgctgattctactattacgactggggatagagaatcagcaacaccctgattttgagaaaattgcgattctgtctgggacagtggtttttctgtttgtaaccgagattgaactgagttgttattcaatccctgctctacttggggttgcaagtagatagcatttttgttagcttctgatgtttgaatttgtacagccatttccttggctgcaactggccatttagcttcaagcccaggcatttgcgaaactgctgttggttccccgacaatgacaggattttcaggcacgctcgctgaagggacggcttgggactccagctttgtggccgcaaattttatctcagtgtcagaagcagcaggaattgttgaggctgctttttgactgccaacaggcgcggctgcttgggcttgatcgctttgtcgagtcaccaaaaggctggttgcgcccattgagattgccaagccaatcatcgcggcttgggttcccgcccggcggtttgttttgtgaattgtctcatttgacggctcgatcaggacaccatcgctgttgggagtattgtttaacacagcctttactctctttttcaatgctcgtttcaaagacgacctcctatgatcacgcttcgcttaactgatcttgatttttctgttggatattaatccataatttgagatcacatcaaacgatagatcaagatcacatttaccagagatacttaggcaagattaacctgcttctctgatttagacaagttcacacttgttagtcaaccttaagatttttgcgttgaattgtctgttttcactcctcacaaaacccaggatttttcgctcttgacagttatgcctgatgctcatgctttcaaagcggggactggacaaatctgatagctttgatcacgtccactatcgctgttagcatttgctctgctgcaactttcaaaaaaacgatgttcctgctgtagatattttctaagtttttttatctaatcagtcttatcaacaggagactttacggcttttatttcctaaaaaacaaccgtacaaatccgccgcagtttctgatatggtcgattgtatttcataatacaaatagctaagatgcttgacagtaaatgctttgatgattttacctctgacagagataaaatttcaattcactaaaatctatcattgtctcttggtttggaatcaaagtttctatacaaatttcttatatgactatctttggactcagcaattttttttatctaggttgatttagtatataaatgttgttacatctaaatcttgtctcagcaataatacttaaacagttaagtggagaatttgcttctttcctaactgattcagtctttataagtaaaacctagctaactattgtagataccctaactgtcgtcggcattcaaacaagccaatagccacacttacggatagattcaagctgcgaacgccgggttcgtgcatgggtatgtagagggtagagtgacagacattgagaacatctggcggtaaacctgtggtttcactgccaaacaataaccaatcatcggtttgatactggtagttaatatagttaaaactgccacgaacgctaaaccctaacaatctgcctccacgctgttgatggatgatttggaatgcttctggggattcgtgatagtgcagtttgacgtaaggccagtaatctaaacctgctcttttgaggtagcgatcgctaatttcaaaccctaatggaccgaccaaatgcaattctgtccctgtagcggcacaagtacgggcaatattgcctgtatttggaggaatttgcgggttaactaaaactacctggggcataagacaagtcaaaagttaaaagttaaaagtcaaaatccagtagaaaccaaggaagatactggggtttatgagtatatcagagaaaatataccgaaaaacacatatagacgatatataggttttgttaataggcattaaccactagggacacattagatttttaaaacaaataaggtcaaggaggcaggagaattttagattttagattttagattttagattttagattttagattttagattttagattggagtcaacaaaaacaatccaaaatccaaaatccaaaattgtctccccagtcaccactaggtgacgacagaagaacacaataatttgctttctagttcttgttcccgttcttgggtggcaatgatggcttgtttaatgacttgctgggcatcgacaccaagtttgtgtaactgtaaccattgttgggcttcgttgccttcacggagaattttctgtaagggagacaggaaacaaccgaagccttgttgtttggctatgccccaaacttcttgatatagctggttaatccaatctctggcgagtatggtactaccatcttgccaatgttgcaattgggcatcaagactggatgtggctgctgccatttcatttttagcggttatattaattagttcttcaggtgagaaactgctttgggttaaggggtcaatattggggttgtcaatgatttgcaataaccgcgcttctaataaggctgtaattgctaataagaaaataggatctgtgactaaatcacaaattcgcaattctaagcgatttaaatcataaggacggcgatcgccatttggtctaactgatgtccacaaatgtcggacattttgcattgttctagcttttaactgtgcttccacccattgaatatgatggtcatgactggcaaatagaggtacatgactgggagtttgggggaagagtccccaacgggtagaatgataacctgtggctttaccatctaaaaatggtgatgaggcgcttagggcaaggaaaagtggcgcttctatacggataatccgacaggcacgcattaatatttctggatcgggaatgccaatattaatatgtacgctggcggtgacaacttttgtcccgtaggtttgctcaatgtagtcatgataagggttagtgaggtcagaacggtaaaagcgatcgcttcttcccaaggacagggtactccctggtatcaatgtgtaattgtttaaccgctgcaaatatttccgtaactgctgacgtgggcgcaataaaccacacaattgattttcgtaactggtggaagctttagtgatgtattctacgttgcggctatctggctctcgcataaatccctgtaaatccgcaacaatttggtcggagagaccaactatttcaccttgaggtgtgccagtatacatctcaatttcaaagcctttcgttaagaccactttattttgctccttggctctcctaattttgataaattgtatcaaatttaacgattttttgcatctggggattggggattggggattggggattggtgattggtgattggtgattgggtagtaatttataattacgaattacttattacctattacccaattatgaattactcattatttttgctcttgcagaattgattgttgcatcagataaatcacataatgctgctaaggaaattctgccttcatttaataaggaagttaccctagttgatgctgcttctgatatgcgcttaccgctacgaatttgaattttaaatttgtcagctataccatcgaaaatcaccaaaagagatatatttttccaaataatttgtgtaggttgaatcaccttaaaagcagtgactatttttcctgcttctggtacatgaaatgttaatcctgagttttgaataatctgctgtattctttccaaaggtaaaatagagatatcaatatttatatgttctattttcaccaagttggctaaatcaggtaatttcatagagacatcattatttaaatcttcgtttttacaggtaagtttaccttctaaaaaatcggtaactgcataaatttccactgtataagccggcagtggtactgtacctttttcataaaataattgtccttctggggtaacggtaataggtgatttcaatgccaaagtttgtaatgattgaagtgtggaaattgtactgtgaacaaatacaggatcaagtcccaggatagatgctaattcatctcctgttggtgggggttcaaattccagtccagcacggatgataaactcttccatgacattaaatggacgtggttctttaactgttaattctaaggtatttttacgcaaactatagcgaaattgacgggctgcaaaaactgataattggggattttctgtttcaatttcggtaactatatttttgagatgcggatcaatatttctatcaacagaaccaggaaacatcaataaaacctccatgacgagtggcgagatttgctacttctgaatacattcgaccaactttaccagagttgctggtaaataaatcgtgacaaccaacaattactaataattcttgagcgcgagaaaaagcgacgtttaccctttctggttttttagcaaatcccacatctcctaaaggattattccgcaccatactcacaattacaactggtctttccataccttgaaatctatcaactgtacctgttctaatgtgcaaggatggaaaaagttccggttgtaaacgttcatctatttttcgcagttgagcgccataaaatgtaataactgctatttcttttttaggttcaccattagcaactctagaacgccaagcattttcaaaatcttgacagattttttcaatgacatctacttcttggggattaaaaaatgatgttcctaatttttcttctgcaaattcatcttctctaggcgttgtcacccacagtaaatgatgttctggtttaatgatttcacctgctaaattatgggcgcgtttgctatctggttctaaaatgccacattctaatttaccatcataaaactgattgattgctcccataatattggggtgcattcgatattgggtattgagcatttgtttaatgctattatcggcattttcaaactgaaatttaaataaggattcttcgagaaatcccatttcttctctagaatgtcccattgtttctgcgacttcttctattgtgtcaatttctagcattggtggtagttgtcggtgatctcctaccatgactaattttttggctttcaatgcggggataactaattctggaggtgtacatttacttacttcatcaataatgacaacatcaaaatatttaaattcttccgagaagttgtaatttgcagcttgcacgcaggtgataccaacgacgttagcgttatctaaataaatttgtcttaaatcgttactatctctttctgaaggttgacgtagtttggtaatccaatcttggacaaagttttgatatttccgcaaataatcttcttcattttgtagttgttgttgccaaagatcaaattgttgttttatctgctgcaaaaattccaaattcaagaaatctgtttctgtggttttgggctgaggtttaaattgatcaggtatttgttgccaagtcatctcgcagcaatttttttctatgattaaatcattggagatatgggattttaatttttcttctatttcatttaatttaatttttgctttttcaagtttttgtaaagagtttttgctggttttatttatttttactagttcctcttttaaagattcttgaatattctcgaatactgagaaagcatctaaggaggaatttaaatcatccagatgagttatgcaagtttcccaaagctgcacttgtttctcaaattcctgatgctgttcccaaatatttgcttgttttgctaaatattgttgtgtgagatttcgtaattttacaggtagctgtggttgtttattcagctgttccaaaatttttacaactctttccagcagtaaattagcatcttgactggctttttctacctgagtttgagttgctaatatttgttcttgggtaatttgattatttggaggttgatttaactgttgttgtttgtgcaaattattaagttgtttctctgcttctgtttttaatttgagaacacattgacgagcattagcaagaattgtatctaataattcttgggtaattctagttaaagtagaatccaggttatttaattcataagatgcactgtaggtttgttgcagttgaattaaaaaactctgggcattttcaactaataattgacgttgttttgtagtgagtaattgatacttttgaaactgttgatatgttgcttgccatttttggcgatcgctcttttccaagaataagagaatttgactaaaattttgctgcataaaatagctaaaattatgctttttaccccttctgtcactaaaattaccatcaatttcataagacaatgctttgattagtaattcccattctggtaatttaatttggtaattatttggtaagattggcaagtttaagtttttagcaaacatcaataaacccagtggtaaatgcagcatttcttcagtcaataataaatcagattgctggcaatttttcaaaacttggtaaaggtgggaatatgctgtagttttccactctttaactgctgcgataatataatcaatttctcgtttacggttttcccaattttgaatagttggttgtagcttttgatcctgattaatagacttttgatactctgtttgtaactgatgtaaataggctgattttttttggaaaccctgtactaattttgctaagtctgacatagcgatagttgcatcataagcataggtgaatgttgattgaaatccggcaatttccttggctatagtttcccgcaaccagacagctaaaccgaatgcaccacgcacaggacaaataacccccagttcatcggtatacttaatagcttgattgactttttcccgaaaatctcctactagattattttctaatgtataaggttgtaaacggggtaaaaaatctttaatttctggatcatcccaattgatattttgtggtttattgataatatctttcaccccattaattaaagattcaatttcatttttatgctcaagcaattcatgatatacagtttcttgagttctgtaaacattctctaactttatcttttcatcttttaatttcttttgtttatgattgactttttccactaattttaagtaatctgtaaatcttttcgatgttgttaatagctgctgaagaatttgtatattttctctgtgttgattgagattattttcacagtcattagcagtattttctaaccatctgttaattacttggtcttctaaaaatccttgtccttcttctccaactttttcagcttttccttttctgacagcgcggataactgggttgtgaactaagcgacttaaagcattatcaactgctaaattagcttgggaagtaattaatgtgcgaccaccacgcaaagctatttgatagcaaatttcggcaattacagtcgttttacctgttcctggtggaccttgaatcaaaactaaatcttctgcggccattaccttttctacagatgctttttgacctgaatttgcagcagataataacaaatcttgtggttttagtttaacagttttttgaataggtctggcttgggaagcgtcaaataagaaatctcctaaatatgggttttgtgtccgtccttgttttaattgttctaatgctttttctttacgcttaatttgtttaatatcaccagcagcatcaaaaaataagtatccttttgttggtatttgataattttccgatgctatatattctactaattcccgctcaagtctgatgtgaataagattatttctgtggtcaattttttcaatatttcctaattgacgactagtgcgacgagttatttcagtaggtacagaatcagaaaatttgatatcttgattttttgcctgttttacccgttcccaaaagttttctacatctaaataattctcttcatcaccatcaagggtagctgagttaatatcaatttttaaggcgatttctttttgttggcagtcatattcggagtggaaaaatttgacacaaaattgtctggctttagcaatacgttcttcaattttcaaaaaagctttccatgcttgtagttggtcttcggtgggtatatgattaccgcatattggcattttatttatttgtgccaatctcttgggagaaatatttataggctcataataattaggaactaactgcaatggtaatggtaaagcataagcgtcaattcttcctcttgatagtggtaataaataaactgagagaatttttaaaccaccagtaccattttttttcactgcggctctcaatcctaaagttttatttagttctttcaatcttttgggtagttgaaactcactgtcatctgtagcaatggttaaatcccaaatttcttctcctgtatcttttcccttaccttgacggcgaagataaaataggcaagtttttttacctatacattcaaaaatcaattcatgagcgcgttcttttttttctcgaaagttggaatatgatgtaactgcttgttgtccttcaaagctacgaattaagttatcaattgtggaatttaataagctatagccaaaggtttctgaattgtttatttttactaatttctgttgcatggatgtcctgattgtttttgatttcacaccaagaggaataaggttagatatagttttaaagatgaaactggtgataaacctgactggcggctcgatgtaataaagaatgtctccaaacaagagatttcatatcatctgcataaccaccgccaataacacaagctactggataaccagcgctaacgcaggtggttaaaacctgcatttctcgtcgaaaaactccagtgtcggtgagagataattttcctagtttatcatctatatgggtgtcaactccagcgtcatacaatactatatctggcttgatttctgttagcaagtctggtaagtaattagctaaggtttgtaaataagcatcgtcttccattcctagtggtaatggtacatctaaatcacttgtttgtttggtgctagggaagttaatttcgcagtgcatggaaaatgtaaaaacgctgtgatcattttcaaatataaacgctgttccatctccttgatgtacgtctaagtcaacaattaaaatctttttagcaagtcctaatttttgtaaaacgcgagtagcaattgctaaatcattaaaaatacaaaaaccagatccataattaggaaaagcgtgatgtgttccaccagcagtattacaagctaaaccttgatttaatgctaatttagccgttaatattgttccaccgactgctacacaggtacgatttgctaaagctggactccaaggtaaaccaatgcgcctttgtgcttttgcttctaatgttccttcgcagtaagcttgtacataacttttggtgtggactaattctattaattcttgcggtggacattcaggagtgtgaaactgttctggatatgctaccctgtcagctaacagcaattcatgcagttgtctaaatttcgacatggggaagcgatgtccaagcggcagaggtgcaatataatcttgatggtaaataattggtagatccattacttaggtgaagtacaccaataaattttgaggttaactactactgatactgaggattaagtctccaaaatcagtctccagctagattgtcatcagaaaacaattaatttatttatgtttttcaagtaataaaagtcaccttttttcaggtagaaatcggattttagtaaacatatcatcaattatttatcattaatgtatcacatatttttgctcggatgatcattatacatcaatttctctggaaaaacttagcgagtttaatttgctaattgttgatatcctaattttcaggtcagcattcagcttttcgcttctagctatattcctgagttaacgatcattctcaatcttgactcttgtaattttcatttgtcaattcactatcaaatataactatgatgcaatggattatacctcttctatttattctagttggctttctggctggcataattggcgaaaaagttatttttaatagaattaaaagctttgttattaagcggcaaattcccgggagtgagattatatttcaatcactgcacagaatgacctttatttggtttgttttggcaggttttttttgggctattcttagttctcctgttaaaccaggtattgctaatgttctgcagaaaatcattaccataattttattatattctgtaactttagttttagctagactgactgccggttttgttaatttatttgtccaacgtaccgagggagtttctacatccctgctttccaatttagctaaaacaattgttttagttttgggaacattaattcttttgcaaactgtgggtattgaaattactcccatagttaccaccttgggaattggaggtttagctgttggtttagctctccaagacaccttagctaatttattttctggtttttatttagttatttctaagcaggtaagagcaggggattatgttaaattagatgatggtcatcaaggttatgtcacagatattacttggcgaaataccacaatcaaggaaatttctaataatgtgattattgttcctaattctaagttggcttcggcaatttttactaattatcatctacctgcaaaagaaattactttaactatgaatgtgggtgttagttatgatagcgatttggaattagtggaaaaagtgactatagaagtcgctaaagaagtgatgcaggaaattgcaccagaattaattcagattgaaccttatctaaggtttcacactttcaatgattttagcatagattataccctttatatgcgagtcagtgaatattttgaccagcgcattggtaaacatttgttggtgaagaagttacacaaacgctatcaacaagaaggtattgaaattccttttccaattagagaagtttatatgcgtatcgtttaatttaatttaattacgtataattttgtagagttttagcattgctaaatccgaaaaagatgccattttcatcagatttagtttatacagttagatagagggaacagggtaaaactctattttgtaaagtgatttaaaattttctagcaaaaaacgagaaatagatcatatagtaatgtaactctcaactcggttatgaaagttacagttaatcatagttaaacctgtatgtatacagttagcattgaaactcaagttcatgccttgcgtccgggcgatcgcctgagatattctggtgtagactgggatataaaagattacagcacctaccaagatcctcaaggttatcaaacagaggaatggttgttagtctcctccggtggttcggaatattacttattgcgagaatatgaccccagcgaagaaattaactctgtaacttggtatatttccaatcaattacagaatgtgtctttatatactccagattttcccaaaaacccactacaactaactacattatggaaagaaatgcaagcattaaataccccttatccagaactaaaacttttctataaatcctattatttcgattcacaaactgaaggaagttatgattctgaagggaaaacaaaatctcgcattacttgggattattgggataaagaccattgtgtaaatttagcaatagaagcttttcccaatctacaattagatatttactcaaccaaaatagtcaagcctgaagaatttcataatattcaaaaaggtgtaggttcggaacgccagctattgaggtggaaacctgaattaattattgaattaataattgcgctcatatttttgtccatcggtatatttttaatgatatttgggtaaagtgtttatgtctatttccttatttattgaaaactatgatcatggtattgccttttatatcaatggagatttgcaatttgatagtgcggatgaggcaatttatcatgaaaatttagtaattcctgctctatctttagctatccaaagatttcctgacacagctttacgggttttgatttgtggtggtggtgatggattagctgctagggatgtactacgttttgctcaggtaaaaaacattgatttagtagactataatccagatgttatcgaattagcaaacacagtatttaaaccttataatttaggcagtttagaacatgaaaaagttacagtatacactcaagaagcctttggatttgtcagagaattagttgataattattatcatgttgtaatttgtgatttcacttgtcctaaatcggctgaagatgcaaaaatctatagtcaggaatggtttcaagaagttaatcgcattttaattccttctggaatagtagctgttaacggagtttcaccaaattatgatactcacgctttttggtgtttgtatcaaactttgctatcagtgaattttgcaactaaacccttacaaattcaaattccctcattttctaaccatgattatggtgattggggtttctttttaggttcaacacaaagaattttgaggacagaaattgaaaacattgatttcccaaataatttaaattatttaaaccgtgaaaatttactccctgtctttaaatttgaacaaaaaatagcagcatatcggcatcaagtaactatcgacacactggaaaacgaacggttattttattatcttttgaattatctatcaaacccagaagatatcctattaaattctggtgaatatgtggattttttagatattaatgaacagttcaacgccgaaatagaaaatattaattccttagatttggaatctgtagctaagttttggctagaaaatatttatgctgctcctaatgcagacaaagacttaccaaatattaatcaatttgtaccagtacgtcatccctatcacgaacccaagatgacaacatattggttagataatctccaaggattattatcagaaatagacgttaacaaattactcaatagtttactaactagagtgcaggaattaccaccacaaattgctagtgaattgaggacttttgctgataaaattaaatataatcagcctttaggcacgttaaaccctaaaatggttgaattgattactttgttgtctataacgttgttaatgactaatctagtagcaccagattcagtatttgctaaaggctcatattatggtagtcgtagcagtagcagtagttataacgatggtactggtgatagtaaatgggtaggttttatatttacttgctttagtagttactggatatatagcattattaagagaatgcgaaataattaaagatgaatattatgaatgttgataattatcacccaaccatagcagagaaaaataacttatctttaacagtcagagaattacaagcttcagaaaaaacagcttggaatttgttagttaaatctactcccaagggttgctttatgcaaactacaagttgggctgattttaaagaaatagaaggttataaaacttttcgttatggattattttcagaaaataatgatttagtgggtgggtgtatttattatttatacccccacactaataaagccaatttattatttacttctggtggaccaatattaccagaaaatacttcagaaatagggatgcagttattgttagagaaaggagaaactttagccagaaaacagggtgcagttgctcttcgtattgaaccattatggcaggaaaaacctgattatcttcaagattttgttcgcgcacctgctgacttattaccctgtgaaactttattaattgatttaagcccacgtacagatgaaattctagcatctatgaaacctaaagggcgttacaatattcgtcttagtcaacgttatggggtaaaaattgaatttagtaatgattcccaaactattcctttattttataatttattttgggaaactgtcgaacgtcaagaattttttggtgaaccctacagcttttttatcaatctctgtcaaacgttatttaaagaaaatatggcagaaattggtttagctagttggaatggagaaatattagctgctattttagtagtatattgtggtcgtacagcaacttatttatatggtggcagtaacttattacataaagaagtaatggcaaattatggcttacattggcaagctatccaaagggcaaaaaatcgcggttgccaagtttatgatttctatggttttacccatgacactaatcatggttatgccaaattttcccagtttaaaagtcaatttggaggtaaacctattaaaacaattggcgctcatgattactttttttatgaccaattagcagatacattaattagtttattgcaaaagctttcagggggttacaatgaatgaaattattagcaattttttcactcaagctggtattattattatagaattagtagtaggatttggcttattttggacaggacaattagcttatcaaaagttatttcgtccccgcttagaattaaatttagaattgtttgtaaaagataatcctgcggtagctattgctttagtaggttactattttgggattgtgattgctttgggtggtgttttaggagaaactgcaattaattggcaagataaagcgattaatttagctacctatggtgcaacagcaattatttttatgttagctggtgcatgggtaggagataaattcattttacttcaatttaattgtgaacgggaaattattcaagatagaaatttaggtgctgctaatgtggaggcaggaaatcacattgctaatggtttaattttaaattcggctctagctggtaaaaatggtagttggtgggtatctttggtatgttggttaataggtttagtgacactgattttagtcagttctctttatccccgtgtgactaaatataatgtatttgcggaaatagaaaaacgcaataaccccgccgctggtgtagctttagcagggttattaattgccactggtaatatagttagagtggctttttatccagagtttacaaattggtttgtgagttttactcaatatggtttaattttagtattttgcttgctttctttaattggtattcgttggttagcagatttaattttagtgcctggtgtgaaaatttctgatgaaattgtgaatcaagaaatacctaatatgggtgcgggtttaatagaatcttttgcttatattgctgcgtcttttttaatcgcttggtgtttttaaaaataggtaattggtaataaccctctttccttcgtgtcttcgtggtttattattctgtgacttgtgggtaagtcctaagttttaatctaaattattttagccactaacagataaataatgccaattattaagatattcacaactactaaattcttgtgtgattatctgtgttaaaaattgcgctttttgtaaattatccttttgataatcacagatatgaatatcaatagtaactttactttcctctggccaaaagtgtaacgctatatgagattcagctaataaaatcactgctgatactccttggggttgaaatgcaaaactcacttcaccgatgacagttaattcagcagtatcagcagcatttttcaacacttctataaaatctgttttctgccaattaaatgctgttttatttactggtaagatggcagaaaaatggtgtgacttaatcacttttacctcactgtcacctgtcaccttttctaacaggtttaactgtatatttggaagcaaagtcagcagtttcacctgcacttaccatagacctatataacaaggcactaacttcggctctggtagcttgcttgtcaccgtttaataattttacattgggatagttgacaattacgccattttccgtcattgcggcgataaattcgcggtgttcgcttctgatagtggaagcatcattataaatagacaaaatatcttttgtagaaccgctaaatttataattcaatcctttagctaaggtgattaaaacatcgagacgtttcagtttttgtgtggggttaaagtttctgctgttaacaactgtgaaaaagcccatttcgtaagtttcgcggatggcatcatacgcccaataatttttaggaacatctcgaaaatttatggctttacgcactttacttttaataaatgtcttttgcaagagggctgctagttgggcgcgagtaactggggcgttagggcgaaatgtaccatcaggatagccatcaatgatttccattgctgccaattcggcgatataatctttagcccagtaatctttgggaatatcagaaaagttgactcgaataccttgagctacacccactgagcgatatttacccaataactcgtgaagttgaaatgtggagtggttaccgagttgggttaactttaccaaactgccaggaatagataatagggctggtgctaatttaggatcatagacggtaatggttttacctgctaaggcaaactcgccttcactaaaggttgcaggataaacgcttgtttgagcaacgttagcaaaacccgctgcttggtatggagtaatgtcgatattttcggaactggtgaggaaggtaactttttggtttttgagttctgtgaagtagtcgtagttgatagctgcatctctgtcaacgatgccatcttcgttattatcaacaccataaaaaacgcgaactacgagattttcgcttggtttggctggtaaaatcagatttactgctgtatgatcaggtaaacaagcaaattctgtgtagccaataaaacggtttttagtgtcatacaatcggacaacaatgcgatcgcccaatttaaaaccgttcacaaatttggctttctgcttaattttatatttgtaatcgcctaaaaatctttctttgagatatttatcaccatatttccctttaatagatatccgggcaattacttctgatattttaccacctggttgccagatatataaagtaaatcctgacttttctctcctggcagaagcagtaggagttgatgtttcttctgcttgagtagtttcttgtgctaaaagctgctgctgagcattgattgttgatgggattgtaacagatacagcagatagttgagatgcagccaaggtagaatgtattggcgacaaggctatgagagaaactgacgctatcaggactttcctaaaattagttaatctacttaaaatcatagtattttatttgatattaaatcactacgcaagtaaaatctagtagtgattttgatgctacgtgaaagttacaggtgctagtgtacatcttatgtagttttttcgctcatgttttgtctagaatgccaggaggattagcataaagaaacaatactttaggaatcttaacgaatgacgattacaacccagaatttacaaaccatagaaaaacaagtttggacttggcaagattataaaattcaatatactgtgatgggtacaggtcaacccttggtactcattcacggttttggtgcttctataggacactggcgcaaaaatatagctgttttagccaatgctggttatcgggtgtttgctttagacttactaggttttggtggttcggacaaagcgaccgtgaattatagcatggaagtgtgggtagaactgttaaaagatttttatgatgcacacattcaaacaccggctatatttataggaaattccattggcgcactgttgagtttaataattctcacagaacatcctgaaattgctgctgggggagtattaataaattctgctggtggtttgagtcatcgtccccatgaattaaacccggttttaagggttttcatggctacgtttaacaagttggtagctaacccagtcacaggaaaattcgtttttaaccgcattcgccaaaaatcacaaattcgccgcacattgtatcaagtatattgcgatcgcaatgctgtaacagatgaacttgttgatttactttatacaccatcttgcgatccaggagcgcaacaagtttttgcttccattctcaccgcacctccaggacctgctcccgaagaactattaccgcagttaaaatggcgtttattagtaatttggggtgctaatgatccttggactccaattaccggcgctaaaatttacgaagaggcgggtaacaatggtaaagatattcaaattgtgcctattcctaacgccggtcattgtccccatgatgaagtaccagatattgtcaacactgcaattattgactggttagcacagaaaaactggaagtccgtagggtaaaacatcaaaaccatctggaattggtaatgggtaatgggtaatttgtgaagcacgtagattaccttttactcattcctatgtcaactgaggacaatttttgaaaatgtattttatgattttgttttgtcaaaacaaaactggtgtgtattttatgatagagtttaatgtaaatcatggatacaaaaagacaaaattctgcaaaaattatccagatttttccgcatttggctatcaagtaattcgagaattaggcagaaactcagaaggaggacgcattacttatttagctaatcatatcaactctcaaaaacaagtagtaattaaggaattttgttttgcaaatacaactgctgactggtatggagtgaaagcttatgaaagggaaatgcagtttttacaaagattaaatcatccccgcattcctcgttatataaattcttttgaaacaccaggatgtttctatttagtccaagaatataaaaatgctccatcattaggtttgagccgctgctttcatccccaagaaataaaggaaattgctttatcaattttagatattttagtttatctacaagaacaaaaacctaaaattattcatcgagatatcaagccagataatattttattagaccagcaattacaagcttatttagtagattttggtttagcaaagacacaggataaaagagcagttttgagtacattggttgctggtactccggggtttattcccccagaagcagaatttggatatcctttaacagcagcagctgatttatatagtttaggtgtaacattaatttgcttgttgacaaatattcggtctgcggatattggtaaattaatggatgataaatgtcgctttaattttcaggaattacttcctgatatcagtccaagtttttgttcatggttaaagaaaatggttgcaccaaatcgtaaatatcgttatgctaatgctgcggatgctttagcagcactaatacctattccggtgatgggttctggtacaatatcagatcagatattagatattttttggatcgcaataaatcaacaaaaaattatagctatgctaggtttaagtgtgacgggaattttattaggtttaggttcaaatttgatgatttctcaactaggtgatgctgtaaattctaatgtcgatttaaagccgaatttaatagaagtgaatagtagtaaaaatactaattactcagtcaagtaatttacaatctataatcgtttatttattacaaaaaaacatgggtaaaagttattgactgattctcaaccaagcaattaatagcttatgaatgaatcttttgtaattgttctaggttcctgaaaatattactcttaaaatattacttgccttgcgttgaaattcaagttctgaaataatatacccatgatcaagaagtaaaacaggcttctagtctgttgacgggcaattgcgatgcactgagcttgtcgaagtgtcaaatattaaccctttcctagccatcgtttgcgccattttgaagttgtttctaagggactcgtttcttgttcttgtcgccttctgcttaatattaactcaccagtatcacttaaagaaggatctcgataaggaatagcagcacgagtttgtaaatgttctttttcggctactgaaaggggataaatccctgtaatgcgatgcactgagcttgtcgaagtgtcatttaccccatcgggatatgctccaatagtaccaggagtgcgtcttcctacaggtgcggtagaacctattaccaacttagccgctaaaagtgcagtgcgtacagcagcagcacaggaataagtcgctaataacccatctctgtgtaaacactgcgttaatttttgtataaattccacagtccataattggggacaatggggtggtgaaaagggatcaagaaaaatagcatctgctaaaaaacctgatttacctacttcttgaattaattttctagcatcacctatcagtaatttggcttgtaagcgatttgtttgacaatagtgcttaaatgccagttcgtttaaaatagttctatactcatcatcccaatcattaaatatatcctggctcatcgctgctttgggaacttcaggatttatttctaaaccaataacttccactatacaagtaggattttcttgccaaattacttccaaagcagccgctgtattgtatcctagtccataacaaacatctaaaatttttactattcccttcttggctactttctgtacttgagtgggaactgcaaattttagatagctctcttgttttgctccataattactatgaaaagcttcattaaattctggagagaaaaaagtaaaagaaccatcttttgtcaattgaagtgtaaaattatttgtatctgacatttttctcgttacctcatttcaatattcatcattcagcagttaggatactgggtgagcgaaaataaccttccttctgtcacctgttacctgtcacctgtcacctatgattaatcatcaatttgttgtttctcccgaatggctatttacccatcttaatgattcccaagtagtcattattgattgtcgcttttctttggctgatccacaattaggacaaaaccaatatcaaacaagtcatattccaggagcttactatttagatttaaatcaggatttatctagccctgtcgctgaacatgggggaagacatcctttacctaaccccaatgatttagcagataaattagcaaaaattggggtaatataccaaaaaactttagtagtcgcttacgatgattcacgtttggcttttgcatctcgtttgtggtggttattgcgttacttaggacatgaacaagtagctgttttagatggtggttttgctggttggcaaatggttcggcttcgctcaccacaagaagctggttatcctgttacagatgtaattccagcacctaaaatgggaacttttacccctcatttaaatgaagaaaaagttgtagactatacttatgttaaaaatttcaaagatagtccagatgtagttttggtagattcaagagatggcgatcgctatcgtggagaacgagaaccaaccgataaaatagctggtcatattcccggtgctgtaaactatccttggcaagcagtcaccgccgcttccggtttcttacttccccaatcagaacaacgtcaacgatgggaaaaaatagcacctactaaagaaattttagtttattgtggttctggtgtaaccgcctgtgtcaatttactttctttagaactagctggaatttccacagctaaactttatgcaggtagttggagtgattggattagttattagaaatagagaatagggaatagggaatagggaataggtgattggggactggacactaaagaactagctagaaaaatcaatcgctctaataacaacgccaataataactccaacaatcgctctaacaatagagaatctgagcgcgaacaaagatttatcaaccgtcctaccagagataatttaggaagagaatcaatcaggaataatcctttgggatcaatagattattttgtcaaaacaggagaagtcatccgcgaaaatagacagaatacttcgactccgcacttcgactccgctcagtgcaagctcagtacaagtaacaatcctggcaataaccctggcaataaccccggtaacaattaagttttgagtgaataatggatcaggagttttaatttgacttcattcatctatcttcatggctttgcttccagtcctaaatcaaccaaagcacaggatttgagtgatcgctttacccaaattcagatcaagttaaaaattcccgatttaaatgctggtgatttttcccatctcaccattacccgtcaattacatcaggttaaattttatggtgagcgacctgtactgagcggagccgaagtaagccgaaccgctgaatttcctgatccatccatacctataacgctgattggttctagtttaggtggtttaacatctgctcatttggcagaacaaaacccacaagtgcaacgcttagtgttactagcaccagcttttggatttttatcccattggttgccctctttaggagcagaaaaaatcaaacgttggcatcaagaacaatattgcttcgtttatcactatggggaaggaagagaattacctttaagttataatttcgtcacagatgctgccaaataccaggaaaacttgttacaacgtcccattcctaccctgattttacatggcaaacaagatgaagttattcctattcaagctagtcgagattttgcgcgatcgcgtccttgggtagaattaatagaattggatagcgatcacaccttggcaaatgtaactgataagatttggcaagccattcgctcattctgcaaactggggaatggtgactggtaactggcaactggtaactggtgactggtgactggtgactggtgactggtgactggggagaataatatattagggtttgctgaataaatataaaaccacgataaatcaagggattcaggtgtaaaaaaggtgaaaaagctgcaaggaatagacactaaaaccatcaaaaactgatcacttttatttccaaatcagtcattcttggctacttctaattctccctcctgactccttgccctcacgataagactttttcagcaaaccctacattacttcttgcctcctgaactcctgactcctgcctcctgcctcctgaactcctgaacttcctgccttctgttccctgttaatagttccctaacaactaacaaatgatgcttccatttattcgttctgatttaaaccaattttctgcttacaaaccccaccccagcagcaatacaagcgaaccggcagcaacgcaatttgatcggctggatactaatgaaagtccctatgatttgccatcagagatcaaagaaaaattagcttggacttttcaacaagtcattgaaagcaatcgttatcctgatggtggacatgaggcgctcaaagaagcgatcgccgaatatgtcaatgagtcagctaacctttcatcctccactttcaccgctgctcatatttctgtaggtaatggttccgatgaactcatacgttctttattaatcgccacttgtttggggggagaaggttctgttttagttgctaaccccactttttccatgtatgctattttggcgcaaactctaggtattcctgtggtgagtgtgggtagaaatgaaagcaattttgaaatagatttgaaagcggcacaatcagcactggaagaaactcaaaatcctccaattcgagtggttttcgttgttcatcccaattctcccacagctaatagtttgactgcggcagaagtaacatggttaaaaagtttaccagaggaaattttggtagtgattgatgaagcttactttgaatttagccaaactaccttagttggggaattagcacagcatccaaactgggtagtgttgcggactttttccaaagctttccggttagcagctatgcgagtaggctattgtgtaggtcatcccgatgcgatcgctattttagaaaaagtccgtcttccttacaatctacccagtttttcccttgcttccgctttagtagctgtacaaaatcgtcaacttttgctaagttccattccccaaactctgagtgaacgcagtaaactgatcatggctttatccccacacccagcattagaaattacagatagtgacactaactttatttacctgcgtctgaaaccgaagacttctcaaccagtcaatgaagctttaaaaatgatcaatcaaacactcacaaataaaggcactttgatcagatcactgcctgggggattacgaattactctaggaacaccagaagaaaactctcgtaccttgacgcgattaaaaacagctttagccaagcttgaatattaactatattcactattaataatcaaaacattcgtcgtctaaatcattgccaagacgacgcaatattgtcactgtttgcggcaacacacccactaacatagcaaaggcagcatctggcaaatcagcaaccatttctgctggaaaatactgtgcaaattgttccagaattttctgtactctctgtacaggaactggattttctgtaatttgtttgattaagcgaatccattgtcttctaatcaagtaagccttctgaagctcttcatgagattcaggagctaataaggagagattacctataggtatgacaaactgacaatccctgtcataatccccacctacaactgctccaggacccgcaaattctgcatgatagcgtttcccaactattaacccgttgcgcttacgactattaactatcaaaaattttccgctatgtaatgacgcaagaatatcagtgctatgcgatcgctcactaccatctcgcatggtaggtttgtccaggaaactagtttcagagcaataagttgataccatagcagcttgatagcgttggcgttgttcgctatccatgtttttcaaatttttaatgaaattgacggtaatagaagaagcattcctattttgcacaggcacagaaatactataatatagtatattatcaaaaaagtaaatcccacctatgtcggttgaaattagccagtgctttgcggatattcccccagttgtaacagctactatctaaaattatcatttaaagacattctaaacatttgccatgccctgggaatatggacttaaaaacgtcaattgagtaactgtttaattacatcaaagattatgtttgtatcattaaaaactgtttaccaaccctaaataaatagacgacaacaaaattcagtagtgttcaaaaattaataattatattacacatctccaaaatagaatgtattaatttgtcataagttgtaggggcgaagcttatgggcgataatttaacggaaaaatcagacatctagatatcccataacttcttttctggagatgtctattttatgggattgaggcagatttgtctttaactccagcaattttttcttaaagtttttataagcacaagtgtcgaatattaaagaaacttaactagggtttgctgaataaaccaaaaagcctcataaatcaaaggtttgaggctcataaaaaagacggtaggtgctttcgttatttcgttatagcgtattgagtctgaaaaaccttgcacttttctgggcggacagaaatgaaaaaatgtctttaattctcctcctgactcctggcccctaacgaaaggactttttcagcaaaccctaactatagcagcagtcagaagtcaggatatcaaggagtcaggagtcaggtgtttatgcaagaaaatctgccgtgagggataaaagaaaaagctgttccaattagattcaactccatgcacgcgatatcccaacttgaaatacagctgcctggcttgataattattttccaagacatgaagatataaatcttcaaatccccagtcttggcacacttgttcacaactaatcagtaaactggaagccaaaccataccgacggtattgtgggtgaacagctaaattagacaaatagggataactcttttgaatatttgtccaactatcactgaaacgcacacccagttccacagttcccagtatttgatgagtgcctgtggtactgatgtcaacagccaccaaacagacgtgatgaggtgtcattgacgctagacgatactttaagtcttcataaatacccaaacggaataaaggaaaagcccatccccataaacctttttgggagtgaaaactttcagcaatgatttgggcaatccctggtaaatcagcagatgtagctgcacggatttggaactgccaagaattgaggatacgtgtatctgtaactaactgttggtgatgtgggtgaaaaaaccaggatttcaaagctagttgaggattgaggttaatttaaggaaagttggcttgagtatagtttttgtaattcgtcacttgtcattagtcatgaggttatgctgtagttgagactgtggaaactcacggcgaagcctgtcaccgatcacgttgtgattgctcaatagacatctcgtggtaattaaatgtgcataatccccgaatccctgtagggacaattcatgaattgtccctacaataattgtcatcagatgtctaattaccaagaggtacttgtttaatactatactttattttgaaatatagttattatatgtcatattcatcactctaacataacctagatcacaaaaaatcagctttaagtgttagtatcacggatggaatgggaaaaatcaatatatagtttatactcttttctctggaggacagggtctgatgtagcaccagcaggttataaaaggaggtgagaaaagaattagtcagttgaaatttacacggtgaatcaaaaatgacaatccaataaactgtcctgcggaagaggggcaaactgctgatgacaaatcctgaaaaacaataatttcaataactttgattacacactttggcatctagctgtcatgtgtcccagcaatttattggtcgaaatgcttgaaccttacctgattcagaaataccttgatctgagcagattattctttatccgactgccgttgcagcaggaaagctgtgcatgacatcacaagcaaacagaaacagtaagccaaaaattttggttgtcgatgatgagccagacaacctagacttgctttaccgcagtttctatcgtgagtatcaggttttgagagctaactctggacatgcagctctggaattgctggaacaagaaggggatatcgctgtgattatctctgatcagcggatgccaatgatgagcggtacggaatttttaagtctgacagcaactcaatacccagatattattcggattattttaactggctacactgatgttgaagacttggtggaggcgattaactctggcaaggtatttaaatatgttacgaaaccttgggaaactgaagaactgaaagccgtagtccgtcaagcgttggatacccataatgtcttgaaagccagaacccgcgaactgactcggactctgcggagagaatccctattgaatactgtcactaatactattcgtagcgccctagactatcggcaaattttacaaaccattgttgatacagtggggcatatgttggaggtggatgtttgcctgttacgtccctttcaagatgaaaaattggcagatgaaggatttatctaccaaaaatctactcaagcatcattgccagaccaacagagatctgctactgagaacaatgatgctttttctccacctctatctaaagacaataacaagttagctaccgcaaatcaggtttctatcaccccattacctcttttagctcagacagtgtgggaaattgatgcagtgcaagtaattcataatgtgactggtgatgaccgcattcaaagtcatgaaaaacgggctgctgcttttaaagaagctaatatatgttctagtttagtagtgccgctgatttgtcaacaagaactaagagcagtattagctttgcaccagtgcgatcaaatccgtatttgggaagaggaagaggtagaactggtatcaattgtcgctgatcaggcagccttagctttatctcaagcctatgcttatgaacaagtagaagctttggcgaagcgagaaggtttaattaatacaattactagggagattcgctctagtctagacccacaagatatctttgctgctatcactcaacgattgggacaagctatgcaggttgatggctgtgttctgtctttatggactcaggaagatgaatttgtccattgtgtaggtttgtatgatagttctaaacatctggagaattttccccaaaataacctcactagaaatcggcgagctttaactcagcagttgtctagttcccaagctacgatcaggaaaaatccgatttttttagaaatattgcgaacaaaagagcctgttgtaattacggatataaatcactctccctcagatgtccaagcatttgacctacctttgaaaatgcgaccgcgatcgctcatggtcgttcccttattaattgatggtcaatgtattggtagtatttctctgagagaaggtgagaaaatccgtaagtggctaccatcggaaattgaactggctaaggccgtggccgctcaagctgcgatcgccgtccaacaatctcgtttataccaaacaactcgtgaacaggcggaacgtttaatccaattagatcaacaaaaaaccgaatttttccaaaatatctcccatgaatttcgcacccctatcaccttaattcaaggacctttagagtcagcagtcgaaagcagagaaggcttaaccccagagcaatgtgcgatcgccctccgcaattctcgccgtctgttacgattggtaaatcaactactcgatttacaacgcttggatgctggtaaaatgcaaccgagtttccgtccttgcagtctagttgaatttgtgaaccaaatagtcgattcatttcgtccttattgtgagcgaaagggactgagagtaattacggatttgtttgaatgtccaacagtatacttggacatggaaaaatttgacaaggtactttacaacctgttgtccaatgccatgaaatttactcccgatgggggtaaaatcactgtgagattattcaatgacggtaatgcttgcgtcttacaagttcaagatacaggaattggtattcttcccgaacaaattccccacctatttgagcgattccgtcaagctgaaggttcagaaaaccgctcctatgaaggcagtggattgggtttatccctggttaaagaattagtagaaatccacggtggcgaaatcagcgtccaatcagtttatagacaaggtactcaatttagtattcgcctgttgacaggttcagagcatttacctccagaacaggtactagatacaccctgcgaattaaatatcagccgcgccaatgtagaactagcgaatttagaacaggtaggatcagcatctgatcacagagaaattatcaccagagatccatcaccgaatctacaaattgtcgattctaacggacaaattgatactactgacccatatcctgagcaattaatcttagtggtagaagataacccagatatgcgagactatgtagccaatattttacgtccgtactatcaagtaactaccgctcgtaatggctacgaaggatataatttggcacgagaaattctccccagcctgattatcactgacttaatgatgcccttagtgactggattagaaatgattcagatgattcgcactgatgatttgatgcgaggtacacctgtcattctcctgactgcaaaagctgatgacgaaactcgtattcaaggaacagaatatggtgcagatgcttatttagctaaaccatttaatgatcgggaactgctggcagaggcacgcaatcttttagccttgaaggaaaatgaaaaacgagttttggagctaaacacttacttgacagaatctgtactcaaacgctttttacccactgcgttagtccagaaagccgctgcgggaactttgtctctagatttgcgcccagaaccgcgtttagtgacagttttgtttagtgacattgtgggttttacccagctatccaatactctcagatcccgaaaagtcgcagaggtgctaaatgaatatttggaaactatgactaaagttgtgtttcagaatggtggtactgtcgataaatttatgggagatgctatcttagctttgtacggagcgccagaagacctcacacccaatgaacaggtgcgtcgtgctatcaatactgccagaggaatgcaacaagccctggtaaatttaaataagcgttggctagaacagggtatatttgaaacagatggccgtaaaggtgtacagtttcgctgtggcattcaccaaggtacagcagtggtggggatgtttggtagtgaagaacgtgctgattatacggctattggtccttctgtgaatattgctgctagattgcaagccgcggctatacctggtactatcttagtttctgctgctgttgctgattatttgcaggaagaagaaattactaaaggtagtcccctggaactgaaaggaatagatgaaacagtcctcacttttgtcgtgagaacagatttagatgcttctatagctaatgagtaaagtcaagttctactggatattcaaacatgaacaatgtcaaatccagttttaaactgcatgatgaaacgatcaaatacagacatactgatccaccttggttttggactgctgtatttacaggttcgattttcctacatctgttcgtgttttggttactgcgctcctatgaaccatttctaccgtggactccccggtcgaatcaagattatattgctattgatttgatcgatattccatctgctgtagaatcacaagaatcacaacccacaaccgttaaaccaaaagtttctttttccagtcaaaagtctgttacagcatctttaccaaaaactactctcaccactcctgaaaaccgagatgatcaggtgataaattctgatctcaatctttcacaacagggagaaagcaaaaatactgaggtgaaccatcaacaattagaacccacacccacacccacacccacacccacacctacacccacacctacacccacacctacatttacacatcaagtacaatttactcctaaacctactcccacacagactattccattcaatgatcttccctggaatcctcgtcaagaaattaagctaggaaagggaactttattaccaaatgatattccttcagaatcaccaactcccaccccagaaccagaaactacaccaactcccaccccagaaccagaaactccaccaactcccactccagaagaaaccacaactccaaaagcaggggatttactagctaatattgtgcctatactgagagatgaaatagaacaattaagacaagatggaaaattaagagtagatggtttacctgatgtactggcagaatataaaggttctccaaacaaggaattagagcttaattttcttgcaagtgactctggattaaaagcagcaaatatactagccagtttaattattgataaaaacggtaactttcaacaagcagtaattatcaatctcgaacctgcggcacttcgcagtgaaaaaagtatttatgaacaagcattaaatgagatttttcaacaagaaagctttgtgggtgcgtataatcaggatggctcaaaaccagagttaagcaatttatatgtgcggattagaattgaaccgataaattttcaataagggcttgcaatttcgggaaggttctgttatatttaaatagatggaaattcgcgggcgtagtttagtggtaaaactatagccttccaagctattaatgcgggttcgattcccgccgcccgcttttgttactgtgtaagggtttcacggttaagtaagttgaaagcacaaactttcttaacttactttgttgtctattttcaaagatgaggagctaaaccataagaattaacaaatataacaggagatagtaagggttcagcattgctaaaccccgacaaggttcaggtataaacaaactgtgacacaactacgatatttaaccaaatctaccactaatgtaagcttttgtatcttcttgttgcggattgttgaaaattaattctgttggggcgtattctactaaatagcctgtacgtccacccttttccgaagttttaacattaaagaaagctgttctatcagaaacccgcgcagcttgttgcatgttgtgggtaacaatcacaatcgtgtattgttctttaagttcgtgaatgagttcttcaacccgcaaagtggaaataggatcaagtgcggaacaaggttcatccatgagtattacttctggttgcactgcgatcgctctagcaatacataacctttgttgttgtccaccggaaagagacaaaccactttggttgagtttatcttttacttcatcccacaaagcagcttgacgcaaactccgttctaccaattcatcaatattacctctgtagccgttaattctcgcaccaaaagcaatattttctttaattgatttaggaaaggggtttggtcgttgaaacaccatcccgatgcgacgacgcacttctactggatcaatgtcagatgcatacaaattcttatcatcaaaataaaccttgccttctgcacggaatgagtcaattaaatcattcaggcgattatagcaacgtagtaatgtacttttaccacaaccagaaggaccgataaaagcagtaactttatttttgggaatatccaaccaaatattttgtacagctaagaagttaccgtaataaatattcaggttttctgtacgtaacacaacgttagcatcgttgattgtactggtgttcatagtcatagatattttagagttaggttgtaaagtaggcataatgtttatgagcttttgttaagctttttgcctagttgcccagcgagcgataatacttgtaatcagaaccatcaacaccaaaattaaagaagctgcccaagctagagactgccaattttggaagggtgaaatagcgaagttgtaaactaaaacagctagggacgcggtaggtttgagtaaaccatcaggccaaaaagaagaaaagagtgcagtaaacaataatggtgctgtttctcccgatgctctggcgatcgccaaagtcgaaccagttacaatagctggtaaagctgctggtacaacaacttgtataactgtttgaaagttagttgcgcctaaacccaaagatgcttgtcgtaagtcctgggggacaagctgtaaggcttcatcggttgtacggacaataattggcaacattaaaattgctaaagcaaacccaccacccaaagctgagtaagagcctagattgagatttgtcaatgttaaaaccacaatcgagtatgcaaaaacacctgcaataattgagggaacaccactcaaaacattagtagcaaagcgtacccaccgagcaattttaccattactaaattctgttaaataaatagctgccaatactcctgtaggaatactgatgatagcaccaatacccaccatcagcaaagttcccaaaatagcattaccgaaaccaccgccttttctgaaaggtgctggtggtagttgggtaaacacatcaagactgagactgctgaatcctttaaacaatacataagaaagtacagccaacaaaggaaatagcgccaatgctccacatataaacgctactactgtcatcaccatgttaaataaagtgcggggagaagtaggggagcgagtcaggctattttggggaaatagagaagtcattctattttagattttggattttagattttggattgactctacaaaaagtcatttttgctggtatgtataactagcaatcagaaaccgaattagtatgaaaaaacgtgcataattttaaattttcatctgcactttttcatgatcattctgattgctgccgcaactaaaatttcttaactcggagaacaataaactccgccagaatattgactaacaaggtcagtaaaaacaatactaaagcagcgtacatcaaagccgaaacttgcagaccgctggcttcagaaaattgatttgctagtagtgaagaaatggtattagaaggagctaacagagaaatattaatattgttagaattaccaattaacatggtgacagccattgtttcgcccattgctcggccgagtgctaacatgacagcactgacaataccggaaaatgccgcaggaatgaggacttgaaaaattgtttcccaacgagttgcacccagtcctaaagctgcttgacgtaaactagggggaagggaaattaaagcatcacgggagatagcagtgataattggtaaagtcataattgctaaaattactcctgctggtaacatcccaggtcctgtaggtgtagaactaaaaaatggtatccaacctaaagaactgtgtaaccatttacccacatcatttaaaatcgggattaaaacaaaaattccccatactccatagacaacactaggaatggcagctagtaattctactaaaaatactaaaaccaaccgcacctgagatgggagaaaattctcacttaataaaaccgccgtacccacgccaatgggtacagataacaacaagccaataaaagaactcatcagagttccataaattgctggtaaaactccatagttatcattaactgggttccaactgctttgaactaaaaagcccaacccaaattcttggatagcaggccaagcactagaagcgacttgcaacgctatccataggagaataccagcgatcgccagagcaaaaatccttgtcaaccaaataaagcccctatctagagatttatcaagttccgagcgttgtttaacagctaatgacagattctgaaaatttgtattcatgaatactgactctagaaagaaaatcggaaaaaatgtgaggggaaccaaataaaagtcaaaagtcacaagtcaaatgcttgcggtgataaccttgggggtggctataaatgaaattatcatttcgttaccttttggcatttgatactaaataatcagggttcccaactgattgagtaattcaatgattgattatcttgagcatagacggaagagtgaaattacttactcgcattggtggagtcaccaacagcaattttataatcaggactgatttgatcagccgcagcagctactttagtaaccacatttgctggtaagggaatataacctagttcatcagacagcttttgtccatcagtcaaagcatactctatcgctgcttccattgccttcgctttggctgcatcaggatactttttataagccagaatccaagtataactgacaatggggtaagaatctgcaccttctggatcagaaataaaggcgcggagattttctggtaaagttacagcttctaaggttttagatgttgattccgcatttgcagtcacaaatttaccacttttgttttccaaagcagcaaattttaaattgctttgtttagcgtaaccatattctatgtaaccaatagcaccttgagtttgttggatttgggcagttacaccttcattacccttaccaccaacgcccactggccattttacactttttccttcaccaactttttctttccattctggactgatagcactgagatgttttgtaaatacacctgtagttccactaccatcagcacgatggatgacagttatgggttggtttggtaacttagcatcagggttagctttggcgatcgctggatcattccaggttttgattttacctagtagaatatcagtatatacggttcgtggtagtttcagttcaggaacatctggcaggttataagccaggacaatgctaccagcagttacaggcagcatcattacccctttatctgctggtattttggcgatttcctcatccttcatggccacatcactagcaccaaagtctacagtacctttggtaaactgttcaactccagcaccactacccactgactgatagttaacttttaaactcggatattttttgttcaattcagtaaaccaagtttggtaaagtggagcaggaaaagatgcaccagcacctgtcaatgtaacatctccacctaaatccaaatttttagcaggggtagtggcagcagtattttgagtattacctgaattatcagtgttagcagtgttgtttgggctggaatctcccccacaagctgctaaacctaatgtcagtgctactacggaaatagcagttttgacgcgattatttttaacagaaattttgcgtaatagcattgctgtctaaattttgtaaattgccataagtaagagaaacgcctctaacatacctctaaatatttaatctcaggtaaacaaaaggttaacaaaccacaaattttctgttttcctaatcaattgttgatgaaaaacttactcctataaattcctgctacaaacaaatattctgacttctgacttctgacttctgactcctgactcctgaattgattggttacatttgcgatttttacatatactggtggttgctgttagtgttacctttgggctattccctattgcctgatcaatgtttgctgcttccaatcaattattatggtccatgattggcttactcctgacaatgggtggcacgttcctagaagcctatggcactaccttaccttggagttggagtcagcaaggaattaaaaccttttctttaggtgtcagctatcaagttggtgcagtgctgttggtaggttgtttaggaggtaaaaatgctggtgcgctttcccagattgcttatctagtcatgggattaacattattgcctgtatttgccgaaggaggtggtataggatatgttaaactatctcagtttggctatttgctcggttttattccaggagcttggatttgcggatattttgcctttaaagccagacctcgtttagaaaccctggcttttagttgcctttgtggtttgtcaacgatccacttatgcggtattgcttatttaatgatcagttatctttttccctggagaggtgcagaacatctacctttaatgcaagcaatccttaaatattcctggttttcgctccccggtcaactagctgtagtctgcgctgtcaccatcatagcttatgtactacgacatatcatgttttattaattagggcattgggcattgggaataacggtgaaatgactaataactaataactaataactaatgactcatgagtcatgactcatgactaattgacaaatttaccatgcgtttaaaaaatagacttttttggattgctgctttcgttgcttttgtggtagaccaattaacaaaattatgggtagtaaaaacctttgagttaggagaaacattaccactgctaccaggaatatttcactttacatatctcaccaacacaggggctgcttttagtattttaagtggtaaagtagaatggttgcgctggttatccttgggagtgagtttagtgttgatggcgatcgcatcctggggaccagtattaagtttttgggaacagttaggttatggtttaattttaggcggagctatgggtaatggtattgatagatttgctttaggctatgtcgttgattttctcgattttcgcctcatcaactttgcagtctttaatctagctgattcttgtattagtattggtattgtttgccttttaattgcatctttccaaaaaacaccaaattctcatcacagaatacgataacaattgataattgataattgataattgataattgtccattgtcaattttccccatcctctcacgaacaaaccagaggtaagctgttgtgcatttaatttgtataagtggaacaggcaagatgcctgttccacaagagttcagaatattaggattatacaattaagctgttacacagctaaattgtcaattgtccattgtcaattattgaaatatctctatcgccaataccagcggtttcttgacattgaaaaatccgctgtttagtgatagagactattttttgttgatgcaaacttgtaaaaaatcccctgatcgaacaaataaatgtagcgagagttgttctttaaggagtagaaatttgagttaaaagattcagatttaagtaccagaaggggcagtttgttgtaaaatattcacaggaacttgctctgggctagaaaactctgttacaggagagctttctggaacaggagtcaattggttggaattatcaggacttgggttaattggtgtaactggtactgtggtattatctacgtcggtattgctctcaataaaattagtttgtggattagtttgtggattagtttgtagattagtttctggtgatgaaacaggactcagaaaattcctatcaagtggtatcccacctggacaacgtgagttaagcgggaaacgttgacagagaattttcattccttctggtgacatcttaatttccgccgctgtacccatagaggagtcacttgattctaccaacaaagattcacttgattgagccatagcagcgttaccagtaagcgccaaagtcatggcagtaccaatcagggtcagagattttcccttcattctgaaattaacctcaaggtcaacggaacactgcgctaattaaatcaaactcttgatgggacaaaatcagcctcaaggaagatgtaaaattccttgaataatgctatgggtctttgacaaaagtaaaatttaaatattttgtcaattgaatagaagtttttaggaatacacagagaaagattgtatttgaacttgtaccgctggctttattggataaaatcaggattttatgtccaagcaactaatttgtgatgtagaaagcagtgacaaaaattacaagttaattttacttgccaatccatcaaaaggtttacttgaatacctttaaattcagtacagccaatttatttttggcttgtgagtaaaatggtgtaagactagcattaaaattgcgatccgtacgattctgtcttcaccaacagccgtgatgtgatatagccgatgagttccccgcaaccgccgcaaaagccacaaaccttacttggtcaactgacgcaagcagtaaatacaattcaagccagggtagatttttccaaactggcgctcaagccgaatgccaaagtaccggaaatctgggtgcaggatgcgggagcggacaaagcggaaatatatcccctattgggcgatcgctatatacttggtcgcagttccaaatcctgcgatatcgtcgtccgtaacccagtagtcagccagattcacctgtccctatcgcgtgattccagccaaagaacaacggttttcaccatcaaagatgaaaactccaccaatggcatttatattggcaagcgcagagtcacatccctagaactgcgtcatggtgacgttttcaccttgggacccccagaacttgcagcttcagtgcgtttgcaatattttgatccgcccccctggtatatcaaagcaggaacatgggcattttatggtgttgggagtgtcagcgccttatttgccctagctattggcttagaatggacaaaattttccattagacccctacctacagccaccagcgccccggtagtaatttatgcccgtgatggatccacaccactacgagaaccacggaacatagctcacgtagacttaaaacagttatcagaatttggtccttatttacctgctgcagtagtcgcttctgaagatagtcgttattactggcactttggagttgatcctttagggattttgcgagccgtattaatcaatagtcgtagcggtgacgtacaacagggagccagtacagttactcaacaacttgcccgcagtttattccgcgattatgtaggtagacaagattccttggggcggaaagtgcgtgaagctattgtctccctgaagttagaaaccttttacagcaaagatgaaattttactgacttacctaaacagagtatttttaggtgctgatacttcgggttttgaagatgcggctaaatattactttgaaaaatcagctaaagaattaacattagcagaagcagcgaccctagtagcaattttacctgcacccaacgccttcaatttttgtggagatggtccaagaaaactggacgcagcagattaccgcaatcgtgtaattaggcggatgctggacatgggcaaaattagcgtcgaagatgccaaccgtgccagacgttctacagtgcaagttagtcctaaagtttgcgaaagacaagctcagacaatagccccttacttttataattacgtctttcaagaactggaatcaatattaggagaaggagcagcaagagaaggtaactatatcatcgaaacccagttagatccagcaatgcaagcccaagcagaatcagctctgcgaaattcagtgagtaacgccggggccaacttgcgattttcccagggttcgcttgttaccctagatgcgaaaactggcagcatcttagcaatggtaggggggactgattacaaaaaaagccaatttaatcgggcggtacaagctcaaagacaacctggttctaccttcaaaatttttgcttacgctgctgctttagagcagggaataccaacatctagaacttattcttgcgctgctttgccctggcaaggctttacttacagaccctgccgctctggtggtggtagtttagatgtagccacaagtttggcactctcagaaaatcccattgctttaagaattgccagagaagtaggattaaataaagttgtagaaatggcgcagcgtttaggagtcaaatcctcactggaagctgttcctggtttagtcttgggtcaaagtgtagttaacgttttggagatgaccggcgcttttggtgctattagtaatcgtggtgtatggaatcgtccccatgctattagcagaattttagacagcagcgattgtgaagatcgcaatgatttaaagacctgccgtgttatctattcctacgaccaggatcgagacagtaataagcgagtgctaaaaacaagtatcgccaatacaatgactgatatgatgcagagggtagtttccagtggtactggtcgtggtgcatccattggactgggagaagaagcgggtaaaaccggaacaacagataaaaacgttgacttatggtttattggttttattcccagtcggcaacttgtaactggcatttggctaggaaatgacaacaattcccccacatctggtagcagtggtcaagctgcccagttatgggggaattatatgcggaaaatcgctaaataaatgggtaattggtaattggtaaaaaagggaacagggaacagggaacagggaacagggaacagaaagaaggcaataggcaatagacaaaagttaatattctcctcctgctttcttacccagtcaccagtcaccagtcaccagtcaccagttacctgtatccctcccagggagtgacttcaagagtgccgttagatttgaagactacctggaaatgggcaagaggttctttattgttgggagcagcttgatttgaaccgtagacagattgaaacatttgtggtaaaggtgtttctcgaaaatagtcaaaggcgacttgattaagtggttcatagtcagcgatgacaccaattttgttaacggctacccgatatctcaattctctgttaaaggtaggtgtaacactccagttttggcgaattgtattataaagcttttgatttaagtctttgagtgtactagaatcagtgattttttcaccgatgacatctggtgttctggtatatcccaaccaaggactaatttctaacacaccttgtctggtaaaaactactcgaaattgagcaatgggttcattggtgacagtgcggttagcaggattgtagagtaattttggcagtggagttttttctattgcatcattggcatttttgttaacagctttataaccaacaatacttccatcaccagctacacccaagcgataaactaaatcttctgtaatttccgaacgattctcccagacaggatgaatttggttatacacttggcgattcaatgcccgtagctgggaggggtcagtaatttctggaactgtatttagaagtgcttctaaatctttgataataggtgtggctgaggctgtaggtgatgcttcactggtaggtgtaggtgatgcttcacctgtaggtgtaggtgaggctgtgggtattgctgtgctggtttgttcttcttgcttcggttctggtggacgtacctggggaggaggaattaagctaaaggctaccgctgctactgctaaactggatattcctacagttgctggtactgcttgttttaataaagcttgactagtacccccatagcgtctagtgactggttgtagttctagtgttaactctggtaaggtttgggtatcagcaaaaaactgatctacagcttcgactaaatcaaacaactgtacagtattcaaatcaacttgaataggtgattgttgaactgcgtttgattgagattgcacaccatcacctgtaatttctgaatgtacaattaacttgtgtctgttgctatcaattttttgtaactcgactaactctgagtcaccgttgtgtgcttgagggttggggacattacttaaaaattcttgagcataggcgcttaccgctctgactaagttttcaaaaaattctcgccctccggttataggctgactataactagataaatagcattctgcattcaccaatatagataattctggacgcagttcttgaaattgggtggtaggggcgacatcacttaacccttctaagagcagcgtgcaattaggtaaactgtacttacgttgaatattcattctactttactctacttcaccgtcaaaaagagaaatccagaaacgctgcattccagctgtacctgtgcagaatagtaattttgctaataagtctatagccagttcatctaatttctcgtctgagtttaatgttagtaaaatagaacgtctggcattcatccgacttttaaaatgcgctctaaaccgttctaggtaattagctagtcgtaaattttgctctagtggaatctgcttttctgataattgctgatatatcattagcatctgtcggataactactgttaacctccgcgctatgtagcaagcaattactactaaagcttttgcttccatgatggtgaggggacggcggttatgcgctcttcttaaagggttagaagcacgcattctccatagatttactcggtttttgacaattcctgttaggtctagttcttgggcaaaagcgaggatggcttcagaaccacccaattctaaagcttcaattgccagtaacatcaagtctatttgtaatgtggttctgcggggacagcccttgggtcctatggctggatctggtaatgtgtccagtatcatcggcatggactcaggagttggatcattcaatgactttacgcttgcggagacattcatgctctaaaataccttgtgttatgccaacagactgagtgagatgaataaaacaacattaaacactatttaagatagatagctaaaccagaactcaggttttgtggttatggataagcatctcaatatatacaatacttactcttgttataccaagattcccgtatattctaatgaaacttttaaagcatcagtttactaacctacctagtttaacggtacaaatacatctctagcttgggttaaattcttagttattgtcaatgattgacgaaacttacagcaataatctccaagagatgagattatagtgtacgatttttcaggggattggtgactggtgactgggaaaatacaaataatttctccctgcttccctattccctattttctattccctgttactactgaataatatggatttaaaatctctgattcgtgacataccagattttcctaagcctggaattgtatttcgagatattacaactctactgcgtaatccagagggtttgcgatacactattgactttttagcacaaaaatgtattgaactggaaatcccagttgattgcattgtgggtatggaatcacggggtttcatttttggcgcacctctggcttataaattgggatctggttttattccggttcgcaaaaaaggcaagttacccgcagcagttcacagaattgattatcaactagagtatggtacagattgcttggaggtacatcaggatgctttacatccaggtagcagggttttgattgtagatgatttaattgctacgggtggaactgcaagtgcaacagctactttggtacagaagataggctgtgaacttgtgggttttgggtttatcatcgagctacgggatttgcaaggacgcaagtatttaccagatgtaccaattatttctttggttgaatattaggtgattggtgactggtgattggtgactggtgattgggtagaattaacttatgactaatgactaatgactaatgactaacaactaatgactaatacaaaaattgctttagaaactggtcgagattggctgattaagctagtcaaagatgaaacttttatttatgtgataaaacggctgctacaggctttgttaactatttttctagcttctgcattatcgttttttgtgatgaaattgtctccaggtgattatgtagatacgctgagacaaaacccgaagatttcaccagaacggattgaagaaattagacaacagtttggtttagataagtcttggcctcaacagttttggttgtggttgaggcaaattgttattcagggtgattttgggacgagttttgtttatcaacgttctgtttcttctttgttgtgggagagagtacctgcgactttgttgttagcgatcgcttctttatttataacttgggcgatcgctattcctctgggtatcctcgctgcggttaaacaaaatcgtcccacggacaagattttacaggttttaagttacgctggtcagggttttcctagttttatcactgccttatttctattattctttgcccaagtcactacccccttatttcctgtgggcaatatgactagcattgatcacgctgaactaacatggttcggaaaaatattagatattggttggcacgcgattttacctttaattgcgttaagtattaccagttttgctggtttacaaagaattatgcgtggtcaattattggatgtattgcggcaagattatattcaaactgcccgtgctaaaggactaccagaaaaccgtgttatttatgttcatgctttgcggaatgctattaaccctttaattactttgttagggtttgaattagcaagtttattaagtggtgcatttattacagaaaatttctttaactggcctggtttgggtaagttaactttacaagctgttttggcaaaagatcaatatttagttatggccagtttagtgatgagtgcggttttattgattctaggaaatttaattgctgatttaatgttaaaagctgctgatccaagaattaaattagaggatttaaattagtcaggagtcaggagtcgtaggggcgaagcattcggaaaataggcttttcataaaattgataattgatcgcccgaatgcttcgcccgtaaaggagtcaggagtcattagttaattctacccaatcaccaatcaccaatcaccaatattatgctttctcaggtttattatattattcggtcaaaaacagatggtaaatatatcactgcaaaaattgatgatgataaatcaggatatttattattattcaaagaagattttgaagcactcagttatttaaatgctcatgctgctgatttagcaaatcgtttggcggtagaatctattgctggtacacaagtaggaagtttattaaaacgttgggattttgctggtgtgggagtagttaatgatcctttattgccgaaaattgagtttttacaacataattgaataaggacaattcgtgaattgtccctacttttaaaaatgtctaattaatcttgatatgggttgtctattttatccacaaatacattagcagataacggtaaacgaccaggatttaaacggggttcggctgcataaccgacgggtacaaccactgcaatacctatatctgggttattctctgcaccaatcacggctttaactttatcttcaatccaaccattcataaaacaggtagataaacccaaactttccgcagctaatactaaatttgtagcagctatcatggcatctttaatagcatattcccgacgcttatctcctaaagcttcttgaaattggggaatagcatttctaaaataattaactgttccctcattccaagcgccggtgtttaatccttgttctaaaatgggtgttaaatcttgttcaccagcagttgcatcagcagcaaatacaaaggttacaggtgcttgaataatttgtttttgattccaagatgcttcacataatgcagctttttgggtttcatcttgaattaaaactattctccaagattgggtgttaaaactgctgggtgctgctacggttaattctaccagttgtttaagcatttctggggaaatgggatctggtttaaaggttttgatagaacgacgttgtaatatagctgtaggtacgtctaatgcttggatttgagttgtagaagtcatttgattttagattttagattttggatttttgattttggaattatgtcctgtgcttagggtaacgcttttttgtacggagttcaaatagtaggttacagggtacaggtgacaggtgacagtaacaagaaagaattttattgtctaaattgcaaataggataaaatgtgattataattactgctataattacccacctgcatctatgagtcagtgtctcaaccccgactgtctacagcaaaacccatcagggactattttctgtcaacgttgtggcagtaaaatgattttgggtgacagatatcgcgctgtacgttttattggtgaaggtggttttgggagaacttttcaagcagtagatgaacatcgtttagatactccctgtgtgatcaagcaatttttaccccaacagtcgggaagtgctgctttagaaaaagcgacagagttgtttaaacaggaagctgttagactgcgagatttagggaaacattcacaaattcctgatttattggctttctttcaacaggaaggaagattatatttaattcaagaatttattgacggtgaaaatttgctggatgagttaacaagaaaaggtaaattcagcgaatcggaagttaaacaggtattaattgaattattgccagttttacaatttattcatgataataatgtaattcatcgagatattaaaccagagaatattattagatgttcgcaaaattgtaagttatttttaattgattttggtgtttctaaagaagttggtggaagtctattaactagagtgggaactattaccggaacaccgggttatgcaccaccggaacaatttcgcgggatggtttatcctaatagtgatatttatagtttagctgttacttgtattcggttattgacgggacatttacaaaaagctgatggttcggatttattatttgattccatgaggatgcagtgggtatggaaacaatatgtttctgtcagtaaggatttggaaacagttttagataagatgttacaggatttaccgattaatcgggttcagtctgcaaatgaggttttattagaattagaaaagcagaaatttaacaaaccgccaaaattaccagtttcttctatttcttcccagccagtttcacaatttatttcttcacaaccaggactgtcttttacccaaaacgaacatttaggaaatggtgtaattttagaaatggtagaaatacctggaggaacattcctcatgggttcaccaaacggggaaggagatgatagagaaaaacctcagcatcaagttgccgttagaccattttatatggggaaataccctgttactcaagcacaatgggaaaaagtagcacgtttaccaagagtaaaaattgatttaaaccccaaaccctcacatttcaaaggtgcaaatcttccagttgaaagagtatcatggcatgatgcacaggaattttgtactagactaagcaaacatacaggtaaaatatatcgcttgcccagtgaagcagaatgggagtatgcttgtagagctaaaatcacaactccctactattttggtgaaagtattactactgatttagtaaattatgctcaatttatattcggaaaaaccacaaatgtaggaaaatttcctgctaattcctttggtttgtatgatatgcacgggaatgtatgggagtggtgtgaagatggctggcatgaaaattatagaaatgcgcctatttggcctaatgatagtattccttggattagtaacaataatttccatgtaatgcgcggtggttcatggggtagtgacgctgaatcttgccgttctgcgtatcgtcactacagcgaccaatgggacaggtattatgagtacggttttcgtttagctagtagctagtaggttgggttgacgcaaggaaacccaacatttcccataattataattgtcagaatcaggatatccaggatttaaggattttcaggatttaattttcagtgaaaacctgagaagggatgaaacagaaaccatcctccttttactctctgcgtctctacgtgagataaaatcttatttgtctgaatcaggatatccagaatttaaggattttcaggatgtaattgaaagtttgattttgaggatgtgaggggttttcgatgttacataaataatgatgtagataatttttaaaagatgcaatttttcgatgattttgaattatctgataaattatcaaataaaaatcctgttaatcctcaaatccgggacatcttgattctgacaatttatgcccatgttatgattatctatgaaagtctttgggagttttacccatgaataatcttaatgtcgtcactctacccgataatttatataaggaactgcaaaaactagctgaagctgaaaatgattctatagaatctcaagttgtcgcactattacaaaatgctttacagacaagaagacaacaagtagaactacaaaaccgtgaaaacgtgctaaaagtcctagaagaaagtcgtttacgtcgtgaacaacttcctaaagatgttcaatggccagatagtacagaaatgattagagaagatagaaacagatgactactactattaaatacgtattagatgtcagtgtgtgcatcaaacaatttattcctgatccattatctcctaaagtagatcagattttgacttatattgcctatcctcaatatcagttctttgttcctgatctattttacattgagagtgctaatgttttatgtaagtacgttcgtgctggtatttatccatctgataaagtttccgcagatttagctactctgaaaaacttacaattacaagttgtttccacagcaaacttgatggatgatgcagttaatattgccttaaattacaatatttctgcttatgatgcttcttatgttgcactttcacaacacgagaatgctactttgttaacactagataaaaagttagtcaaggctttagccatttcatcctataatatttgtttgtttaacgagtttcaaattccacctttaccacatcacgggtagaggttggtttgacgcaaggaaacccaacatttactctaattataattgttaaaatcaggataaccaggatttaaagatttttaggattgagttgttaaaaagacgttatatatgtgcgacacagatttccattatattagtatatgtcaagcctgaggattttgtcaagtgttttgggtgaaaaaattttgcggggatgaggatttttagatgttgatttttggggatgtgggaaagagataaaatattaaattgtcaaaatcaggatttacaggatttaaggatttacaggatattattgaaagttctattttggggatgtgaggattttttcgatgttatataaatcattttttgactttttaattttgacttttgacttctcgaagggtgtcctggttatcctaatttagacaaaacgatataaatacgatatcattatataaacataattacaaaaattcagacatcataaaaaatggctgtaacagcagaagtgttgaatgttaagaaatctgtgataaaaatagcccaaaatatattaaaatttgagcaagctatatcaaaatattgatttgatcatgattataaattcatttcccaagattgtcaaagaca

SEQ ID NO: 25 - DNA, 61873 bp, Sphaerospermopsis sp. LEGE 00249
  LEGE00249_40
tcagaaaagtattcccaaatgcttttgcaaatgggatagcgagtgtcgccgttacaccagtaaaggttctgccttttaaagtgccattctaaacagatggatatttgttcagtttagcacgaacggttgagacgtttttcttccccaatggtggaaactgtacgccctttgtagtcatgggcaggatatactaaggtatcatctggtaaggtaaataggcgttgtgtcaccacatcatagagagttcccgcatcaccaccctgaaaatctgtacgtccacaaccacgaataaataaagcatcaccggttaacaagtgagttttattcaccaaataggttatgtgactggcagtatgtccaggtgtagaaattgcttcaatagttactgatcccagttctataatttccccacctacaaaagagcgatctgcttttgttaccgcaggattttcaggaacgatgatctcacagcctgtttgttgtctgagttttcctgctcctgtaatatggtcagcgtggagatgggtttccaagcaatagcgtagttttaatcctagttcttctaatgattgcaaatcccggtcaacttgttctaatacaggatcaactaaaatgccatctcctaactgttgatccgcaataaggtaggtatagctactggtttcagggtcgaaaaattggcgaaatagaaaggttggctgtggtattcctgtactggtattgctcaaagctatggcaggaagaggacgcacacgcaatggtagagactgcaacaactcctgggataatgcctgtgcttgtcctcgtagctctggaacagctatagtttcccacagatcgcctttgcggggtgttcccaaggtataaagtagggaagaaattgtaccatctgcttgatataaagcaccctgggagttagtatctagccctaaacccaggacattcggacgaattaatccttggcttcgcaaattagtaaccagaggatgatttgaatgccgataatctcctgctactccggtacaattcactattcgacgcactggcaaaatctgattagtctgggttttgcgttcagatatggtgacagctacaccaccaggaacagcttgatattctctaattctgccagcagaaatagttagttgaccagaattgagtatttctgtgattacatctcccacttgtggggcaatgcggtgacgatggatgtcccaataaggtgttaaatgacgtagaaatcgccgttgttcctcttttggtagtttttgccaaattttctgagtgtggggacgtagagagtcaatgagcgatcgccaaccataaccagcataaattttaccccggtgttggcgactgtgcagagataacaccatatctaccattgttaatcccgtaccaatcagtagtataggggcatcaggatcaagatcatctagggcatcggctgaccaagcattgcggagataattactatctgtattctcaatttctgaaggtgtagaaagggaatttcccaaagccaagacaactttatcggcattaaaatagcggccactacggagagcaatagctgccctttttgcttccggttgtatccccaccacctcatcagtcaccctttccagacgcacatcactgggtgctgtggcttctgcttctgctaaaactgactgaatgtacaaaccataaactttgcggggaatgaaggtactagcattgacttcttcggcaaaaaatgattctaactcgctgcggttgtactgaagccaacgtaacagatgtcccgggtcatgaggaaacgcgctcatgttacctgctgagacattgagtaaatgacagttagtctccgtactataagcaattcccttgccaatttgacgactgcgctcaatcaacttaatgatcaggggttgactagcagtttttaatagatgggtagccactagagtaccactaaagcctccgccaactatagtgatcgtagttggagtgtgagtagtcaaaaaactagaagtcatggcattgtcagttaaaatcactagtaacgctgatttaatcaacagaacttacccataggctaggaaaattcagagttttgattcatagatgcctttagttgctatatgctaattctttaacatcagggtgaaatttattaacagcttgcacaaattctattaaaacttcttgcagacgttgatcaatttcttcatccaactgcaaacttccatcagcttgaatttgaatttgcttatctactgcgtaaactgtacttaaaatatgccttgcacctaattcacctaaaactggttttaaggcatattctattgataataaatgggcaattgtaccaccggtggctaaaggtaatataaccttatcttttaaggctttttgtggtaataaatctaagaaagatttgagtaccccagtataagcggctttgtaaattggagtggcaataattacgccacttgctttttctaacaatgcttttggtttttctaaagcagggctattataacgtccaaaaactaaatcttccgcaggtaaatctcgcacagaaataatatctgtttctaattgttgggaaacaatttgagtcgcatattctaaaattccgtaggttctggaaggatgagaaggactaccagcgatcgctaaaatattagtcatgtgatctaaacctcttgatttaattaatttttaactaatctacagttgctactgttgtttctctaagttgttcttgaagctgctggggaaattcccggttagcaacaatctcaccaaaaggactcaataactgcggttctactgttggtaaattattcaaaggtaaacgaggaaaaagtaattctgctacccgataagcttcttctaaatggggataaccagagaagataaaagtatcaattcctaaatctgcatactcttgcattcttagagcaacagtatcaggatcgcctactaatgcagttccagcaccaccacgcactaaaccaattcctgcccataaattggggctaatttctaatgcttcccgactaccattatgtaattccttcatcaactgttgtccaacggaatccatgcgagaataagcttgttgggctttattaatagcctcatcatctacatagcgaatcaaattattagccgcatcccaagcttgactttcagtttctctaacaatgacatgaagacgaatcccaaaccgtaaggttctaccttgtggttctgctaaacgttttacagaagcgattttttctgctactttttcaggtggttcaccccaagttaaatatacatcaacgtgcttggcagcaatttcttgggcaatcgcagaagaaccaccaaaccacaaaggtggataaggtttctgcacattaggaaatagtattttcccttctttaatattgagataatcaccttcaaagttagaagtttcaccacctgctatttgtcgccaaactgttaaaaattcatctgtcagtttatagcgatcatcatgactaagatgcaaaccatcaccagctaattcaacaggatcaccaccagtaacgacattaattaatagtcgtccgccagaaattctatcaaaagttgctgccattcttgccgctacccctggtgacatcaatcctggacggattgctactaaaaatcgcatttttttagtgtgacttaccaaagttgaagctaaaatccaggcatcttcacaggaacgacctgtaggtaataaagctcctgtaaatcctaattgatcaactgcttgggcaatttgtcgccaataatcaaagttgactgaacgaccacctatagcagttcctagatagcgtccatcgccatgtgtgggaataaaccaaagaacttgcatgatgtttaagtgtaaaactttgtaatcaaaaactcaatcaataactacggtaattctatcgatgaaccgtactattgaggtaatgtttaagagtattgcacaaatgaatcaagaaaagcaatacttttacaaaaaaaacactgtaactttatcgagtattagtagattaaccctttaaataactgggattccactgcaaccagtagttttccaaagctttagcaactatatcagccagcttgccgaacaaggcatagattagaatgcttaacacaacaacatccgtttgcataaattctctagcatttgttgccatatatccaattccagaatcagcagcaattgtttctgccacaataagtgttaaccacataatccccaaagaaaaccgcacaccaactaaaattgaagacattgctcctgggagaataattcgccaaaataaaccccaagtatttaaaccataaattttacccatttcaatcaatccatgatcaacactacgaatcccatgaaaagtgtttaaataaatgggaaacattacacccaaagatactagaaataatctcgcttcatcaccaatgccaaaccataaaattactagaggaattaatgctaaattaggaatattccgcaacatttgcagtgatgtatctagtaatttttccgcaatccgagaaacaccattaagtaaacctaaactaaatccaatacttcccccaattaaaaacccggatatcgctcgtaaggcactaataccaatatttctgaaaagttcacctgtctgagctaatttaatagcagcaataagaactgccaaaggtgcgggtaatattcttgtaggaataacaccaatagaggataacaactgccacactacaattattgtaattggtacaacccagggtataaatgattgaaaatagcggtttttcagaaatttaaaatagaacttattttttcttgttgaatactttgatgaaaaatcagtagaagaaagtttcatgaccatttatttattaagtgatgatgagaatgattacaagcagagtttatttgttcctagacacaaatattctgactcctgaattcttaccaaccaattatgatttgttctcagaaatcaggaatctcaattagtagttattttctactaattcttcgcggtgtaatagctgcatactgctgagaagtgagaactgaatctttgatagcaattcgcctaggaatcactttttcgttgtagaatagatccgcaatgcgttgttgctcggcaatcagagatgagttaattggacgtaaacgaaatgtacgtctacgaactaccacagataaaagcgctggatcaagtttcaattcaggagcaagaattttcacaacttcattaggattagattctgcccattcccctaacttatccacttcttctaaaactatacgcacaacttctggattttcaacggcaaaactacgtctagccatataaaaaccaccttggttagcaattcctgaagcatttctcaaaacacgagcattagcatttttctggacaaaagcaataaaaggatcccaagctacccaagcatcaatctttttttgaataaaggcatcacgggcttcagcaggagttaaactcactgcttgaatatcactaatttttaacccgacttcacctaatgctctaagcagtaaataatgtgcagcagatcctttttgaaaaacaacttttttacctttaagatccttaactgttttaataggagaattttgttgaacaacaatagcactaccttcacccttactgggtttacgtccagcaatataggcaagttgagcgccagcagcttgagcaaatataggtggtgtttctcccacagaaccaatatcaactctgttagcattcatcgcttccataagttggggtccagcaggaaatggagaccattctactttgatacccaaaggttcaagacgtttatctactactcctttgatctttacaatatcgccagaagtttgataagccagtcggactactttggtgttaatgcctgttttattagttgtattttgggcttcgactattttactggaaattggtacagaaagagtaactaaagctaatgctgatattgagtattgaaggaatttctgtaaaaatatgcgtcgtggtaagttaagcttcatgcttctgtctcctcaataaatttcaattcaaatttttttatgactgtttttattacaaaacctaaaatgggcgactacccgctaaactaatccgtttcaaaactcgacgttcactaggatcaaaagcttgacgataatgtaatgtagattgattatcccaataaacaatatcgcccacagaccatttatgttgataataaaattgacgctggtgcagatgatatcgcaactgtgctattaattcttgaccctcttggggatctaaaccaacgacttcaacttctgtggcgtagtctaaatataaaatcttcttgccactttctggatgtgttctgactaatggatggggaaatacaggactaatgagaggaatacttttatcctcacgatattttcttctgggttctcctggtttatttaaaaacggattataagtaatcaactgtaaattagcaattcgtttttttgttgattcatccaaagtttcataagctaaatttagatttaaccaggaagtatcccccccttgggatggaacttctaaagcataaagcaaagaaccactggaaggaaaaggagtccatttatggtcagaatgaaaaggtatctcacctgttcctgtataaccgttatcgacattagaaacaggaattatcaatggtgttactccgggctgagaagctaaaactggaatattatctggaggaacaaaaagagaaccaaagtaaaaactaaagtttaaaaattgctcatcagtcaaattttgatttttgaagatgagaatatgataatcccgcaatgcttgttttaattgtaaaatgacttcaggtgcaatggtttgactagcatctagtccagtaactactgctcccaagggtgcatcaagaggagtaatttgaaatttggttaaagttagagtcgtcatagttgagattttcagatcaataaattacaaatttttatttacttgctaacacttctttgggagtaatttccgcatattgttccggtgttaaaaacccgtctttaacattaactttcttgggtattagtcccaggctgtaccatttatctgcaacttcttgttgcttgttgatcactgcatcggtaataggcactaatgcaaaatcatatttgctgtgcattttttctaatgtgggtgcatcaagctgagttgttgcactgagcaattcagcaatttctttacgattattctttgcccaaacttgttctttttgtaattcttccaaaaatattttaatcacttgaggattttcttgatagaatttacggtttgtagaaataaaattattagtatctcttaaaccattactaccatctatcaacacacgaccaactttgttctgtacatttctggtaacgaatggctcccaaataaaccacgcatcaactttaccttgactgaatgctacatttgcatcaggaggtgctaggaaaactgactcgacatcacccagttttagaccttctttttctaatgctctaactgtcagataatgaccaatagatgctttttgaaaggcaacttttttaccttttaaatcttggacacttttaacaggtgaattagctggaactaaaagagaaactgattgaccatcagaagaattagcagctaaataaaccaggggtgcgccagcagcttgggagaaaataggaggtgattcagcagtgtaagcaatatcaagtccacctgcatttaaagcttctaactgttgtggacctgcggcaaattcaggccattcaactttataacctagaggttctaatcgtttttctaaagtaccttttttttctataactgctaaggctgtcagttgtttagaacggactatcctgactactttttgggtagccgtagaactatttccaggatcaggtgtagtagttgtattagatgctgtattacttggagattcttgcagaccgttgcaactaaatagtatagttgatataactaaactataaccaaaagcaaataaagtatgacgacgagtaatacgtcggtgcttcaaggattcaattttatctttccaatttaccatgatcaaattacctctaattaaattaagaaaattaatttaagaaagtgaggtgggaaaggaacacccaccccattaaggtgcgagaaaaactaactgacactgactgagaagaaaactgagtaatactagatgacaagtcctaaatttatggctgtacagagttgtgtagagtaaagttgtggaaatttaggcgatcgcagaactagaactaaaaacgtattccacttctgacttttgatattctggttgacccatgactcggtttaaaatcttctccacagtcttagcaaactttgcatctcctctagctcttggacgtgggagatcaattttcacatccatactaatttgaccatcttcaatcaaaactattcggtctgctaaaactacggcttcttctacatcatgagtaattaacaatgctgtaaatccttgttctgtccacaaacgttctaataattgttgcatttcaattctagttagggcatccaacgctcccaaaggctcatctagcaacagtaaagacggtttacttaccaatgccctggctaaagccacccgttgtctttgtccaccggaaagaacggaaggccattcgtgggcgcggtcttctaaccccacatcacgaagcacttgtaaagctgtttgtcgagcataaactttagaattagcacctattaaacctaattctacgtttgccaatactcgctgccaaggtaacagacgagaatcctgaaacatcatccgaacggctggattaataggtttatcagaatatttaccgtttaacaagacattgccatcactgggcgcatctagcccagccactagacgcaacattgtacttttaccacagccactccgaccaacaatagccacaaattctcctggctgaatctctaaatcaattccttgtaaaacagttttgttgccaaaggactttctcagtccttcaagatttaattgcattcctttattagtcatgttcaaaacctcttacttttggattgtttacttgtcatgggagtaaagctgtcaaataaaaataggcaatgcttatgtaacagttttctgagccgaaatccttagaaaatcaacatatttatgctcaggctttaagagatatgtaagattgacagcaattcatctcttttattaggttgagtatcacatttctggacaacaagctttagtaaagaagcatctggtattaataccagtatgcttgtttccgtgccattgagtagaatctccgataactttgtaggaataccgtagttttatcttagtatttcacaattatctaaaaattgcaagcatatttgagaaaaaaatattaaaaatagacataaaaaaatccccacttacttatgaggatttattccatacaaaaattttgcaattaatctattaattgcctacatcaaacaataacagaaatttatttttgagtattttttaacaaattattgtgatttataccctgattacaaaacttaattatcctaattcaaaccccaaattattcagaatttcttttaacctatgccgaccagataaagattcagccgatgctacccttttactagaatgttccgaccaatcaccaggaatattcatatgttgtgaattgtagaaattttccatgatttggttatattctaatattccttgctcttgttctgcaaggttatatatttctcgatgtaaaactacagattgcggtaaacgtggtttaattgctactttaacaacgggatctgcatagcccacacacaaaccaaaaacagcaactacatgaggaggtaaattcaaaatttgggctacctcttgtggtttatttcgcaatgcaccgatatacacagttcctaatcccagagattcagctgctactacagcattttgcgctgctaaagctgcatctatagccgccatcaaaaacatttctaaataatctaaaccttcgtgaggtagtccacgactttcagcaatatttgttagtctagctaaatctgctaaccatactaaaaagagaggactttggcgaatgtgcgcttgattattagctagttttgataattcttctttacgatttccatcttcaactgctaccacactccaagtttgaagattagaggaagtagaggcagattgggcagcagcgattaaaacttctaaagttcctgggggtaaagcatcaggtaaataagcgcgaattgaacgatgagatagcaaagttgctaatgtgtcactccagggaatatctggattaaatttgtcattaccatacctataatttagtaattcagttaggttagtcataacttttaactttcagaaaaataatgatagcaaagaatgaaaatgtctgaatcaggatgtccaggattaaaggattaacaggattaaagaattttaataaatacgaaaccctgcaaatcctcgaatcatgtaaatcttgatatggcttgcgctatattatcagaggtactttactaggttaaaacctgaaagttgtacgcagccaaccgactacactagcaggattactagcatctgagtctggtgctgttacccaaataaatccaggtgtaatctcaatattatcagtgagtttatatttataccatccctcaatgtgcagtgaagtatctttgtctgcttgacccttacctgctcctaaatctacatttgaacttaaacgagtcagtgttggtgcttgacccacaaagagagcgcctaagctaccttttttacctaaatcgggaaatgttattcctgctccccagttccagacttgaccatctccatgccctaaataacgatgggctgaataccccacaaaaccattgactgttaattttggatttagtctatataatgccccaattccataaaggtttcccacggttcccgcaccaggtacggtactatttgctaagttactaccagcagcaggtccaaagtttgttcctccttgaccaattgcacctggtggactgtaggtattagcgtaacttaaaccaaggcgaaaattctttttggggctaaagtaagttaattgtccaaaagccacatatctgcctgtaaacaaaccattattaggcgaggggtcattgccattaggggcgctataggatgctcctaattgccactgctcacttagattatgaagaatagcaattcccggtccggtatctccatagttgtacaccatattccgtcgggaaaatcgtgttatcccattagtgaaagaaccttcaaaggggttagttggtccacttaaacctatttcattagctccatctgactgagcaaaaatattaaattgggtctttttaccaataggaaaacgataacgaataccactaacaaaaacctgattgggttgagcaggattaggtctacgattatcggccgttctgccatcaaatgttcccaaaagtccagtcctagtttgtcccaaagattcaatatttccacctgaaaggactaatcgcagttgatctttaccagtaaaacttgtgtttagtgctaattgaactgcattttgaaatgtgatgatattaggtgctggttttttggtgatcacgttattgcccgctaaaacacctcccagtacgaactgagcctgaccgctcagtatagttgttgtcgaaaactgattggactctatttctgctgttcttgcttctaacttatctagtctcccgcgtaattgagcaagttcgctactaaattcttcagttagacgttgtatgccttccaaatcttcttttacagctaaatctgatgtggatgatgcaataagtttatttacttgatctaagcaagcgtttaatcctgcggcaaattcatagcgactcaaggcacgattacctttaaatgtactatctggataaccagcaatacaaccataacgttctactaaagattgcaaagcttgaaaagcccaatctgttggttggacatctgaaagttgggatacagatgtaagttgtgactcactatcttgaaactcattagatgaaaagaaaagttctgagttagtttctttttgggtaattatttgattaacgttgtcagagtcagggatatttatactgacggttgataaggtctctttacctgtcgtttccttttcttgccctctttcactagcagaagattttgtactagctgctaagaccaagaggaatatagacattggtaaagtaagcaataaattccaagcagtttttttcattttggttgataaccccacacacacagaattagagccgacacgaaattacgtagaatttcacactgaatcacaggaaaaaatcgaacttctcagatagaactttcttgtaggtctatctaggttagttttgtattattaatgacataaaagcctagagtaatgacacaattaccttatgtataaaattaatatacggtaattctatcaagatactgtagttaatgattgataagtagcactatttcataaaaaaactaaaatgtgagtattcatggatacattttttagaattttaaattaatttttacaaaggcttgtccatctagtttgggtatgatagtatagttgtcaagctattaactccgataaatcggtagatttagtgtatgtttaaaagatagcgatattattagtttttgtaacaaaatggaattaaggagcattattcaaacattatgaaatacaaccaacttcctggaagcgacctcaaggtttcagaaatttgcttgggaacgatgacctatggacatcaaaatactattgaggaggcgcatcaacaacttgactatgctgttgcccaagggataaatttcttggatactgcggaaatgtatccagttccccctcgtggtgaaacccaaggaaaaactgaggcttatattggggaatggttaaagaaacagcaacgagatcaactaatagttgcgactaaaattgcaggtcctggtcgtcctttttcctggttgagaggtggaaataataaagttgaccgtgagaatattacacaggcggtaaatgatagtttgcagagattacaaactgattatatagatttgtatcaaattcattggcctgatcgttatgttcctacatttggacagacaagttataatccagaattagaaagggaaactgtgcctattgcggaacagttacaggcgtttgctgatgtgattaaagctggaaagattcgttatttgggtttaagtaatgaaacaccttggggagtaagtgagtttgttcgcattgctaatgatttgggattacctaaagttctgacaactcaaaatgcttacaatttactcaatcgtaattttgaatcaggtttagctgaagtttatcgttatacagatgtgggtttattggcttatagtcctcttgggtttgggtttttaactggtaaatacatagaaaatcaacagttagaaaatacaagaatatctctgtttcctggttttgggcaacgttatttgaaacccaatgtacaagaagcggttaaggcttatgtggagattgctaaaaagtataatctttcagcgactcagttagcgatcgcatttgtcaaaagtcgctggtttgtgaaaagtacaattattggggcaacaactttggcacaattgcaggaaaatatagatagtgtcaatgtggttttggataaagagattttcgcagaaatagatgcaattcatactcgttatcctaatccagcaccttaaccgagttttgtaaaaaaatacaaagcgaaattctcacctcacttaatattagtggtggtgagagttactttatgaaaaaataatgttattatctgattttgttactattactgatgtagaagccgcccaaaaacggcttgtgggtattgctcatcaaacaccagtaattacctctggtactgtcaatgaactgactcaaagccaagtattttttaaatgcgaaaattttcaacggacgggagcatttaagtttcgtggtgcttataatgccctagtccaattatcagtagaacagaaaataaaaggcgttattacctattcttcaggaaatcatgcccaagcgatcgctttagccgggaaattactcaatattcccaccattgtagttatgcctgatgatgcaccaatagtcaaacaaactgcaactcgcagctatggtgcagaagtcattttgtacaaccgtgatacaactaaccgggaagaattaaccaaaaatctcgcagcagaacgccaattaactttaattccaccttatgattatcctcatatcattgctggacaaggtacaactgcattagaactaattcaagaagtgggacaactagactacttattggtatgttgcggtggtggtggattaatttctggttgtgcgatcgcaacaaaagcacttttacctaattgtaaaataattggtgtagaaccagaattagctgatgacgctactcgctctttttacagcaaaaccctgcaaactgtccataatccccagaccattgctgatggtgtcaggactcccagtttaggtaaaatcacctttcccctagtcttagaatacgtagatgatatggtgactgtatcggaagcagccatcattcgcaccatgttctttatttgggaacgcttaaaaatcgttgttgaacccactggagtcatagccgcagccgcattattagaaggtagcgttaaagcaccagcagcgagaattggcgtaattatcagtggtggaaatgtagacttagcgcaagttagtcaattattacaaaccacttaatcatttttcgtattactagctagagagctaattatttaactacttgattttctgtaaattgatatgttaatctgtatttatccttaaactactaattctcgataggtttaccgtatattaaaattggagtgataaaaaacacactccaaaatctaagtttttagcaatcggggaatcttttttatgccaaaagattggttagaatggcacgatctttacaacactgaacccaaattacagcagcgtttagaaatcgtgcaggaatatattttttatagtttagatcactccccaataggagctattcgggtagttagtgtttgcgctggtgatggacgagatttattaggaacattagcaaatcatccccgtactaaagatgtatatgcaagattagtagaaatcaatcctgggttagttgaacggggacgtgcgactatagaatcattgggtctaacaaaacaaattgagtttatcaatggtgatgcaactgctgctgataactatgtaggagcagtaccagcagatattgtcattgtctgtggtatttttggcaatttagctgatgaaaatgaactcaatcgtttattaggaaatctcagttttctgagtaaaaaaggcacatttgtgctttggactcgtggacattctaacggtattgcttattcagaaaccgtgcgtaaatacttccgtgattttggatttgaggaagttaactttaaactcacagcaacaggagatatgggagtaggaattcatcgttatttaggtgaacatctacctacaccaaaagaagaagaattatttgtattttccggcgttccaaataaagcgagataagaaatggccattgcaagcactaccatatccagttgggaacaattattagaaaaagctcgacaaaatacccccgcccgtcgagttaaaagaccaggacaagcaccttctactactcctattcctagtagtctgtataaacttccccctgagagaaaaccaccagtattgttatatagagatagtaactcttggtgtcctttctgcgaaagagtttggtttgcgttagaagaaaaacaaattccctttgaaacagaatttattgatctgagtaataaaccgaaatggtacacagatttagtgccaacaactcttgtacctgctgctaaaattgagggtaagttagtttatgaatctaaagatattcttttagaattggaagagcattttggggaaacgttattaccagaagatccagaagaaaatgcgatcgccagacaatgggttgaagatgcagaaaccaatggttttcgggatattgcctataaattcttgagacaacctccagaagatgccaaagaattagcaaatttacaagcagaatttgaagctaaattagatgaaattgaaaagactttagggagatatccaaaaccctattttttatcaacatttagcctggtagatattatgtatagtccccatttagatagattggcggctaatttaccagtatatagaggatatcacatcaaaggaaatcctcgttttcctctcatcaatgtttggtttgcagcacttaaaaaacgtcctgcttacaacagagttaaatcagacaacattactaataatttacttttaaggcggagatttggcatagaacctattggtaatcccttacctttagatttagctgaggctgaatttattgaatatcgtgcagaagcggctgaaagattaagtgataatcgagaagttgctattagcgatattctcaaaaattctggaattcaatctttaggtgatatctcaatcattaaagacgctgtggattttcacctacgattattagctgattatctcctgaatggtaataacgaattattaccaggcggtagaactggaggtaaagaaagtatagatccaattatcgctgctacaggggctattacgctggcttatatcagaaatagaatttgtgcgccacgagatatgagtgctggtgctgctactgcattacgagcagcagcagataaagtttttgcatctatttattgatttgataacaagaggaattaaaatgactgattttaaaaaggtgagcaatgatttgagtattgccggacaaatttcatccgatgaattaaaacaattgtcaatagaaggtttcaaatcagttttaaatttacgttctcctgatgaaaatggttttgttcacgatgaaaagcaggaagcacaaattgtaggactggaatatacaaacattcccttaaattctcaagcggcaaatcaaaaattaacagcagaagcaattcaagctattgagaaattgccgaaaccaattttaattcactgtgctggtggtgcaagagccggaggaatagccttaatagcagaagcaattcaagcagatttaacctatgaacaaattgctcaaaaagctaatgaattgggcattaatttagaacagccacatctcaagcaatttttattagaaaaatttgcagccagacaaaattaaattttcatctcaggagcaaataaaaattcaaaatctaaaacttaaaatctaaaactttgtgtctttgctcctttacctcttggcgcgaaatacattaacgaatccactgggtaaatttatcgggtacaactgttatgagtttagaactaaatctatcaggtaaaacagcaattgttacaggtggtagtgccggaattggattagctaccgccaaaggtttatatagtgaaggtgtgaatgtcgttattgctgctcgcaaccaaaaaagacttgatcaagcagtaattgatattcaatccttagatgatacaaatgctaaagttattggtgtgagtgccgatttaactaaagcagaagatattgaaaaagttgtttctacaacattagaacaatttggaaaaattgatgtcttgattaataatgctggttcagcccgtgcagggtcatttttagaattaagtgatgaagcatttctaaatgcttggaatttaaaacttttgggttatattcgctttgtgagagccgttgtacctcatctaaaaaaacagggtgatggacgtattgttaacattatcggtggtgctggacgtacaccccgtcctaatttcctaccaggaggaacgacaaatgcagcattgctcaactttacacgaggcatttctaaagaattagccctagataatattaaaattaatgccatttctcctggtttaacagacacagaaagagcgaaaactttagcagtgcaaaatgcagagagtttgagtattactgtggatgaatatcaagcccaagcagtaaaatcaatacctttaggaaaaatagttcaacctgaagaaattgctgcactagctttatttttagtttctgatttagctagttctattactggtgcagaaattcaagttgatggtggaactacaccgggagtctaagttattacgtaggttgggttaagcgacagcgcaacccaacattttcagaattttgttgagtttccttacgtcaaacgccattcgtttcaagccgggaaacccgtccacaacggtggcttcccaacctacggtttttcaataaattaaccttacaaaagagaggaatttccatgactcaaaaacaactattttcgcaagatagcgattttgatcaaaccttattagctgatgtgttagtaattggtggtggtcctgctggtacttggtcggcttggagtgctgctaatactggtgcaaaagtggttttagtagataaaggctattgtggtacaagtggctgtgctgctgcatcaggtaacggtgtgtggtatgtcccaccagaacccgacagtagagaagcagcaatggcttccagggaggctttaggaggttttttatctagccgtgattggatgcaacgggtactagatcaaacttatgcgaacgtcaaccaactagctgaatggggttatccctttcctagagatgaagacggtagactctatcggcgcagtctccaaggtccagaatatatgcgtttgatgcggcaacagataaaacgggcaggggtgaaaattttagatcacagtccggctttgcagttgttggtagatgcagaaggggctgtagctggggcgacaggggttaaccgtcagactggtgaaaagtgggttgtgcgatcgcattcagtgatcattgctaccggaggctgtgctttcttgagtaaagccttgggttgcaatgtgctaacaggggatggatacctgatggcagccgaagcgggtgcagatatgtcaggaatggaattttccaacgcctatggcatcgcacctgctttttcttctgtaactaaaaccctattctataattgggcaactttcacctacgaagatggtacacctatccccggcgctggttcgcaaaaagggcgttctgtcattgccgaaactttgctaactcagcctgtttacgccatcattgacaaagcatcagaagaaatgcgggtgacaatgcgtttatctcaacccaatttcttcctaccttttgatcgtgcaggtattgatccctttactcaacgtttccctgtcaccttgcgtttagaggggactgttcgaggcacaggtggcattagaattactgattatacttgtgctacttcagtccgtggactctatgccgccggtgatgccgcaaccagagaattaatttgtggtggctttaccggtggtggtagtcataacgcagcttgggcgctatcttcaggatattgggcaggacagtctgcggctacatactcccataatttaggtatgcaagccaaccaaagaccagttcaagctgtaggtggtgtaggatttatctctggtagtgagaagcaaattcacagtgaagacatcattaaagctactcaagcggaagttttcccatacaatcacaattatttccgtaatgaaaaaactttaacggaatcattgcaaagattacatttcctttggcataaaattcgtcatagtgaagttgcagataatagtaatattgtccgcacaagggaagctgcgggaatggtagccacagctagatggatgtatagcagtgccttggaacggaaagaaactcgcggaatgcacaaacatttagattatccacaaccggatgctaaccaacatcattatttaattagtggtggtttggatcaagtatgggtaaaagctgcacctatccaggaaacaaaagcgaaagaactcgtaactgtttaattgtaggttggagagccatcgccttggacgggtttcccgtcttgtggcgaatggcgtttgacgcaaggaaacccaacatgattacaacttaaattgaacgcagatgaacgcagataaagatggattaattaagggatttcaggattatgtgcagcctcacataaaattggcttaacccaacctacatcaatattaattttggttttttattatgattgaattagttagtgaatcccggtgcattcaatgtaatctctgtgtgaaagtttgcccaacaaatgttttcgataaagtaccagatgcacctccaaaaattgccagacaaagcgattgtcaaacctgctttatgtgtgaattatattgtccagttgatgcgctgtatgttgccccagacgtagacccattaacaggaatcaacgaagaatcattagcagaatctcaacttttaggcagttatcgtaaaaatattggttggggaaaatctgttacaaccacagctaaagaagactcaacatataaattgttggagaagatgaaatagaatatcaaaaataatcgaagttatcaattatgaaacgggagcatcccaattttgaaaaaataattgtagcaacactaaaaaatctcttaaactctcttagctttgagtcatttgtgtcctgtgcggttcaatcatatcaagtctttagaacattttgaccttagataaaaataaatttacacatttgggagactccctatgaaactgattttaccagtagaaattgcccatgagattgagccgcatttacctaaaaatactattgtattgcgtgtagatagtgagggtaatatagatggtgatgccacagatgcagaagtttattttagttggttttatctcaaaccaactactttacatcgagtattatatgcagcgccttcattacgttggcatcatgccccaaatgcaggtgtaaatcatattttgacaccaaaatatttagaaagagatttaattttaactaatggtgcaggggttcatggtatccctattgctgaatttgtgattacttatctactggcttattctaaacgattaccaagtttatataaactacaaaatgagcatgattggcaaagaggtttaccaattcaagaattattcgagaaaactttattaattatcggcgctggtggaattggtcaagaaattgcggttcgtgctaaagcatttggaatgcgtatttttggtagttgtcgtcatccaaaaccattaccaaactttgataaagtagttggtgctaatgattggaaagaactacttccagcagcagattttgtggtgattgctactcctttaacagcagaaacaaagggaataattgatgtggaaaccctgcgtttattccgcccagattcctatttaattaatattgcacgaggggcaattgttgatgaatcagcacttatacaggctttacaggaaggtttgattgctggggcggctttagatacagtatttatagaaccattaccagcagaaagtcctttgtggacattgccaaatgtgtttattacaccccattgttctggaaattctcctagagtcaaagagagaacacttgctttatttcttgacaatttcaaccgctattgtcaaggtaagtctttacgcaatgtggtagataaaactgctggttattaaataataataaatataaaataagtagggataaacgtaagtttgcttttacatttttaacgtagattacgcaggctatgcagtataacttatttagtcggttgggtgaaatagctacactattttttaaattgggtgttattggctttggtggaccagttgcccatattgccatgattgaagatgaagtagtgaagcgtcgtcggtggttgacacaagaccattttctggatttactaggtgcaactaatttgattcctggtcccaattccactgaaatggcaattcatgtcggatatatttatgcaggatggccagggttaattgtctcaggtgtttgttttatattacctgcggttttaataacagggatatttgcctggatttatgttaattatggtagtttacctcaaatttcacctttactttatggtatcaaacctgctgttttagcggttattgtaaattccctttggggtttagcaaaaaaagcggttaaaaaccgtcaattactgattattgctatagctgtaggattattggtattaattcggcaagtgaatgaagtaattgccttattgtttggaggattactaggtatgatttggttacatcctagaaatcaagacaaaccaccaggaaataaacctaacttattgattgctgtcttaactacaggggcaactttacagacaacatctacaattagcactgtggcaggtacatctattcctttatggcaattaggttggttttttctgaaagttggtagtgttttgtttggtggtggctatgtgctaattgcatttttgcaggggggattagttcaagaatatggctggttaacacaacagcagctactagatgcgatcgctattggtcaatttacccctggtccagtgctgtctactgccacttttatcggctatgtcttagctggtatacctggtgcgatagtagctaccattggtatttttctaccatcttttctctttgttgctgccttaaatccgattattccccgtttacgcagttctgcttggataagatcatttttagatgctgtgaatgccagtgctgtagcactgatggtagtagctaccttgcaactgggaatagctactttaaaaatagcaaaaccaccctatgtagatattttggggatagcgatcgcactcatctccacagttttgattactcgttaccgcattaatgctgcttggctagttttaggtagtagtttaattggttatggtgctatggctttaggctatatcaaataaaaaattgttgaatattttagcagagaaaattcacggaaaggatttttcagcaacccctaattagagaaatattttttttacagcagattggagattatgaagtacattagcctattgaacttcaagttttaaaactatcttctaaaattgacgtacctcatttactccaaaagtgctgtcattatttactgttaatcatcatcagcaggagcatttagctgtgaagcaattggttgattattttgaccaattaaaaatctaaaaaaacgattaagtcgcttcataccactcaaagtaattaaagtcaaaaatcctctgctaatgaaatagccgtagctttaccaattcccgaagatgctcccgtaataatagccaccttaccatctaatttacctgccatagtaaacacccattgattaattttaaagtacggtatcttgataaaattactgtagatttaaaattaacgatatcacagatcattagaaaaagcaaaaaaagtagcttctaatgccgtagcaatgtgtataaatatttgacttgtaattgtgctagagtcagcaagagtaagaggttgtccagtatcaccaccattacaaatacgcggatcgaggggaattttacctaaaagcggtgcttggagttcattagacaatttttcaccgccaccactaccaaaaatcggagtttcttcgccatttacgcccataaaatagctcatattttcgataataccgagaacaggaacacccacttgacgaaacatatagatactgcgacgcacatcagaaatcgccacttcttgaggtgttgttactaatatgactccacaaatcgggctttcttgcacaatcgtgatttgagcatcaccagtaccgggaggtaaatctattaacaaatagtccaattctccccattcaacatcatgtataaattgagtaatgattttatgtaatactggtccacgccatgctagaggatgatctggttctgccaacaatcctacagacatgactttgataccatgagcttgtaacggtaaaaatttctgaccattaacagtatcaataactgtaacttccgattgtcctaaccctaacatctgaggaacattaggaccataaacatcagcatctaataacccaacttttgctccttttaacctcaaagctgctgctaaattaactgcggttgtggatttacctacacctcctttaccgctagatatggctaatgtcgttttcactcctggaattgtacaaatttgaatatagatttttttacaccaagataatgatgataataccgctttaatctctgcttctaaatgctgttgacgagaacctatatacaagcgcaaataaatatattgatcaactatccgtagatttcgcaccattcccaaactaacgatatcgtttttcagactgggttcaattacttgtttgaggagttggataacttcttcttgtgggagatgggaagaatctctttgtagttcttcttgcaaaaggccattgttcaaatctgattttttcaacattttacggttatctggtatagaaaattacaaaactaataactaggtaacaggataattactttttttaaagaaaagcttgcatttcaattacctttatgtgatatattaaaaaatacggtaacttgattggtatactgtattttatcataaattgacctaaagtctgaataatatattgacctttagcactagagttatgttgagtaaattctctctattccgattatttgaagttggaatcacttttcttaaaaaatctaatattcgcaatttttccttattgtttgcagttggactaagcctaactttagctatttctgcttgttctcccaacgccagcgaaaacacgggaacaactcagacacctaattcaagtccaacttctcaagcaacaaatagcagtgtcgtagttcgcattggttaccaaaaagctgcaaccgttctttacgcattaaaggcaaaacgggaattagaagaagcgttaaaaggctctggtaattctgtgacatggactgaatttcccgcaggtcctccaatgttagaagctttaaatgctggtagtattgattttggttatacgggagaagcgccaccaatttttgcccaagcggcaggtacaccttttgtttatgttgcctatgatccttggactcccaaagcagaagcgattattgttcataaggattcacctattaaaaacgtagctgatcttaaaggtaaaaaagttgcttttgtaaaaggatcaaataccaattatttagtaatcaaagccctagaaaaagccggattaaaatacaccgacatcaagccaattttcctgaatccttctgatggacgtgctgcttttgaaggaaaaaatgttgatgcttgggcaatttgggatccatttttagctgcggcagaaaaagctactggcacacgcactctcacagatgcaactggactagcacccaatttaggttattatttagctgctcaatcttttgtagagaaaaatccagaagtgttaaaaactgttttagatggagtgaataaagtcagcgattgggcaaaaaataatcctactgaagttgctaaattactctcacctgttttgggtatagatgcggccgttctagaaacagcagaaaagcggcgtgattatggtgtattacctctgacagaggaagtaattaccaaacagcaagaaattgcagatgctttctacaaaattcaattgattcctaaagagatcaaggttaaagaagtagtttggcaaggcaataaataggttagtaattggtaattggtgattggtgataagaaaattgctaatcatcaattatttctaaaaatcttccttgactttctctgggtgagaaaaaattttaaattattgcaagagttgtatatggtaacaaacattaatacacagtggctaaaaaccgatgttttagtaattggtggtggtacagcagggacaatggcagggattaaagccaaacaggcaaatcctaatgcggaggtattgattttagagaaagcgaatattcgccgcagtggggcgatcgcaatgggtatggatggagttaatacagccgtcattcctggcaattctaccccagaacaatacacccgtgaagtcaccattgctaacgatggtattctacaccaaaaagccgtttatcaaacaggtaaattaggttttgaaaccattcaagaattagaaagttggggtgttaaattccaaaaagatcctcaaggaaattacgacgttaaacaagtgcatcgagtaggaaaatatgtcttacccatgccagaaggcaaagatttaaaaaccattcttactcgtcaagttaaacgccataaagtgaaagttacaaatcgcgttatggcaactagaatactagtaaaaaatagtagagcgattggtgcagttggatttgatgtgcgtggtggtgattttgtagttattcaagctaaagccgtgatactttgtacaggtgcttgtggcagattaggactacctgcatctggttatctttatggaacttatgaaaaccccacaaatgccggagatggttattcaatggcttatcatgcaggagcagaattaagcaatattgaatgtttccaaatcaacccattaattaaagattataatggtccagcctgtgcgtatgttgctggtccctatggagcatataccgccaacgctgaaggaaaccgcttcattaattgtgattattggagtgggcaaatgatgctagagatttggaaagaattaaactctggtaaaggaccaattcaaatgaaaatgactcatttggatgaggatacaatttcggaaattgagtctgttttatgggcaaatgaacgaccgagtagagaacgttttcatgaaggtagaggcgaaaactaccggactcatggggttgagatgaatatctcagaaataggattatgtagtggacatagtgcgtctggtgtgtgggtgaatgaaaaagcagaaactacagtaccaggattatatgcagccggagatatggccagtgttcctcataattatatgattggtgcatttgtctttggtcggttagcaggagaaaatgcgataaattatattcaaaatttagaatatttagaaccagatgttgattttttagaagctgaaaaagcgagaatttacgcaccattaaatcaacctaatgctattccccatactcaagttgaatataaattacgccgactggtgaatgattatttacaaccaccaaaatccgggaataaaatggaaattggactaaataattttcttcgctatcatgaagtattagaccaaatgggagcgcgtgatccccatgaattgatgcgatgtatggaagtacattttattcgtgattgtgcagaaatggcagcacgatcatctttatatcgtcgggaaagtcgttggggtttatatcattatcgcttggattttccagataagaataatgaagagtggttttgtcatgtgaatttgaaaaaagacgaatcagaagaaatgattttgtttaaacgtcccgttgagccttatgttgtagaggtggatttacagcaagaagtttataatgttgcagttagataactagataattagtaaatcaaaaactaattaaaaacctccttattttttgatagtcagtctacttgaataactagaactacctatgtcagaaaattatcgttttgaaaccctacaagtccatgctggacaagaacctgcacctggtaataacgcccgcgctgtaccaatttatcaaactacttcctacgtttttgatgatgctgaacatggagcgcggttatttgctctccaggaatttggcaatatttatactcgcatcatgaatccgacaacggatgtatttgaaaaaaggattgccgcattagaaggtggtgtagcagctttagctactgcaagcggtcaagcagcacaatttttagcaataagtacgatcgctcaagcaggagataatattgtttccaccagtttcctctatggaggaacttataaccaattcaaagttactcttccacgattagggatcaatgtcaaatttgtggaaggagatgatccagaaaacttccgtcaagcaattgatcaaaataccaaagctttgtatgttgaaacaattggtaatccccaatttaacattcctgattttgcagctttagcccacattgcccatgaaaatggtattcctttaattgtagataataccttcggtgcaggtggatatttagcacgaccaatagaacatggtgctgatattgtggtcgagtctgcaactaaatggattggaggacatggtacatccattggcggcgtaatagttgattctggtaaatttgattggggtaacggcaaatttcccctctttaccgaaccttcccccgcttatcatggattgaattttcaagaagtatttggcaaaggtagtcaatttggtaatattgcttttattattcgcgccagagtggaaggattacgagatttaggagcagcattaagtccatttaatgcttttctattactacaaggattagaaactctttccctgcgtgtagatcgtcatgtaaataatgctttagaattggctaaatggttagaacaacaagagcaggtagcatgggttaattatccaggacttcccaatcatccctatcatgaacgagctaaaaaatatcttcgacatggttttggtggagttcttaattttggtattaaagggggattagaagctggtaaagcctttattagtaatgttaaattagccagtcatttagcaaatgttggtgatgcgaaaacccttgttattcatcccgcttctacaacccatcaacagctaagtgagagtgaacaaatttcggctggtgtaacaccagatttagtacgggtatctgtgggaattgaacatattgatgatattaaggaggactttgaacaggcatttaagaaggtgacaggtgacaggtgacagtaaaagaaagtaagggtacagaggaaaaattgtctattccctattccctattccctattccctattccctattccctattccctattccctattccctattccctattccctactatatgaaatacctagacttcatttcaccaaaaactcagttttatcaactttcaaaaccattttcattagaatctggtaaagtattaattggtgttcaggttgcttatcgtacctggggaagattaaacgccaacggtgataatggagtcttaatttgtcatgctttaactggctctgctgacgctgacgactggtggaaacctttatttggtgctgggaaatcctttgatcctgatcaggattttcttgtatgcagcaacattttaggaagttgttacggtacaaatggagcaacttctattaacccaaatacagcaagaatttatggtgcatcttttcctagaattacaattagggatatggtgaatttgcaagccgcactattagaatatctggatgttaaatttctgcgattggtaataggtggttcactgggtgggatgcaagttttagaatgggcattattatatccagaaaaggtgagagcgatcgcaccaatagccgcacctggaagacattcagcatggtctattggtttaagtgaagcacaaagacaggcaatttatacagatccaaattggcaagggggaaactatacaagtgatgcacctccgaaccaagggttagccgtagcgcggatgatggcaatgattacttatcgttattgggagagttttacaaatcgttttggaagggagaaggatgaatttaatcaatttgccatatctagttatttacaatatcaaggtcaaaaactcatagaacgttttgatgctaatacttatattacattaactcatgcaatggatagtcatgatgttagttggcataggaaaaattatcaatctgttttgcaaagtatcaaacaaccaactttagttgtagcgattgattctgatgttctttatcccccagtagaacaacaagaattagtagatttaattcctaatgctcaattaggattaatcaaatcacctcatggacatgatgcttttttaattgatatggaggaattgaatgaaatagtagtttcttttaggaaaggattaaaattttgtgtttaatttgtttaattttcaatcaaattagggagttaaaaaattatggctttaattaatcaaagagtagatgttcctgtaattgtggatgaatctaaatgtttagaaaaatgtgttgcttgtattgaagtttgtcctttagatgtgttagcaaaaaatccagagacgggaaaagcttatatgaaatatgatgaatgttggttctgtttaccctgtgaaaaagaatgtccaacaaatgcgattacagtccaaattccttttttattgcggtagaggtgcagaaatgtttacagatacagattcagagttaaatcaatggttggaaatgttgcgatcgcctgatgtgagcgatcgcctagttgcggtaaaatctctacagcatctcggagaagatgcagcacttgatgctttaattatcgcactggaagacgaaagcaccccagtccaaaaaatagctgtatccgcactttgggaaattgccaatcctcaagcagttccagctttattaaaaaccctcgcttccccagatgaagaaattcgcaccgaagcattatcagctttaggtgaattaataaatgcagatgatttactgttattgttagatgcactaaatcaagaaaatatcaacctgcaaattaatattttaatcttattgcggaagatacatgatgttcaatctttacctgcggtgttatctttctttgattccaaatatccagaactacgagaagctgctattacaactttgcgctatttaaaccaagtccaaatctgtccaccagctttatcattaatcaatgatcctgatgataatgtccgtcgtgcaacagcattaactttaggacatttagcagatcaagaaattgtagatttattaactaaagcactaatttctgattttgattggcaagtacgacgcaatgcagctaaatctctagcaattcatgctaattcagcagcaattcccgctttaaaaattgcgctaaaagatgaacattggcaggtgcgaaaattcacgcttcaagtattacaaaaaacgacagatcaaaatttattacctgatttgattaaagcattaatagacgaatattctgatgtgagaaaagaagcagctatagcacttggtaatttagaaaatgctgatgctttaaatgcactacaacaagcactagatgatcctgatcgagatgtttgtatttacgcagaaagagcaattaaaacaataataggggcgaaggattcggaaaataaattttgacaagaaccgataattaacagaccgaatgcttcgcccttacaacttcgctaaatatgtacaaatttgctcctgcttgggaacaagaaacaatagtatttggtgcttctcaacctggatatactgataatcaggtatatgattggattgagtttatgaaatcacaaaatatcaagcgagtttgctgtttacttagtgataaacaactagctaattatgctcatcttttagatacatatcggcaagaatttggtaatcaacaaatttgttggacaccaattgaagattttcatttatctgatttacaaacactcacacaaaaaatactgccttttttaatcacagcaaatcaacaaaatgaaaaagtagttgtgcattgtgctggtggaattggccggactggacatatattagcggcttggttagtgagtgtgcggggattttctaacaaagatgcaatttctgctgttataagaacagggagaaatcctcatgaagctgtaatgttaagtgaaaatccgttacaagttgcacaagaattgaatttgttacttaataattgtcgcctagcattcttaactaattgaatactattgctgatttttcagacaaattcagcaatttataaacactttaccattgataaaataggtgatcatcaaaactattataaaattggaatctagcagttcctacaactaaattatttgccttttcatcggaggaaataacatgaactcgaaatagataaataccttcgctggtgggattataaaaaggttttaaaacgataataattgtttgatttgcagaaactggtttatcaaaagtagcaatgatagtttgtggttgagttgaacttttggttagggtaatacctaccttttctttttgtccacttgcttctacaaaagcaaaactgtttttctgatcaaattcaatattttctacaccttctatttgtgttaaaacaacctgttgcagttgccaattagctagagattctggtaatttgattgtaaaataataagttgcgtcccaagaacctgtttgattataggttgttttggcagttaacaacggttttgatggtatcccgtaggtagtatgtacagataataaaaagattcctgtactaatagctaaggttttacaaagagttttaccaagagttttaaagttgttcatgttttgaggatttgatattttaaataggtttttctattgaattacacccttttagtttagcaagtataagttaccaataattacacatattagttaattttaatcgtcctaattcctatctgattaggtggattaaatgagaggttatattgcaatactgctaagttaactaaattagatcagattctctcattgttgtttgggtaattttattaataaatgttaagtaattttatgttttttatctcacgcaaagacgcagagacgcaaagaaagagagaagaacagaaggaaatgaaagcatcaaatttagatccctgacttctttgaatgatcttcattatttacaaaaaatctaattaagaagtcggggatatttcgtacctggcttaactcatattcattatttgttaatttttctgatttgttgcatagtatcttgatagtctgtttctttaccttcttttttatagatattggcggctgtttgaaaatctttaattgcaccctgctgatctcctaattccttacggacaattccccggttgtagtaagcattggcatcgttaggattaatcttgatagcttggttgtaatcatttatagcaccttgcttatctcctaattcattacggacaattccccggttgtagtaagcatcggcaaagttaggattaatcttgatagcttggttgtaatcatctatagcaccttgcttatctcctaaatcatcacggataactccccggttgttgtaggcatcggcatagttaggattaatcttgatagcttggttgaaatcatctatagcaccttgcttatctcctaaatcactacggataactccccggttgttgtaggcattggcatagttaggattaatcttgatagcttggttgtaatcatctatagcaccttgcttatctcctaaataataacggacatttccccggccgatgtaggcattggcatagttaggattaatcttgatagcttgggtgtaatcatctatagcaccttgcttatctcctaattcatcacggacatttccccggttgtagtaggcattggcatagttaggattaaacttgatagcttgggtgtaatcatctatagcaccttgcttatctcctaattcattacggacaattccccggccgtagtaagcattggcatagttaggattaatcttgatagcttgggtgtaatcatctatagcaccttgcttatctcctaattcattacggacaattccccggccgtagtaggctagggcatagttaggattaatcttgatagcttggttgtaatcatctatagcaccttgcttatctcctaattcattacggacaattccccggttgtagtaggcttgggcatcgttaggattaaacttgataacctgagtgtaatcatcaattgcaccctgtttatctcctaaataataacgggcttttgctctgtaaaaataagcatcttcattatttggtttcagttgcaatacttgactataataaccgaaagcaccttgataatcttctttctcaagacactcataacccaagcgcatatattcatcaacttcagaagatgtcaaactttctaaatagctgcgtaaacccccagaataaagcaattcatctatttccaccaaggctttaccagtattcgagttaatcatatttgttggtaaaaatcccgccaaaatcagattgtattcagcctgagcttcgctaacttcctcttgaattaaaatacaaactagaacagcatttttttcaatttcttctcgactaattgaccattgaattttatcaaaattgccattccgggctttaacctgaataccaattgatgagtcagaagttaaggtaaaatcaacttttccatcaccaccaacgcgcttttcatagtcaacttccgtgacaaaatcagctaaacgggatttaacaacttcctcacccagtttccccttcatgttgttgataaagtaatttttggggtcggttggtttatactttttcaccatttcccagcaaaaatcccgtaattggtctaacctttgaccagaaatgacagttaattcactatgttggcctttttcgtcacagtggagtaatttagcagatttaagtctttgaataaaatcagtctgttgtgccttgagtggtgttgtccagtccatattggtttaaatttactctagcgatatttttaaatagaatgttaatgggaaaatttcagcttaacacctcaagatatcggacaggtaattgctcaagtagggtaaatttgtaagagctaaaatctatccataataatagtatagcgatcgctctgctttagtctaaactccaggctgaaagtacaataaaattatccttcatttaaacttcatcatggttatcccagaactcgaacaacaactccttcagctttcgcataacgataaactgtatattattcaactccttgcccaaagcctaactacaagcaataccaactcagaacaacctactaaaatctcagaatttttccgtcaatcccccctagctgaactcactgaagaactcgacttgaaccgcgatcgcagtctaccccgcgataccttcaacccatgacctaccttcttgatacttgtctaatttctgaacttgttgccaaacaaccaaatcaaaaagttttagattgggtagatgcccaaattccagaaacactttacctcagtgtaattactattggcgaaatcgctagaggcatctgtaaacttactccatctaagagaaaagaatctctcacaacttggctaaatgaaaccctacccaatcgctttgaacacagaatcttaactctagatgtctccacaatggtgttatggggaaatttaatctgtcaactagaacagaatgtccgacctctacccgctatggattctttaattgccgctatcgcacttcaacactctctatcacttgttactcgtaacgaaaaagattttgctgggactggggttatcatcgttaatccttggtcttgacttttagaaaaaatatgccacactaatatttagataaactaaacatttgaaaaaggaagtgtctccccatcgtgactagactaacgggaaacatagactcttcggtaacatctgcgcgagtcccacaatcagtaatattgcaaaccctggaactgacgcgccgctttgaaaaatttacagccgttgataatttgaatatctccgttgcatcgggagaagtttttggtttactcggtcccaacggtgctggtaaaagtacggtaattaaaatgctaactactttactgcccctcaatagtggtaaagcatacttaggtggttatgatgtgactcgtcaaccggatgcagtcagaagggtgataggttacgtaccccaagctttatcagcagatggtagcctgacaggttatgaaaatcttttaatattcgctaaattatacgatatacccgctagaaaacgacaacagcagattaaagatgtgttggaatttatgggtttagaggatgcagcacatcgcttagtcagaaattactctgggggaatgattcgtaagttagaaattgcccaggctattttacatcaaccgcagattttatttctcgatgagccgacagtgggattagatcccgtagcgcgatcgcaagtttggcagctaatggaacaactgcgtatagaatttggcacaaccatctttttaactacccactttttagaagaagcagatactctgtgtcaccgagtagtaatcatgaatcaaggtaaagaaattatcactggttcacccacagagttaaaagcagccatcggcaaaccagatgcaaccttagatgatgtcttcatccactacgcaggtaatcaattaatatcaggagtgagctacagtgaaactgcaagaaccagacgtacctctcaacaattgggttgaaaccagatataatcgcccaaaaggaattttttctgccatcaaagaattatttaccaaaaccctggtagttagtgagttagaggtaagaaaactgcgtcatgatcccagtgatttagtaatcagggctgtacaaccagctttatggctgatcatttttgggcaagtctttactcgcactcgtgctatacccacaggtgatataccttacctagattttatgactccgggtattttggctcaaagtgcgctgtttgtcgctatttttactgggggaatgacattaatttgggaacgggatttaggagttgtgcataaatttctggctgcacccataccccgcgctgccattgttttgggtaaaggaattggttctggtgtacgttgcttttcccaggtggtatttatttacctgttggcttttttgttaggtgtaaacctaaatcaccatcctttggctttcttgcaggtagttttgattgtgtttttgggtgctggttgtttttgcactttttcattaatcattggctgtttagtgaaatcacgggagaggtttacgggaattgggcaattaatcaccatgccgttattttttgccagcaatgcgatctatcctatttcattgatgccaagttggttaaaggtcatttctcacattaatcctttgacgtatgaagtggatgctctgcggggtgcgatgctggccaatggctcaagtatttatgggttcgggttagattgtacaattctcttgctaacattaataggtttaacctacatctgtggacgactttatccacgggtggcgatgtaatctggagaaaaacggtcttatgagtttggataaaccctctaaagaatgtgccgctagggtgatggaaactgttcccttattgatgcggtttatccgagccgaaatgcgatcgcacagtgcagactctttatctataccacagttgcgatcgctcgcttttctcaatcgcaatcctggagcttctttatcggaggtagcagatcacttaggtgtcacttgcgctacagcatcaacaactatagaaaaattagttcaacgaaatctggtgcaacgtacagataaccctcaagaacgacgacgagtagtcctgaatttgacgagagagggaaaattgcttttagaacaatctcaggaaaaaactcgtggggaaattgcggaaattctggagactttaacaccagagcaagtatcaaaaattgaacaagggttaagtctactaaaaaatgtcttcgagcaaacagaaacaaatcccccttaataccaaggctggacatgatccttttgcagccatgagatttcgagattatcggttatttactattgggcgtgttctcttgtttacagggggacaaatgcagactgtcgccattggttgggaactttatgaacggacaaattccccgatggccttaggtggggtaggactggcacaggttctaccgatgattttactgacattcatagcaggtcatgtggcagataagtataaccgccagcgtactaccttactggcaattttcatgctggcactttgttcactgggtttaggagttatttcttacagcaaaggggcaattttcctagtttatgcctgtttagcgtttatgggtgtagcgagggcatttttgaagcctgccagtgatgcgctgatgtggcagttgataccgactcatgtgtttgcgaatgcagcaacttgggtaagtagtagttttcagttagcgtcagtgattggacctgctttgggaggatttgcgatcgctcttttcaagagtgctaccccagtttatatagtagcggcgatcgcctgtctattatgtttcgcctctgttgcagctattaaacctcaaaaaaccgactttgccaaagaaccaatatctataaaatctttagctgcgggcgcggagtttgtttggaataatcaaattatcctggctgctattaccttagatttatttgcagttttattaggtggtgcagtggcattattacccgtctatgccaaagatattttacaagttggtccagtggaattaggctatttacaagctgccccatccataggtgcattgatcatggccgcattgttggtatatttgccacctatccgcaaagccggacctgcgttactgtggtcagttgccgggtttggggtggtaacaattatctttgggttgtctcgttgggtgtggttgtcgttgttgatgttggcattaagtggggcgttagatagtattagtgtggtaattcgtcatactttggtgcaaattaaaacccctgatcatttacggggaagagttgcggctatcaatagtgtatttattagtgcgtctaatgagttgggcggttttgaatctggcgcggttgctgctttatttggacctgttttctctgtggttagtgggggaataggtacgattttggtggtggttgtgacggcgatgatttggccggagattaggaagttgggcgcgttgcatgaggatttatagtcagaatcaggatttataggatttacaggatttgattatcttaggacttgtggacaagtcacgaaataatgaaccacgaagatacgaaggacacgaagttaagagggttttaaagagattttgggtaagtcctgtagctgtatttttttcatcctgttaatcctttaatcctgggtatcctgatatggcttgcgccacgctacgctatcagacattttcatctatctaggggttgctgagaaagtctttccgtgagggcataggagtcaggagtcaggaggagattggaaaatttctttgccatctcttgaaatcccaaaaaatgcacactttttccggtatacccttcaaaacccttgcactaatttctgtgtttatcagcctctaacctttgatatatcaaggttttaggtttattcagcaaaccctatctaattttccaaccagttctccaattgtaagttaggaatattacagcagttttcatgtctttagaccacagtaagggcgaagcattcggataatagtcttaggtaaaaaccgataattaattatccgaatgcttcgcccctactaaattttaaaaaaagcaaattatatttaagaaaaggcaagagatgatcctctcctgccttcggcatattcttgctgtatcaaatgccacttattattgattgattacccaaccgctacaggaactttataataaaccggctcattccctgctttccatttaatattacaaccaatactcggcttttgttcccaaataatttcctgatcagctaaaacataattaattgctttccgtaaatcttgtccagttacaggtaaaccatttttcggacgactatcatctaattgtccccgataagccagctttctattagcattaaatacaaaaaagtctggagtacaagctgcaaaaaaatctttagctgctttttgactttcatcataaagcaaaggataggataaatctatttcttgggcaaaatctttaagtaattctggtgcatcatcaggatgagtgttaatatcattagaactaatggcgacaatacccacatttttatttttgtaatcttgtcctaactttgctagttcaaatttgatatgttgcacaaaaggacaatgacgactaacaaagataactaccaatactttcttatcagcaaaattcgccaatgaaatcgttttacctgttactatatctgggagattaaatttaggtgctaaagttcccaaaggtaacattgttgaaggtgttaaaggcataaaatccaattcctttaattttccaattacaattatttaatgcttttaaacctaaaacctctctccaaacctctctccttgtaagagagaggctttgatttccccccttccctaaaagggaagggggttagggggttaggttaagctgctacaagattgggaatatatgcggaagaatctcctttaatggcttgactgaaacttttgtaaaaccttctggtttattctgtaaatcaatttcaatcaaatcaaaatcaatccccttttcttgaagtaccaagcgggtacggtgagcataaggacaaacaaccgcactataaattttaatgtcagccatgtttaaattccttagtaaattaggatttgtgtttgggaaatttgttgacatgaaaaacccaaatcttaaatagtcagtagttacttgcaataccgaaactgacgcagacataactatcgccagttatctgtgcatcacccttgagggggttgaataatttattgatgacttgagagaaatcagaaactacaaattgttgaccgatttatcggggattgtgttagtagtattgcatgactaaaaagaaatttcaagtggttttacaaaaaatctgtgtttgactaaatttatggcttacgaatgattagtatatctaaataatggttaagttatacttgagagcaagaggtgaaatcaagaacaatgaatacaaatactgagattactgggtttcatgcacatatttattttgataccgtcagtcgtgaagcggctgctcgtgtcagagaaggtttaggtgctaaatttgatgtaagattagggcgttggcatgaacaacctataggaccacacccgaaatcaatgtatcaagtggcttttttaccacatcagtttggtgaagttgtgacttggttaatgcttaaccgtgaagatttggatgttttagttcacccagaaacgggagatgatgtcaaagatcataccgataatgctctgtggttgggagaaaaactacagttaaatattgagtttctgcaaaggttgaaaaatatttaaacttaccaaaatgctttgtcgcacagtcatttttgacctagatgaaaccctaactgatcctaaatcggggattactcgctgtattcagtatgctttatcggaacttggttatcaaccaccagatgctaatgaattactttggtgtattggacaacctctaaaaagcatcgtaagttgggaaaattattttcatttatttactacctgtactctggagtttttatacctatattttaagctacttttattttacccagtagttaatacgagtataattgtactatatatttttcaaattgagcgatctgcttgcagcagcgcttcgctatcgcccactctgcacactctagaaccgtcaaatatttagaatctctaagaattagccgctaataaatttagttcaccatattttttataaaaaggtacttgctttttcatgagagttatgagattctactattaatctacgataaatcagtcgagatacagtagttttatcaacaacctaacgctaatgcctataactatagctaaggagttgaaaaagctttcccaacaaataaatatcaaatatgcggcagtcacattgacatatctgacaactgctatcccagaaaatttttatcatcctatattcattgagtaaacaatattacttggagtctgatatgggtaaacaacaaaaacaactaagactaggtgcatttttacccggagcaggtcagcacgtagcagcttggcgacatcctcaagcacggagtaatggcgctctcaactttgagcattataaacagatagcccagacagccgagcgcggtaaattcgacgcattttttctagctgatggtttagccttacaacatcgtcccggtgcagaaggccggacagcctttggtggagactttgaacctgtaaccctattttcagccttgtctgcggtgacagaaaagattggttttatcgctacagcctctaccacctatgaagatccctatattctcgcacgcaaatttgcttccttagatcatatctccggggggagagccggctggaatgtagtgacaacaggaagtagtgaagctgctgggaatttcggtttagaagcccatcctattcacgcagaacgctacatccgcgcccacgaatttattgatgtggttaaaggtctttgggatagctgggaagacgacgcttttgttcgtgataaagaaacagctttttactacgaccccaataaaatacatccactgaaccataaaggcagatttttttccgtgcgcggaccattaaacattgcccgtccgccccaaggtcatcctgtaattgtgcaagccggttcttctgaagatggtaaagaattagctggtaaaaccgccgaagttatatttactgctcaacaaaccttagaagatgctcaagccttctacgcagatgttaaaggtagattagcaaaatatggacgtactccggatcaactcaaagttatgcctggtgtttttccagtggtgggactaacagaagcagacgcacaagccaaatatcaagaactgcaagatttaattcatccccaggttggtttggctttattacaaggactgatagggacggatctttccgcttatcctctggatgaaccactgccagatttaccagaaaccaatgataacaaaagccgccaagcattattaattgatattgctcgtagacacaattttaccattcgggaactgtatcaatggattgcaggagcgcgtggtcattggacaattatcggtacaccagtacaaattgcagatcaactagaaagctggtttctcaatgacgctgctgatggctttaatattatgcctccttatcttcctggtggattagatgattttgttgatttagtaattcctgaattacaacgccggggcttattccgcactgagtatgaaggtacaactctgcgggaaaatctgggtttatctcgtcctgttaatcaatttcaaaaggtattagcagcagtttaaataattgggtttcgcgcaaagacgcaaaggagcaaaggcgcaaagttttagattttaaatccaaggttgagcgaatttgcaattacaccaaactaaagaaaatttattgttcccttagatcccgtcagcacagacgttaaaagcctaccgaagtccatgcaactatcggaaagttaggcttgtccaaaagacaagaatgttcaatctcacgtattaaacccaagtcaaaatcaacagcatgatctcccacagatccccgattttttgaaaattcataacttttaaattctgcaattgtttgagaagtcagggatctaagttgtcttgtaacttttctaaggaaaatatgactaaatatagcaaattgaaaagctctccctccgccgcagttagagccaatctggattatcctgtcattgatactgatgttcacactaatgattttactcctgcccttgaggattatattgctcactacggcggtgtgaagctggtagatgaattacgcaaggctgaatcttctcgtcttaatcctaagagtgaaggtaaagactggtatcaacaaactccagaagaacgtcaatataaccgcacattaagatcgccttggtgggctagagttactcgtaatactttagatttggctacctacactctccctgcattactctatgaacgtcaagcggagcaaggctcagactattcggtgttatttcccaataatgccttagctgcggctggtgcaagtaaggagaatcggcaattattgcaacgggcaattaatcactatcatgctgatatttaccgcaaatatagcgatcgcctaacagtagtagctggtatccccatgactaccccccaagaagcgattgaagagttggagtttgctgtaaaaacactggggctgaaagtggcaaatatccctggtggtgtgagacggccaattaaggcgatcgcagataaatacccagccgatcaattcccagaaattggcaaatatgcctcttacattgactttttcgggctagatagcgaatatgactatgatcccttctgggctaaagccgttgaattaggtgtacctctcaccacccattacggtagtcaaggatggactggacgctcctccattagtaactacatgaacaaccacatcggtcactttgctgatggttcacaagcatttgccaaagcattgttctttggtggtgtaactagacgcttcccccaattgcgtatcggtatgttggaaggtggggcagattggggcgctcacgtctacattcatttagtagaccgtttctccaagcgcaatttagaaggactgcaaaactataacccagatttagctaatcctgatgagttgtttgagttgtttgcacagtatggtggagaaattactcaaggacattccctcagcaaagaggaattgactaaaagtgtactaggagcttccttcaaccgtcacagtcgttcaccagtgggtagcgaattggaagattttggtgcagcagggattcaatcaattgaagatatacgcgatcgctgggtgaatagtttcttctttggttctgaatctgatgatcgtactattgctgcggcattcaacgataaagccaaccccttgggagtcaaaattaacgctatttactcctctgatgttggtcactgggatgtaccggatctcactgcacctttagctgaaagctgggatttggtcagagaaggcgtaatttctgaagctgacttcaaagcttatgtatttggcaatccctataaattctacacccaagccaaccctgatttcttcaaaggtacagccgtagaatctaaactacctaagaccgaatctcaagtagagaacaaaaccttggtgggtgtgtaaatgacctggtgaggttgcgccaaaaaaaaagagtatccaatcttctgggatgggcatcctgcccgtccttgataattagcttttcgtcccgcaccaccagaaatttttggatgttagcaccaatatagggtttactgaggcttatactaactcatcaacaaacaagacaacgtagaattcgctatcctatcgttaaaaagcgtacttcaccttcacgtaaagcccagccaaaaactgattgatttctcattttttgaattttttactttgctttttttcaactcagctttcctgagtcattttgtgtttttagtctaaagttcagtcattacctacgtcaagccaaatttttagttttcataggaacttttcatgattacaacatcttctcagagggttgtaagtaagtcggcatgaaaaaaccgatgtacgtaaagaaatgtaaaactgcttaaaatctctttcttcctaactcctacctcttactttgtcataaggacagtctttaacgcctacctactgaaatattcagcattcagccattagctaatggcacactatgcgttagtgaagctttcgctttagcatacagcaataccagtctgtgaatgtctcttgtggaattaggtaaaatacggatttgatattatttgcaagtacaagtataaacttcttataaaatttatgttattgatactatgctgaatgttaaagttttagcacaaagcctgaaaaatatttggtgaggtgtatagtgatcaacttgtgctggtgctgtgaggaatgatgatgagtaacgcgctctctatagttgctgtcaccgcagtgctgaaagacttactggaaaatgggctagtcagtgattcaattactgctagtgttggtgatgtgctggttactgccataccaccggatttaattaaagtgggaagtgatgagcgggcgcaactcaatttgtttctttatcaagttacccagaatcgcaatgttgattggatatctcaggaatttcgtactagacactctagtattaatagtataaataaaagtccgcgttatgtaaatccaccactggctttaaacttacactacctattaaccgcttatggtgctaaggattttcaggcagaattgctactgggttatgcgatgcaattattacacagaacaactgttatttcctcagaattgattggaaatgcattaaaaaccgcagctacaagtaacagcacaagtctgatttcgcaagctttggctggggtatctgtatctgctctggtggaacaactgggacagattaaactttctcctgaatttttgaatatggaagacagttctaagatatggtcagctttacaaacccactatcgaccgtcaattagttatcaagcttcgatggtattaattgagagcagtaacgcaaatcaatctgaggctgtgcaatgaaagcaacaaaaatcagtcacaattggcaacagtggtatgaaggtaacgaatcttacttattagcggccttggggatggtgcgtggtgcgatagaagcatctgctcaaaaaacacagccatctgaacctagagaacaacagcagttgggagaacaagcgttacaagctgctagggcgggaatgtcagcaccaccagcactagagcagatatgtaaattgtttggtctgactagctttgagagggatatactgctgatgtgcgcctgtatggagttttatggagactttgcagctgtctgtgctttagctcaaggagactcacagcgagtttatcctactttgagtttggctttagcaacattaccaaattcccattgggatgcgatcgcccctgatagtaaattacgatattggcggttaattgagttaggtgaaggtagagcgttaactcttagtcctctgcgaattgatgaaagaattttacactatcttatcggtacacaatacctggatgaaagattggcgggaattgttgaacctttaccagaggcaggagaattagtcgcttcacagcaacaaatcgccgaacaaatagcagccgtctggatgcaagcatctcaaaaagaaaagttaccaattttacagttatgtggcattgaacctactagcaaacgagcgatcgctgccacagtctgtaaaatgctaggaatgacaatacatatcatgtctgctcaagttattccttctgctccaatggagatggaaactttgttgcggttgtgggaaagagaggctattctcagtcaaagtgctttattgattgactgtgataaagttgacattacagaaggcgatcgcactcatcatatcggacgttttctagaacggattaatggttttgtgttggtgacaagtcgggaacgaatggcaatacagcaacgcccagtagtcagttttgatgttcacaaacccaccaccgaagaacaaaccatactctggcaaaaaaccctatcccatctagaaccgcaattaaacggacaagtcaaaaaattagtagcacaatttaaccttagtcctaccaccattcgcgctgcttatgcagaagcgtccggaaaattagcccaggagcaagaaaaagatatcagcaggattttatgggatgcttgccgcaaacaagcccgcccccggttagatgaactagcacagcgtattccccccagtgccagatgggaagatttagtattacctccagcccaagccgaaatgttaagagaaatagcggctcacgtccgtcaacgagctacagtatatcaaacctggggatttgcagctaaaaatactcgcggtttagggattagtgccttattttttgggggtagtggtacaggaaaaaccctagcagcggaagtattggctcatgaattacacttagatttatatcgtattgatttatcatcagttgtcagtaaatatataggggaaacagagaaaaatctgcggcgggtatttgatgcagcagaagaagggggagtgatcctattatttgatgaagcggatgctttgtttggtaaacgtagcgaagttaaagatagccatgatcgccatgccaacatagaagttagctatttgctgcaacggatggaaagttatccagggttagcaattctaaccacaaacctgaaaaattctctagatacagcttttcaaagacgaattcggtttgcaattcaatttccttttccagatgcagtgcaacgtgcggaaatttggcgacgggtttacccaaaaagtacaccaactcatgatttagatgccaagaaattagcgcagttaagtgtgactgggggcaatattcgtaatatagccttaaatgccgcttttttggcggctgatgcgggtgagccagtgcagatgaaacatttattacgagcagcgcggacagaatacgctaagttagagaaatctttaacagaggtagaaattggtggttgggtttgaggagagaaaattacacttaggtcgaaagcgatcgcacctttgcccgtaagaaaacagccacatcaactttttaccattcgtcccttgtctcacccacaactccgacgctggcaaatccagtgcggggctttggtttgacaacaaataatgtcatgcaaacagcaactgaagtatcaactcaacagcaaccagaacagtctgaacaacaagccatcaacgaacagcccattactcacgacaaaaaataattaataatcaaataaataaactagaatctaccttgctgaatcaagaaatcaaagaagatataaaaaaaatattgatgattttttaaagagttgagaatgatcaaggaacgggaataaataatgtcaggtgaacagtgcgatcgcctatctgttgtaggaggtgttactgcgatcgccagctattccatctcaaccccaaaaactagactaaagtcgaaactgtcatacctgtagctaagtgagataatatttaattgattacctatgtcaatctgtgaggtgagcgatgaaacaaaggttgcaaatttccaaaaaagctgactccttggctatccagtcagaagaaactcagtttcagtcacgcccatctactaacaaaactcaacagcacacaaataaaaccctgtcacaaacagacattgaaaatcaagaatttcaacaaaatcaaatagaagcgacaaaattacaactgcaagctaaacatggcaccatcaccccagaaggacaaacacaactgaccctgttacaagccaaaatgaatgatgtgttatatagtcgcgttcaacaagggtatggttttggtcacaacctgggacaaatagcttttcgtcatcctgaaaaaatatcatcttctggttcaccatcactggtacaggcaaagttaaatattagtcaaccaggagaccaatatgaacaagaagcagatacagttgcctcgaatgtagttaatcaaattaatcaagataccatccaaaaacagcaaacttcacagactgcaactagccaaaatgaagctggcaatgtggcaacagcagataacagcgccgctaatcccaaacaacagtttttgaataatcatgtagtagggaaggaattagttaaaggcatagatgaaaattcaccacaggaaaaaatcctagaacaattgttgaataatttcaaaaacatatcatttaaatacacaatgacttataaacaggggacaactctgttaacaggaacaagagaaggagattgtagaaccttagctgaagcatttcaaacagtagcgcaagaatattttggtattccaaatgtgacgattgaacaaattaagaaaccctgtttaagtgaagcggacgaaactgtttaccaaggcagaaagcgcaattgtgatcatggtaagaggtggttcttccaaaatcattattgggctagttggaatggcaaaatttatgatgtcttattcctaagtaataaacccctccaagtagacatggcaaggcaagaaaacccgctaaaatcaatgttgatgcctgaaggtgaatattacgagacagaaaaaggcaaggttgtatatccccgtggtaatgaatatttaactgtcgaactgagtatgtttgagaagttgaaaaaccttgtgaaaagtctaagtagtttaatgtctagaaatttggattctatcactaatagaattagggatttattgactagaggtggtaataataatagtgattttgaatcactgattacagaagtacagaagaacaggactagcgtagtgacacaaaataatcaaaatcaatgatttcataagctgttacatcctaatattctggagtattatggaacaggcaagatggctgttccacttgtaggatttaccaaaaagggtgaggtgcagagtttttgggtcttagaggatgttttaaaagtagtattccgtaacttttatcacattgttacttcccacgtagaggtggcatcaaaaagttatctgtgaagactagggaaaagggaacagaatacaaaataccatcgatccctctcaaaactaccactttcctgaactgtcctcttgttgcaaacctatcaactttcttctttgacaagcatagttaagtatattaattcctaattcctgggctgtgcgaatagttaaccggggtaaattaaattctctatctattccccatgcagatgctaaatcaccaactactaaaattattcccccacctaagaataattgaattaactgttgattgatgatcggtaaagccgcaaataaaaaaggttttgtccttaaagggtgacttcttcgtaactctgttaatggtcttaaaggactttctaattgttgtgctaaggcctggatactttcaattaaagcattagcatctaaaggggcatcaattaacaatgtgccacctaaatttaaataattccttagtgattctaactcaacattattcaaagatagtgactctctacctgtaagataaagtaaatcatattcttggatattttctgatagggaaacgtcactaggttcatcagcaccgcgcaaatttgggtataaaggttctacggattgcagtaaataagcaaggttgaaaaaattgcgggcatattcaccatcactatgagaaacttgtgctattctcactaaggcttgaggacgtgcctgggcatgacgacgataacgtaaatcaatattattataaccaggataaaaagcatccgctggctgactaattgaattttgtcctggttctaaaagtatgcgacaaatttctatttcggaaacatctggtgtagagtttctttgatcaatacgataggtttcttggacaacatctctttgctgtccacgccgtaattcattaggatctacatagctgactactaagtaaatcatcagcggttcagaagtagctacttctaaatcaatgggaaagtcataagatgtaggtacaactatcaaattgccattcatatcaatagcaattcctggttgaatttgtacccaacgtccatctcgatatttagcttctacttgacggggtgcaggaattggccgcacacctaaaccacaaacaattcctggttgatttaaactttgatagtgggtattttgacgcagacgatgatattcatgagctttactccaacgttctgcattaatcagtaaaccatcagttggttgtaacctttctaaaggttggatgtgtggaggtggaaaaggatgagtcatttgattttggattttggattttggattaacaaaaaacaaatggaatttagatattcaattactaaaatttcctatcactaaatcataagtacaaaaagcgggtttttcttgctcaattattcggcgaattaattgttcattgaggttcatattccggtgatgggggcgcaaacaaactagaaaatgaaatggttcaccacctgctaaaactgcactacctaattgtgctgtacccaaaacaaaacttggtccgaagggttcggtaatactaatatgtttatcagtttcattaggtatgtcctcatctaaaggtaaacctgtataaagatgtaaatataaccgcaaacctttacgagttcctcgccaacgataaagctcaactgcacgacgaattaaacgccgttgttgatgtaaattccagactgaatctacttcccaagccacccagtgagctaaaaatggtaatagtgcttttggtgctgttaaggggtcaagatttgcccataagacgttaaaactatcaatggctggttgataagcctgttcaaatattttcatgaagcgaccaatcaagtctacttcccgatataaaacaggtaaaaattccatgtaggaactgtagggacgaacatataaatcaaagtaatcgctgtgttgaatttgttctctctctgttcctgagtcaatattaataacaactaagctgcgaaaattcagatttaatttatcttgttgtccgggaacaattgcctgttgatcttcaaaaaagctggcaggaacagaaaaataaagtacagcatccatttgtccccgtgggggaatttcactgccttctgtgccacctatttgacaccaatcagcaggaaagttaccttcaacttttaaacttaccctcacaggccgttgttctaagttctgtacttgcacaaccatttcgctgggttctcctggatgcaagactaaactctgtgctgctgcatccatgctttctgtccctgcaaatgttaaacctgctcctggtactgcttcaggaatttgcattggggttaagtgaatgcgaatagcaggactggaacgactttgcaccataaaatctttccttaaagtttgttgatttaaagattactgatttggatatcatgcccagaacgcaggttattatcagcccaagaacagattaaaccttgtgcgccgggatctattacttgttctggggaagattgccgcctccatgtatctccttctttgcggatagcaaatagcaagactcgccctaaataacggacaccgggggtttgctgcattaaggcgataatatctgaggtgtaaactggtcttccaaaaggccaacctttgccttctaagcctccagttaaggggttgagatatttatacagggatactctcagatgacgaaggatttctgctctggctagagggttgttataggcaggttctaaaattacctctgtttgtacagaaacacctacgtattgtggttcttgcagttggatttgtacacctaataattttctctcatccaagtattgcagaatttgttcttgtagtgcgggactcagagcaaattgttgtggtgcaataccttcgccaaattcaattccgtctgtattggcatagggaacaatcagtaaacctactgtacctgcttgtctggtagcattggctggtaaacaccgcaccctggcgatcgctcctgctcctgcttgttgtgttaaaacttcaaaatcttctgctgtgactgctcgatcacgggtacgcaggatgcgcggcgctctgatgactgcttgttctagagattccccatctgcaccattaatggctggcggataatttatgacactacccacatagggaaatgcggactttaaaaattggagtgcgccacttttgacgttaccttctctaccacctcctgtgcgataagtcagcattctgatttctgcaccccgtggcggtacggctccatattgatgttcttgggcgttatcaatatcactgaattgtacaacggtgtcttctgtgctggattgttgaatgcgcgatcgctgttttgtttggcgtttgagttgtcctggttctcgaatcaatggaccaaactgcacagcaccagtaatagaatcaatggtgtaatggcggtcttggggtccagaatcagcgaaatctctcacttcctgccaagtttggggtaaaccgccagggggagtgacaacaatatactcattttctcgacgttctaacactggtgtcatgagtaattgaaaactttgccctggtttaccgttacttatacccaagcgttcatcttgaactagggtactatgggtagctctaacagtaccacctatagaccgcactcctaacccagtgatttgcggtggacgattataaaccccttgattgctacctggtgtagtataccgacagcgtagccagcgtccacgatacacggtaaaagtcgttacaggccaagtttggggtaaatgcagccgcacatcagcaccttgggcagcattactaccttgttgttcaatttcgtaaaaactgaaacctctggtatggtcgtctgtttctttgaataacactggttgccaattttccccatcccaagcttcccagtatcggggcggttgattgggatcaattcctgtcggtgtggctgctgctccctggaaagtaatttctaacacattaccatccaaagctgcatcaccattaattactaaataaaaacagtttcccggttggggttgttcgttaaatatagcttgttcattaccagtccagaaaccgttgttttgacgagtccaggagtttaccagtctttctcgcagagattggggggtgtcttctgtcgtttgggctgttaaaaaatgctgaatgtagggtttaccaataattaaaggtgaatctgtactaaaggtaatagctggtgtagtttcagtgcgtaccgtggaaacttccagacctgcgggaatggtgtatgcttgaggtagatcagaacttaaataaaaagttaattctgtatgggctggggctggtggttgcagccgaatacctaataattctaaaaaagcgacataatttttacgtgggacttggttaaacctgagtaacatttggtcagttaaccaagcaaatacttctatcagcgtaatccctggatcgctcaaattgtggtctgtccattcgggacagtagcgcgggatacgcatgagactttcttccaccaagtcatcaaaggtgcgatcgtctaagttagaagtaggtaattgtggtaaaaagtcaaatttcatatcatgtctatttgaatagttatcatatctgtttggatggggaacagggaacagggaacaagagaattattagtaattaacagggcttaatattacaagttactccccagcagccagcaaatagaatggataaacaaagctctgaatatcagcataatccttgagccgatagttgataatgatctctactttgcccagcacagggtcaggttcggtcaacacctcatctacaataattctgggttcccaaacttccaaagcttctaaaacatagagacgtattcgcagtaaagtatcagtattcaatggcgcaaaggccaactctgacaagcgcgaaccgaaattaggccgataaactcgttcacccacccctgtacgaaggataatccagatagactctttaactttttgagcgtcactgctgagttttattcccccttgcaagttcaactgcaacgggaaagcccaaccagtacctaaataatctctttcgttttgttggctatagaccataactgtcagaatcaggtggttatcgagtttggactacgctcaactaccgcgacttgtactgagtggttagtgagcgtagtcgaactatgtcgaagtaagtcgagataatatccaggatttcaggatttattagatctttaattctctaagataccgacattacaggtataagcctattcgccaaaagtcgagtaattcattgggaattgggaattgggaattgggaattgggaatagataattatccaccgatcaaaactgtcatctctcctttgacaattttattagtcggacccaatgcttctagaatggtatcgcccatacgacaggcgggtaaaccattgattaatactgttttactaccatcaataactacacctggtccgtggggtggtatgggtaagggtgtagcacattgatgaatatctgccattcccggaggtgaggatgcagcagcagcggaaatcatgctactcattgtcgccgaggcggtggctttggcagcttgttcagcagctagggccgctggtgcgcctggtgtacctgctgcggctttggtggcagcttcagcggcttggatggctgtatcgcttgcttgtttggcagactgtaaagcggcaactgcggccgctggtatccccctccatgctggtaagttgcctatcagtacattagggctaccgggtccgcctgttaatactgggggtaagggatgggctacgttatcggtaattcgggctgctggtttggacataattagagttaggagtcaggagtcaggagtcaggagtcaggagaatagaattacacaaaatatctctaaaactcttatttctctgtgatctctgtgcctctgtggttcgttattccgtgacttgtgcataagtcattattaatttaatttaattaatgaacctttgacagttattacgccattagctttaatgtcaagatttccctgggcttctattgacatattgcctgttgacttaatagtaactgatttactagcgtcactcattttaatgctatgcttcccagaggtttctattgaaattgttttacctctgtcatccattttaatagtatgaccgccttttgttttaatctcaataaattgttcactatcattgagataaattttgtgtccttttgtggtttctaaacgaatacctgttttacttcctcctttatcttcttctacaaattgcatggtgtgtcctgtgcgggttttaaaagtacgtaatcgcacacctttaacaactgaatcatctactttttctggtggtgcatcttttccattccacacattaccaataatgtaaggacggtgaatatctccatgttcaaaccctactaaaacttcatcatttacttctggtaaacaatcaaaacctcgattgggtcctgcacccgcagttacaactctagcccagtgactttcatgttcttcactgagtgtaggaaactttacttttactcttccccaacctttgggatctttattattggtgactattcctatgagaaaagtttgtcctggttgtaggtgtatttgtgttgataaagtagaaaataagttacctgatcgtaacccccgcacactaaaatttgtggtgtagactctttgattataaaagtggcgtgtttcggtgacataatattttccactatagcgatcgcccatatcttgaatatttatcactctccctggtctaattttgggatttccataagcttgagcatctgcataaacaaattctccccccagttcatcacacaaagcttgagccatttttttagcttcgttttctgtagcaactggttgatctacaacgatcatttttgggttggatggtttacctttgaatgctgtacttgttttgcttcctttgccatttcctgtttctgtaattactttttctgctgttacttctgaggtaattaatttcttttgggtaaagtcccaacttctcacttctacagctttcacttgttctacattggtaacacgcacactaaatttactaatttcatttaaccatttcaggtttaaagattcctgactttctggttgacaaaagtttaattttccatcctgaataaataattcataacctatccgcgccgccctttctctcaaaaattccatgttagtttggttttcttgaaacacatattcatggtttacgccactagaatctattttacctggtgaaattcccgtttctcctataatttgtttgactatatcgctatccatttgattcaagaaagaacgattataacgccctctatgcaaccgatgggaaacatcataaccacgaataataatgggtgcttcggttttttcattaaagtgaacttctattcctgtcacttccccttcaattaaattctgttcgtcttttttcttaaaattactatcttgggtagtgctagaaataaacccaattttgatttgtgtgccaattttaaatagcttttcgtgtctccattcttggtattctgcacgttcaactgtactcagataactattatgtattaccagggtaaacattgctggtaaatgcagactctcttctacggtaatttctaataaatctttcattaattccggtgaagcgtcttgtccttctatttgaattttcggttcacttaaatacaggcttttgtctggcataggattttagtttttatttcatgagataaaatgtatatcaataatttggttaactattgatgaattagtaatcattaaacacagatgaacgcagataaacacagatgattttggattttattagcctagaaaatgctatattaaatccgcgggtctgggtgtctttctgcaccttgagatgctgattctctacctcctggcatattatttttatcgacttcttgtaaggatatatctactattgcccttactggtgtaccgtcattcaaaaacatatttaaggtgtaagttaaactggtcatgacacaataaaaatattcgcttccccaagttaatatgtaaacaggtggacgtttatctggtgaaccattaatagtttctactccttttttgatgttatctatatactctttcattactgattttttggtttcataggtatcgaatattaactgttttaaggtaaatttataaggttcaacaccggaaaagttaactttaggaagtaaggtagtacctctatttccttgctgacttgaccaatttactgttctagaaaaactaatatctgcgggattaaacattaattcaatgtctggtgcttctccgttataagctacgagttttgcttttaccagtttttgatttgccattttatttttcctccttaatacagcagtttatttttaatccaaaatctaaaatctataggaattacgcacaagtcacaaaagaatgaaccacgaagggacgaaggacacgaaggaaagaaagttttagagagattttgcgtaagtcctgagctaaaatctaaaatagaattaccaaggtagacgacctacatattttccttgacgttctctttctatttctattctttgtcttaatctgtaataaatttcttgagctaaagcttcaagttttgcattatcatctttattattttcattactttcattttcttctgttggtaaggatgtgtatgggttttgtatcgtctctgttatcggtgtgatatcccttgatatatccggtgctgtaacttctcctccatttgcaaaaccttgaggtgtagaaagacgtttggtgaaaatatgtgatgcttgtgatgtgtctgatgatgcaacttgagaaaatggtgcattttgccagttactctctctactattaaagttataattattgaattgattactactactatttaatagttcttcaatacttgtccattcagatggtgtttgtgtgttggtatttgaattattcttacggaaaattaaagcaggtgatgaataattggtggttgattctgtgtaagtgttagttgtattttccactgaatttatttgtgtattaagttgtggattaatttgtagagagttcattctggaaagtctttgtttcccaatttccacacccaaggaaggagaatttaaagcagtcggttcttcttgttcagcttctttgcgttgcaatgtattatcttgcaaagaatctactttagtcgtagagtctgaaaagttggtttgttcaggcgttttgctattagttacatctaatttaggcgagattatttcttctggtgaaccgccagtattaatatgtttaagtatgtggatatttttctgtgcatctttagcgttgatgacaaattctcctggtgtcagcattgcaggtactgtatcagaaggtgctactggttgatgattttccactgcggttgtggtgacttggccaccagtagcataacctttaggtgctggtaaagctgataaattatttaagacggtatttgcttcaatgtcaatgttagaatttttgtcttcattgtcttgaggagttgaattttctgatatatctgatatatctgagtgattgacaaaaggtgataaatcaaggttttcaaatgccaaaattgactctgatattgattctgatgcggttatttgttccttgtcaatgttatttctcaaaatcggcaaattatctgtattttttggcaatgatatattagatatattagatatatcagtattctctggtttaattatagctgcatctggtgtataaagttcttcagattttggtgatatggttttggaagtaacaggagtaatttctgtgttctcttctgtgatgaattctgtaatttccgatgtttgattttctgaggtaatttgattatttgcttcagaagaatttaattgaatatctggtgatatggttttggaagtaataggagtaatttctgtgttctcttctgtgatgaattctgtaatttccgatgtttgattttctgaggtaatttgattatttgcttcagaagaatttaattgaatatctggtgatatggttttggaagtaataggagtaatttctgtgttctcttctgtgatgaattctgtaatttccgatgtttgattttctgaggtaatttgattatttgcttcagaagaatttaattgaatatctggtgatatggttttggaagtaataggagtaatttctgtgttctcttctgtgatgaattctgtaatttccgatgtttgattttctgaggtaatttgattatttgcttcagaagaatttaattgaatatctggtgatatggttttggaagtaataggagtaatttctgtgttctcttctgtgatgaattctgtaatttccgatgtttgattttctgaggtaatttgattatttgcttcagaagaatttaattgaatatctggtgatatggttttggaagtaataggagtaatttctgtgttctcttctgtgatgaattctgtaatttccgatgtttgattttctgaggtaatttgattatttgcttcagaagaatttaattgaatatctggtgatatggttttggaagtaataggagtaatttctgtgttctcttctgtgatgaattctgtaatttccgatgtttgattttctggggtaatttgattttttgcttcagaagaatttaattgaatttttggtgatatggttttggaagtaacaggagtaatttctgtgttctcttctgtgatgaattctgtaatttccgatgtttgattttctgaggtaatttgattatttgcttcagaagaatttaattgaatatctggtgatatggttttgggagta

SEQ ID NO: 26 - DNA, 58931 bp, Sphaerospermopsis sp. LEGE 00249
  LEGE00249_41
agacttagctgctggtgaagttgctcctgttgctttgactgctcctgcaatcaacggttaatctgaaactgggtttaataagcttagttaaataagaaaataccctccagaaatggggggtatttttttgtcagaatcaggatatccaggatttaaggatgtacaggatttgatatttgtgatgatttacaacgattttcaggtaaataaaccacatttttaaatctcacgcaaagacgcaaaggaagaaaggaagaaaacaagaagggtgtggtacaaatacatgaaaactgctgtaggtaaaatctctcaaacttcttgcctttgtgtactttgcgtactttgcggttaggtaaaaaaatttagatactctaacgatgagatagaagtaatttgtttttactggatgttttttacacaggtaaacgtccggtgatgaacattttatagccacctgacatgagaattaatgagagaaaaaattgccagaggctggtaggattaaggatagctcgactactcataaatacaagaataattcctataactatgggtatccagcctagttctttcattcctctggggaagaaaattaagatcatcactcctatagttagtgcaagtatggatgtgtctgctgctattcccctccaccagtaagggtaaacattagttgtgaagatgatgttttgtccaacaaagtagatacctaatatcagcaaaccaaagccgataattctgagtaagaggctcatgattattttagtctacaagtttggttataatttagcacacagtatattgatattgtgagtattgttacattagtacaacaagctttttttgtctgatagcgtagcgtggcgtaagccatatcaggatttccaggattaaaggattttcaggatgatgattttcagaagtttcaggaaggtaggaattaatggtataaaggattaccttttggctgtttaaaggttgaattttaaacaattttcataggtgtttatctggaatcctcatttttacttatgaaatattcagaaatgccccaaatctcttgttagcttcttctcaaatacgttcatattttaaccatatacaatatgattatataagttacattgattttttcaatcaatatattgacatagtagaagaatccttgcaacaacaattagtcaatgagttaattagcagattgctacaactaaacgataatgaacgtcaagtttattggaataaggttgaatatttaagcaaaaatctagaatataataattttctttgggaaattgcaccaatagaacgaaaactaacaattatacgagaacgtttcaaaaaaatactggagattatttctcgttttcaggatagtgaatatccttatgcagcagatatttcggatagtcggcatgaattatataaactgaacgaattagaaaatgtgttaataataaagtgggattcaaatgtaattgataacgaatttaaatctgaaaaaatgatttcagcgcggggtgctgagaagttagtcatgcaattttatcaaaaattgggttatgaagtagaggatatttcaattcatcaagtaactcaacaaagtcaagactggaaaaagggagacatcaaattaaactcaacagagttaattgatgtaaaaaatagccgtaaatcttataattcagattcttactcagaattttgtgtaccctcttttaaagaatttcgtgatcatgatgtcaaaattgttggtgttttatcaccttacctgcgaaacgatgctgataatcctaagatattaggttcttttgataaaactcaactcataaaaatagaagaaatatttagtgacagattcattaagatagatatgcctagagagaaggatataaatagatatttgccaccttgggtatttgactatgatgatcgtttttatcagcagcagtatcaaattttaacagaattacaaaatttaaaagagcatgatattccaagttgggaagatatgtcatttgtcgctcaaaattttttacctgtattcatagctgcaaaacgtccattaccacagtattggattgataatttacctaaatggcaggtagaatttattaaaggtttaattgaacttccaccagcaagaataactttaccatacttatttttgtctatattgaggcattttttatcaatcctttcctatcaaggttcggattacaaccctcaaaaatatttagaaattatatgcacaacctcatctaaagaacacccactgaaaatatatgaccccttgaatattatcaaagatttttgcgaaacattacacactctttggaataatcgagataaagaaataaaaatatcaaaagcaatctcaaaattaactgattttaaaatttttacgttcattggtaaagaatggttgaaaggtcaacgttcagaatcagacactaaaacaacaattttggtttactgtggtggttttatatggaaaacaaggaagtctaaaagaaagtgtggatttagacctttggttattggtaaacatcagaattgtccaaagtgtggatgtttaagatgtgagaaatgtggttattgtagctacaactgttctaaaactatttcgttaagtaagcccataccgcagcatttaaattcggataatgttcctttttgaataacagtagaataagatggtatactcaaaaatctgtggtctacataatcaacatagcgtcaaaaatccccaactccatgtaaaatacataattcagactgtatttcctcaacaacatgggtagcacatttggtcatcttttccgaatcacgacatttggcgaatctcacggcggcggtgtgggtgttataattgatggttgtcccccacgactggaaatttccccggaagaaattcaatttgaactagacagaagacggccaggacaaagtaaaatcacaacaccccgcaaagaagcggacacctgtgagatattatcagggacatttgaaggtaaaaccctgggaacaccgatcgctatcttagtacggaataaagatacccgttcccaagattacgatgagatggcgcaaaaataccgtccttcccatgcagatgctacctatgacgcaaaatatgggtttagaaattggcaaggtggcggaaggtcgtcagcgcgtgagactataggtagggtagctgctggtgcgatcgctaaaaaaattctccgtcaagttgcaggtgtggaaattatcgcttacgttaaacgcatcaaagacttagaaggaaatgttgatacaaacaccgtcaccttggaagatgtagaaagtaacattgtccgttgtcccgatggggaaattgccaaccaaatgatagagttaattgaaaaaacaggtagagatggtaactctattggtggtttagttgaatgtgtggtgcggaatgttcccaaaggtttaggagaaccagtttttgataaattagaagcagacttagcaaaagcggtaatgtcactacctgcaagtaaaggttttgaaattggttcaggttttgacggaacattattaacagggtttgaacataacgacgaattttatattgatgaaaacggagaaattagaacattaacgaaccgttctggaggtattcaaggaggaatttccaacggcgaaaatattattttacgagttgctttcaaaccaaccgcaactattagaaaagaacaaaaaaccgtcactaaagaaggagaagaaacggttttagcaggaaagggaagacatgatccttgtgtgttaccccgtgctgttcctatggttgatgcgatggtagctttggttttatgcgatcatcttttaaggcatcatggacagtgtaagttattgtagagattttcaaattcagaacttaccaaataactgaaaatctctctcaaactctcttttcttcccttccttcttgtcttagtggttcatttgtaggaaatagaagaaaacaaaccgcaaaggacacaaagaacgcaaaggaaagaggttagaagaggaatttttagttagtcctgtatgatatcttaattgagatgaatactgaataaaaattttttgcttgagttctttctttgtgaactttgcgtactttgcggttagttataaattaaaattcatgcctcccatcatcttaccttctcctctgaaaccaggtgatttattgcgcgttattgcccctagtggtgctttacgagaatttgcagcttttgaacaaagtctggaaatttggaaagcgcacggttacaatatccaagttagcgatcgcatagaaagtagacatggttatcttgccggtactgatgatcaccgtcgtcaacaactagccgccgcatggcatgatcccgaatgtcgcggtattatctgcgctaggggtggttttgggagtacccgcattttggaagattggaactgggaacaaaaaacagcagatcctaaatggttgatcggtttttctgatatcacagccctgctttggagtctctataaggctggtatttccggtgtgcatggtcccgtactcactaccctggtaaatgagccagaatggtcaataaaacggttatttgatattttagcaggtcgagcgatcgcacctttaaagggtaatggttggggtggtggtacggtgacaggggtgctacttcctggtaatctcacagtagcaactcatcttttaggtacaccgctattaccggatctagatggtgtaatattggcttttgaagatgtgacagaaccaccctatcgaattgatcggatgttaactcaatggcggttaagtggtatgctatccaaagttcgcggtattgctttgggaggctttaccaagtgtgacgcacctcctaatatacctagtttgagtatagaggaggttttgggcgatcgcttatctgatctcaatattcccattgtttctgatttaccctttggtcatgatagccctaatgcagctttacctgtgggggtacaagcaacattagatgcagatcagggaatattagaaattgtccatgaaattaactccatttgcgataacaacgagcagtaattaaataaggatgaaaaacttctacaaatttagtttgtaatgtctgaaaaaacctatctagcaattctggttcatcatggtgaaaaggatattcttgattaaaacctttaaagaaataccaattcataatgatttttcctgcatcatctaaagactgatggaatgtaagtaattgctgaataggatctggtaaatgctctaaaacatcaaaacaaacaatagtatcaaacatttctgaactaggcatttcttgacacaaaattatttttttgtctaaccctaattgtttagctcgatattcgacaaactcgcaattaatcggattaatatcaaaataaaacacctctttaacatttggcgaaagtgcagcaccaatagcatgagtaccaattcccccaccaaaatctaataccctaccttgggcatatttggcaattaatagtaaagtattaccaatataatcatgactgtttaaatgccatgctccaagctcaaaaagatactcattttttacctgatcctgatagaaagctgtagctttttcccagtcaaaatctttatggcctaactcagccatttctttttgaccagcagctaatttactttctaatgtttgctcatccaaacttaaaaattcctgaagatgttgctttaaactaaaagcatcttcccaaaagctatttaaaaaagatggaataggtggtgtgatcatatttttctacctgctgaatacaataatttagctaaatcatgggtaatctttgatattatgcctaaaagcacatcaatttcatcaatttcataattatatcggaaattgacctaaactactgtatgattctaagtacacactctagcctaagtgctgtacctttgtatttttaacatattttcattgataggagatcaaaatgcctagtgttcaggaaaacttaaataaatggtctaattacgattggactcaacagggtaatgaatggtcgagttcatggggtggaacagataactgtttttttggaactatacatccgcgaattaaaacctttattcctgagacaaaaacaggaacaacaatattagaaatagctcctggttttggacgttggacacaatatttaaaggattattgtcaagatttaattatcgtagatttaactgaaaagtgtattgccgcttgtcaagaacgctttgcagattgttctcacattacatatcatgtcaatgatggaaaatcattaaccatgattgaagatgaatctattgatttcatttttagttttgattccttagtccatgtggaaaaagatgtcattaaatcctatttacaacagatagccctgaaacttaaacccaatggtgtaggatttatccatcattctaacttgggcaattatctcaatcccgctactggaaagctagaggtagaaaacattcattggcgagcagaaagcatgagtgctaaactatttgagcaatactcccaagaggctggcttacaatgttttcaccaagaaatagttaattggtgtggcgatattttgtgtgattgcttttccttaattacaccaaaaaactctcaatggagtcaacccaatcatgtaattgaaaatccgaattttggtgcagaagctcaacgtttacgctaagtatcataaaataattggaggtaagcaagatgcttaccccaaaagattttgaatattttgctgtcatatcatgttcagtaaaaacagataaggaataagcaaactattgattttttcttatctgtgcaaaatcttctcaaaccattgttctacacgagcgcccattgctgccaaagaatataaactctctgcttgctggcgacaattttgacgatcaatagtgtgtacccgtttaacagcatctattaaaccttgtacactatctggctcaaccaaaaacccagttttgccatcttccactatttccactaaaccgccccgactataagcaatcaccggtactccacaagctaaagactctaaacctacagtggggaaagcgtctatccagtggggagtagctaacatagcttgacattccctcagtcccgcttgtaattcgtttgtagagacaaatccttggtaatctatctgtgcatcgggatacgcttgacgaacttgctgccaatattcctcattttgcatcaaaccaaagatttttagaggcattcctaaagtatttgctgctgctaccgcatcttctaaacctttttctggtgctatgcgccctacccaacctaagctattaccaggttgatcacaaaactgatacaaagacaagtctaatccattaaacaaacaaacacattcatcagggcaaggaaaagtggcagcttgtgtttttgagtgaacaccaatagcatgaggaaacttagttgctaccttggcaatcatatcatccatcgcattcagtaaagaactcatactaattaaatgggctactggacgaggaaaaaattgcgttaaatataatggcaaccaatcatagctaaaattcaaaattaaatcataatttccctgtacttgataagcataactccacatatttgctaaaactgaatttgtgggaatgccaatttctgcatcatacttttgatcttgggcggcattttgtgtatttccgggtatttctatcaaaggtaacgaaccactgcgagaacctgctggtgcaacaatatctattgtgtgtcctctttgctgcattgctttgacaatattggggagggtgacttctattccaccacctaaccctgaacccaatgcaccaacacctgtggacataaataataatttgtaagtcggttgactcatcattaatatcctcaattaaaaattgcagttatcatcatacatgagtaactctacaaattaaataggaatactatatttttgtgataatttttcagcctccagtgattaattatttttgctttgacatcgggtaattaatttaccaatctgagttttatatattgcggctttgattaaatgcgtgcaagcatgatatatgtagccatttaattaggctataaaattttgagagttaatgaatataaatcacaaattacgatatataatgatcaagtgaaaatccctaataaatcagcaattttctcagccaccaacatgaaatttatcaggattcggttttttaattccactcagaggatgttcacaacggtaatcatcttgatttcttgtttcctatttctatttagttgtcagcagaatattcaaaaagataataatatcattcatgtgactttatggcaaggaattaacccgccagtgaatcgggatgtattcaataaattagtagatcaatttaatcaggaaaattctcatattcatgtagactcaattttcacaggtacaccagaggaacaattaccgaaaatattaaccgcagtggtaggtaatgcggctccagatattttaaatttttctccccaaataactggacagttagtagaattaggagcagttgaacctttagatgattggtttaatcaatcagccgccaaatcggaaatttatccgcaagtgatagaggaattacaattagatgatcacctctggtcagttcctctttatactgctaatctgggcattttttaccgaaatgatttatttaaaaaagcgggaattagtgaaactcctaaaaactggcaagaattaagggaagttgccaaaaaactaactattgatcgcaatggtgatcaacgtccagaacaatatggaattttattacctttaggcaagcaagaatggactgtgtttagttggtttccctttttattaggtgcaggtggtgaaatattaaataataaccatcctaacttaaataatccagatgctattcaagcattacaattttggcaagacttaattaaagatggttcagcaactctttctcccccggaaagaggttatgaagaagatgcttttattcaaggtcgtgtagctatgcaaattactggaccctggacgtatattaagaactctaatgttgattttggtgtgtttcctattcctgaaaataaagtacgggctacagtcataggtaatggcaatttttatttaatgaaaactacaccagaaaaacaaaaagcggctttggaatttttagagtttgttgtcagtaaacaatttcaaaccgaatgggcaatgggtactggttttttacctgtaaatatcaaatctgcacaaagtccagaatatcaggaatatctcaaatccagaccttggttaaaagtgtttgtagaccaaattcctgtggctggttctcgacctacaatagctggttatagtcgcatttctgatagtttaggtagggcaattgaagcaacattactaggtaaatcttcccctgaagccgctctaaaacaagctcaggaacggttagaagtgatttggggagaaaaataggtgattggtgattggggactggggagaaatatttacctcctgactcctgactcctcaattatcaattttaacgttttattaagttaagtaaagcaagtgttagagcttttggaggataggactcaagcgtaatctgaggatgataagctaaacagtgaaatataaaagtgacttaggatgtagtgttaaatgggtgtttcctcaacagttcctctcctccttagggctgcacgcggtgaaaaagtagatcgtccccctgtatggatgatgcgacaagcggggcgctatatgaaagcgtatcgggacttgcgggagaaatatccttcttttcgggaacgctcagaaattcctgaagttgcgatcgaagtttccctgcaaccttggaaagcttttcaacccgacggcgtaattttgttttccgatattgtcacccccttacctggtatgggtattgacatggatattgcggaagggaagggaccgattattttttcgcccattcgcacacaagcacaaattgataacctgcgtcccctagatcctgaagctgctttaccgtttattaagaccattttggggtctttacggcaagaagtcggcgataagtcaacggttttgggttttgtgggcgctccttggactttggcagcctatgcagtggaaggtaaaggttctaaaacctattccatcattaaaaacatggctttctcagatccaaaaattctgcatcagctattaactaagttggctgagtccattgctgattatgtgcgctatcaaattgattgtggcgctcaagtggtgcagatgtttgattcttgggcaggacaattaagcccccaagattatgatacctttgctttaccttaccaaaaaatggtgtttgatttggtgaaacaaactcatcctgacacaccgttaattttgttagtgactggtagtgcaggacttttagaaagaatggctacctctggtgcagatatcctcaccattgactggacagtggatatggcagatgcacgcagaagactgggtaaagacgtgaaagtacagggtaatcttgatccgggtgtgttatttggttctaaagaatttatccgcgatcgcattttggacactgttcgcaaagctggcgactggggacatattcttaatttgggacatggtgtattaccagaaacaccagaagaaaatgtcgctcatttctttgaaactgccaaaaatctcaacgctttggtttagtttctggtttattgggtgggttttttacccacctaatttttagggaacgcagatgaacgcggataaacgcggatgaagaaattcaacaacacaaattaaaggaaaagttatgcaagttactttagatattcctgaagagttggcaagtaaattacaattatttcaacagcaattaccatagattttagaattaggaattagagaattaaatgctgcttctcaaccagggttttcaggtatggcagaagtgttagaatttttggcacaattaccaacatccgcagaaattattgctttacgtccttcagaagaattgcaaactcaaattagtaatttattagaaaaaaatcggactcaaggtttgactgctgctgaagaaatgatttgggaacaatatcaatatttagaacatttggtgaggatagcaaaagctaaagctctattaaaattaaaaacagaagcataaataatttataaataatttatttaataaatatgagtaaatacattccatctgctctaaggtagtgatataggatcaattgatccagtaacaaaattattgacttcattatataatccacgtcaagataattggcacgaacattttcaattaaatggtgctgaatttatacctttaacagcagtagtaagagtcactgtaaaattattacaaatcaatcgtattgatagattaaaggaacgagaattacttatacaagctggtatattaaacccaccattattttaatataaattcataacattgtgtcgtcaatgtttgggtttttgggtagggttatatccccgacttctgttgttaatcttttcatttattcagtttaataatcatagaagtcggggatctttggctatgttattttttagtaggttaacggtaatatcctgtacatcctttaatcctggttattatctcgacttcgctcgataaccacctgattcagacttaatatttttctgtaatctttaaattctacagtccacaagtctcaaggcgagagaaaagaactcctctccctaaacctcccgtattccatcgtaaccgtgctggtaagtggccttctggtgcttttatatcaaaagtaatatctttgtaggataaccagtaggataaccattttccctcttttctccatcctagtctatcaccaaaggctatccaaattttctcatcataatttctagttccccccaaactttgataaatccgtttctgtacagaaaaaccaaagcgccccttactatatttgatccataatttgtcaatagtgtcgaggtcattacagggaaaattatcaatacttggagtatctaaaaaaccttctttttcccggtttgttactgctaacattacccgcgctgtttcctcatctgcttctttccattgacctgtagataataattgttctagtttttgatatcgactaggtacagatggagaagaaatattaacagatgtttggttaataggtatttgtgaagtattttgttgatttataggattgatatcctgcatcacgtctttaacagattgataacgatatttagcaataggacttgctaatttttccaaaatctttcctaattcatcacttaccccattcccatttaaaaaatctctccatacccattctccttccatcggactatataaatcaaacggactaactcctgttaataaatgcaaacaagttacccctaaactatataaatcactaataaataatggtttacccattgactgttcaggggcgcaatattcagcagatccaataattgtccctgtcgctgtgcgttgctgtggtttgactattttcgctgccccaaaatctactaaaaataacttattatcactactaagaataatattttctggtttaatatctcgatgaattacttgtttactatgaacaaactccaatatttgcaaaacttctattaataactttttaatttgctgttcagaaaaaaccccatttttatctaactcagtttgtaaagtttcccctttcacaaattcctgtactaaatattgacgattatcataagtaaaataagccattaattcaggtatttgcggatgtttacctaactcctctaaacgttgtgcttcctgtgcaaataactgagatgctttttcaatactatccgttccctgtgcttggggtaaaaattgtttaattacacaaaaaggttttgatggtttatcctcatcaatagctaaaaaagtcctcccaaaaccaccttgacctaaaattgataaaggtacatatctttcctttagcagtaacttattaccgcacttttgacaatattgaaaactatcaggattagaaaaaagacagtcaggattaagacattgacgcatagactcaacaccaacacactgttataattttaccctaattaattaaaacctacgcaaaatctctcaaaacctcagattcccgacttctttaagaagtcggggatctatctgctcaaatcatgctataatcatacaccgttatcaaaaatccccaaaaacccaacatcaatgactaaacaacgtattttaatcacaggtgcaagcggctgtatcggtcattatatcagcgaaacattaataaaaaacacagaacacgaattatatttattagtcagaaaccccaacaaactacaaattaacgctcaagcacgtccaggaatcactattttacaaggtgatatgcaggaaattagtaatttttccaacctcctaaaaactatagataccgcagttttaaccgccacttcttggggtggagataacatttttgatgttaatgtcaacaaaaccatagaattaatgaatctgttaaacccagaaagatgtcaacaggtaatttatttttcaactgctagtgttttaaatcacgaaaatcaacctttaaaagaagcaggagaaatcggcacagattatattagttctaaatatgattgtttacataaaattgaacatttagaaattttcccaaaaattactaccgtgtttcctacattggttttagggggagatgatcaaaaaccctattctcatttaacttcgggtattcctgaagttactaaatatattaatatcattcgttttttacaagctgatggtagttttcattttattcatggtcaagatattgccacagttatacaatatctaattgattatccaccacaagcaggagatccgagaagatttgttttagggcaatctgggttaacagtaaatcaagcaattgaagaagtttgtgaatatttgaataaaaagatttatttccgcattccgttatctttgggtttagcgaatgtgattattaaaatatttaggattcaaatggcggcatgggatagattttgtatgaattatcggcattttacctattctcatgctatcaatcccgcgagttttgatttaccaaattactgtgcaactatgagggatgtgttaaaaattagtggcgttaaaagtgggaaataaatatgtgagaagttatgaggatgagatagggcgatcgcctagtaatttacagcagttttcatgtctttagaccacagtaagggcgaagcattcagatgatagtcttaggtaaaaaccgataattaattgtccgaatgctgatgcttccagcacgcttcgcgaacgcacctacattgttgacgcgaaacctaaatcaaaatgtggtttttttacctgaaaatagctgtaaaaggcaaggcaaaagtatatagggtttgctgaataaacctaaaaccttgatatatcaaaggttagaggctgataaacacagaaattagtgcaagggttttgaagggtataccgaaaaaagtgtgcattttttgggatttcaagagatggcaaagaaattttcaaatctcctcctgactcctgactcctgactcctaactcctatgccctcacggaaagactttctcagcaacccctatatagaccattattcaggaagttgttttttcaaactttctaaagcagaccaacgtctatcaacctgcttttcaccaccagcagcagtattatctaaaatacccggacaattgcgatcgcacaactgacgctgaggaatagctaaacacatttgctcatacagccattcactaggataaaaataaccatcaggtgaaagcgtttctactaaatcttctatagcaacttccctttctaatggtaagtcttcaacttgattagcattagcatctaaccaaataatttctttagtattaacagccaaacgttgattatattgctgcaaacagcggttacaggtacaagtaataattgattctgcctgaccagaaacttctaaataattaccctgatgctggacgcggatagttccacgcacaggggttaaagtttccagtccaggcagagactcgttcacttgaatttcctctgtccgttccggggctttggttagctgcggaataaaaatagcgtccattatgatgagtgagatatcctcacaaaaaattatggttaatgatcagcaaaattgctgatagctgatataagaattcaggggtcaggaggaggcagtgcggcggacgggttacccggcataaagcaactgccgttcaggagtaagaatgtttgataaattggtagattatcaaaatagggagtttaggcgcaagctttaaaaagctgactgctgatagctgaatacttatctttgattttagctttaatagccgggatctgttggtggttcagtcgcaggacgaactaccaaattacgatggggttctttaccacggctaaaggtttccaaatcaggaaattcctttaaaaagctgtgaacttgtcgccgttccgctgaactgagggatctaatttccacttctcgtccagaaaaacgcacttcttgagccgcagttctagctaaagcagttatttccgcttgtcgtctgacacggtagccattcaactcaatggtataagatgtctgctcatgttctggctgatgcaaatttagtaccgaattagctagatactgcatagcatctaacactgaaccaccagcaccaatcaaaactttgatttgttctggcatcaaattcgattcatcaatagtcaaccaatagctatcaggttcttgagaaactgcccccagagtaggagcagcctctaaattacccttaacattagtagagattccagtaagttgcagcaattgtgttaaccattgttcaccacgctgcatagaaatttcactcataattagcctgtagcctttttcttagaactttttggttcaaagggcaaagctttaacgtctacagttgccgcttgttgttccttttcttggatagctacaattttttgcagttcctctggtagaggttcgcgggaaagaatgtaggtttgcagggtttggaaaacgttaccaattaccatgtacattaatacaccagcaggtagcgggaagaataaaaacattcccgaaaagatcacaggtgtaattttattaactgtatcctgttgtggattaccaccactggaattttgcccagacagcatttggctaaagtacaagctgatgccaaagaagactatcatgccgacaatatcccagtgaactacaccatctggatctattgcccctaccctacctaaagcatcaataaacagaaatcctttatctgctgccagtccgggaattgtgccttgtattgtcacatctccaggttgtaaggcttctatgttgccttcggcatcaattttaactctatcttctcctttggttattttccattcaggagttaatttagtttctggatgttctgctaacagagcctcaaagggtttgccctccaatgtttgatattggatctttgtgttttctcccaccgctaacttattaccaccgggaagaatagcggtaatttttgtgtgatccccatcagcaatgtagatgttttggggaggagttgcaaaggcttggggttgaatgcgttctatttgttcagctgggaaaatttgcaggttaacggagtagttcacacctgcaaatggtgaaccccgcaaagtggcaaacagtgctagtaaaactggcatctgtaacagcaggggcaaacatccagctaaggggttgccaaactctttctgaacattcaccatttcctcttgctgcttttgcggatcgtctttatagcgttctttaacttccgccatccgcttttgcatgagaggttgcactattcgcattcggcgcatactgcgaatagaacctgcactcaggggatagagtgcaaaccgaatgattaatgttaaagcaacgatcgccaatccatagctaggaaaaaaaccatagaaaaagtctatgattggcagcattacgttgttcgagagaaacccgataccaaaatccattattctaaatccaacccaaggtactgtaaactgaactgaatctaatttatctaaatcgtgatttattagcgactatcattggctacggatagccgcacaatggggactggggactggggactggtgactggggactggtgactgggaagaaatatttaccttctttatcctgactcctgcctcctgcctcctgcctacttttgagcagcagtatattggggatttttagcggctactttctcacttatataatcataagtttcccgaaaattgggaatagcccgtatttctaaccgactaccgtttttcagggtaagtaccatatctccccataaccctatgccacggggaacttttaccactttgactatttctgaataaattacgtcagtgcgatcgcgtcccatccaaccacccatcacagcaactcgccgatcagtgattttaaaacgtaaccataacgctctaactatcgctccaatagttaatggtaaacccacaaccgttagcccaatcaataaattgagaatcaaatccccaatatggggaccaccttcataataaacttcttcacgaatacccatttattacctctgcttttaccaacaactgctctaattcttgcagaaattgttggcttacgcactcagattctgctgtctttggcttgacaatcactaccaatcgccatccaggtgataacttaggcaatatttgagacaatgcggctgtaatttgccgtttaatccgattgcgaactactgctcttttactgactttggtgctaatggaaacgccaatttttgtactagctaaatcttgacatttagttaattttatggtagcagcgtcattatcactagaagtttcttgtggacgtgacggttttaaagctctcaaagtgaaatgagagctatgacaccgaattccttcccggaaaaccgcctggaaatccttgcgggattttaatctatatgctttgggcaaagccacagctactctatttgctggatgcctaaacgcttaaacgatgacgacctttttttcttctggctctaattactcttctgccagttgggctttgcattctagcacgaaaaccagaggttctctttctcttccgacaagttccacccaatgttctttgcatttctttgtcctcttaggcgatttttataaaaagtcacaatctgctatcttaccactttacaggcaataagagtacatttctggatacagtttctagtgattggtgattggggactggtgattggggactggtgattgggaaaatacaaataatttgctacctgttacctgttacctgttacctgttcccttgttaattgatgctgatgagccaagtacctaagtagcgcaacattggtacatctccaggggagaggacttgacagttaaaatggaacattcccccaaaggcaggattttgcacgttggatagcactaactcaactttactacctgctggtactggttcttcgggaaatatctctattatccgtccttctttattccatttaacttcacttaaaggaacaccttttcctttgactctgacttcaactgcttttggatcaaaactgcctttgtaataatcagggtaagtaatggcaaattgggcaactgccaggttcatttttttggcgggtagtctgagtatatatctatccgtggcgttggtttgtccaccaaagtctaaacggaagggtagttgattttctcccttaacaccgctaaatagtgtaaaaccttgttgtgccaaactgacagccggaaaagtcgttaataaacaaccagttacagctaaagcagaaagtaaacgtcgcatagttaggcttcctctaaataaatattatttctgagttctctgtaatcttcagtaacagtcttgttagtattcttaactaaactttactactttatacttaatcatagacgaaaaatgaaaataaaagtgccaaaagtacatttttactctaaagatgtgacaatcaggcaaaaataaggcttaatcctatggtgtgggatgcgggatgtggggtgtaaagtttttctttgtttgtgttgcagattgtatagagatgttgagtaaactaacatttttttgataaaagttgaaaaaagtttttgccgatcgctccttaaattacaatcaatcaattgttgagactcaacctttgtatattctgaatcctgacaaaatcgtgcagttaagtagaaaatatcaaacttacccaatttaagtatggcagaaagtagaaattaaattgcacaatcccgaaaataatctgaagacatagatataacatcaaaaaatgcacataagatgtgcagtaaccacaacagttgagaaccatctagatcatatttgtcaatagcaaaaatgttttacacaagagttcaagacaaagttcatggttcatgttgcattagttgtatcagtttattaaagacgtacatcaataaattaagtatttatctctaggagattgcatgaaaatagcagtagctaaagaaatagaagtttgtgaacgtcgggtatcattaattcctgacattgtagccaaattaatcaaacaaggattagaaatttatgtagaaactggtgcgggagaaaaagcattttttactgacgctgactatgaagcagcaggagcgaaaataattagtgatcctgctacattatggggtgaagcagacataatgttaaaagtcagtccaccccaagaaagagaagatggacgttctgaaatagaattactgaaaactggatctgttttaatcagctttctcaacccattaggaaatccccaaatagcgcaaaaattagcacaacggcaaattacagctttaagtatggaattaatcccccgtactaccagagcgcaaagcatggatgctttatcttcccaagcatcactagcagggtataaaaccgtacttttagcagcagcagcattaccaaaatattttccgatgttaaccactgctgcgggtacgatcgcacctgctaaagtatttattatgggtgcgggagttgcgggtttacaggcgatcgccactgcaaggagactaggagcagtagtagaagcctttgatattcgtccagccgtcaaagaagaagtacaaagcttaggggcgaaattcgtggaagttaaattagaagaagaaactacagcagcaggtggttacgcaaaggaaatatcggaagacagcaaaaaacgcacccaagaattagttgctgaacacgtcaaaaattccgatgtagtcattaccaccgcccaagtaccaggcagaaaagcacccatcctagttacagaagagatggtaaaagccatgaaacccggttctgtaatagtagacttagcagcagaacagggtggaaactgcgcttgtacagaaccgggtaaggatattgtgtggaacggtgtaaccattattggaccgattaatttaccttcatctatgcctgtacacgctagtcaattgtactctaaaaatattactgcattaatgcagttattgattaaagataaggcgttacagattaattttgccgatgatattgttgatgctgcttgtgttacttatggtggtgaaattagaaatcaacgggtgaaggatgctttgcaagctgttgtggtttagttttgaggattttttagggacgaaccgcaaagaacgcaaagtacacaaaggaaagagtgttagagagagattttccgtttgttctctaaattctctctgcgcctctgcgtctctgcgtgagctaacaatttaacatcttaaatcaaaatgaatgaaactttactagcggctttatttgtgcttgttttggcttcttttatcggctttgaagtcattaacaaagttcccccgactcttcacactcctttgatgtcgggttctaatgctatctctggcatttcggtaataggtgcaattctcgctgcgggggaaagaaacaccaatttatcagtaattctcggtttaattgcggtgatattggcaatggttaacgttgtcggtggttttttggttacagacagaatgctgcaaatgtttaaaaagaaggatgttaaagcatgaatacttttatccctactgggattcagctaacttatttagtagctgcatctttatttatctttggtttaaaaaagctcggttctcctgcaactgcacgtaatggtaatgtgattgctgcggtgggaatgttattagctgtggttgccactttattagatcagcacgtattaaattacgagatgatcttagtgggtttagtcattggttctattattggggctgtggcagcttacaaagtgcaaatgacggaaatgccccaaatggtaggtttacttaacggtttgggtggtgcatcttccgcacttatcgctgtggcagagttttggcggttgttgggaagttctcaacctatcaccctcgctgtcaacatctctatgttattggatgtgttgatcggtggtgtgacgttaaccggtagttttctggcttttgctaagttgcaaggtttggttagtggtactcctattacctttcctttgcaacaacctgttaacctcttgcttttaggtacatacttggctggaagtgcctatttaatcatgtcaccggatagtttacccgtgtttttagcggtggtggcggtttctttggtgttgggggtaatgtttgtattacccattggtggcggtgatatgccggtggtgatttcgctgttaaactctttatcaggtgttgctgctgcggctgcgggttttgtggtgatgaacaatatgttaatcatcgccggtgctttggtgggtgcttcgggtatcatccttaccgaaatcatgtgtaaggccatgaaccggtcgttattcagtgtgttatttagtgcttttggttctgtaactactgctagtggtggcggtgctgcgggtacaagtaatcaaactgttcgcagtatagatcctgaagaaggggcgatgatgttgggttatgctcgttctgtggtgattgtaccaggttatgggatggcagttgctcaagcacagcatagcgtccgggagttggcggatcaactagaacgcatgggtgtggatgtgaaatatgcgatacatccggttgcggggagaatgccgggacacatgaatgtattattggcggaagctaatgtaccttatacgcagttatatgatatggaggatattaatccccagtttgaacaggctgatgtagcgttagtgattggtgctaatgatgtggtgaatcctgcggcgcgtagtgatgcgaatagtccgatttatggaatgccgattttagaagttgatcgagcgaagcaaactattgtgattaagcgtggtatgagtgcgggttttgctggtgtggataatgagttgttttataaggataagacgactatgttgtttggtagtgctaaggatatggtggctaagttggttagtgaggtgaagcaactttaggttaattttagggggtaggggcatagcaatgctatgcccttactttttttctcacgcagagacgcagaggcgcagagaggtttgtttcgcgcaaagacgctaaggagcaaaggcgcaaagaagaataaagtttatttatttaatttagataatttcggaaaattttcaggtaatccaactgcatcacgaaaataagattgattagaaattatcttttccatattctgaaaacaatcttgaattacagactcttcatcagaatataattgacctatttttcgagcaacatcataactaattgatttattgctaccccaacagacaggtattgcccaatcatcaaatccatctgctttagctttgatgtaagcattataaagatcgggcatttcatctttatattcttccattttatctatctcaataaaccataaactaatcatatggttgtcaaattgaccgctgaatgaaggctcataatcaccaaatttatcccaatcttttgaaaaatctaaatcttcccaccatagtacatgacattctctatagaaagtttgtatttcatctgtttcataattatcctcatcttcattttcatattcatattcttcatcttcatcatcgaaacaattaattttaggtttaactactccttcaggtttcatccaaattgttgacagataataattgtaagcaaaaatatcacatggagtcacagcttcaaaacaaactaatgctcctatatattcctcacataatcttgcaaataatactccttcatcatcccaacctgacctttcttcccactgtagaccataacgcccataaccatctgaatcgaagaaaatagaattacctttgatttctagattagaaaccgatgttgtttctccttcagctacaatttgcaaaattaaatcttttactttttccggctcagtggtaacaacttctgctctagaccaaaaactataacccatatttacctttgtttagctttgtttatttgactacgcaaaacaaatatactataatagttattactcgtcaagactaattatctaaggagtattacataattatgggcagtcagcaatttttagatgatgaactcttacaaagaagaattgagaaattttatggatatggtaattatgaaggaaaatattggtttattggtatggaagaaaggggagcagaaaactttgaagatgcaaatttacgaatcaatacatgggcaaatagaggacagcaagaaatagacgatgttgcagaatatcatgaagatatgggagggtggggtaaaaataaccaaccgacctggaataagttgattcgtattttattaagtgcaaaaggtaaggaaaatatttgtttaaaagatgttcatgactatcaatttgaaaaattatgtaggaaaaatcaagaaacttgtttattagaattattacctttaccttcaacatctattaatgattggatatatgataaatattctcaactcccttttttatgcgatagagaaacttatgcaaattattgtgttgaaaaacgaataaatcatattattcaaagcataaaagaacatcaacctaaagccgttattttttatggtataggatatgaatattcttggaggaaaatagcaaatattgactttacaaaaattgaagttgcaaaaacagaagattcaaaaaaacaccgtttctttattggtaaaaataaccatactatatttgtgatggctaaacactctaatgatcgtggtgtaaccaatgactactttcattatattggtaaatcaatagctgctaaactagcggaataatacttttagctctatcttctcctcttccttcgtgttcttcgtgtcttcgtggttcgttaaaaaaggatattaggggaaaagtgcgatcctttgcgactttgctcctttgcgactttgcgcgaaactctctgcgttctctgcgtctctgcggttcgtttaaaaagagatgttgggaagttgaggggatgcgatcgctatttgggaagttgaaggggtgcgatcgctgtttgggaagtggagggggtgcgatagcgcaagtgctgacttgtcagttcgctgtttggggaagttgagggggtgcgatcgctatagtataattataaaaaagtcaaaagtttaaacaatatggcaacagggatacctagtagaaatgggcgtaatcataaacaaaatacaacatctttccgaattgaatatgaaggaaaaatgcctatagaagatatattaaaaattcagccggctaacttaaatcatataattagcgttgagggatatcctagaaatcaactaatatatggcgataatttaaacgttcttcgcacattattaaataatgataatgttgccggaaaagttaacttagtatatattgatccaccttatgcaacaggtagcagttttgagtctcgtaatagcaatcatgcttatcatgatctcatcgaaggtgcagaatatttagaatatttgcgtcaacgtcttattttaattagagaaattctctcagaagaaggttctatttatgttcatttagatgaaaaaatggcttgtactgtcaaaattatcatggatgaaatttttggagttaaaaattttcggaattggattactagaaaaaaatgcaatcctaaaaactatacacgcaaacaatatggtaatgttgccgattttattcttttttatacaaaaacagataattatgtatggaatcaaccttttgacgcttggacagaagactcgattaaaaaagaatatcaatatgtggaagaaggaacaggaagactatataaaaaagttcctattcatgctccaggagtaagaaaaggagcaacaggtcaaccttggaggggtatgtcaccaccaccgggtaaacattggcaatatacaccagaaacattagatgaaatggacgcaaggggagaaatatattggtctgcaaatggtaatcctagaagaaaagtatatttagataatagtcagggtatttccattcaagatatttggcttgattttaaagacgctcacaatcaaaatattaaaattactggttatccaacggagaaaaatccagagatgatgaaacggataattatggcttcatcaaatccgggagatattgttttagatgcttttgcaggaagtggaactactctagctgtatctgaagaattaggtagaaaatggataggcattgataattctccattatctattgatactataattaaacgtttagttaatggtagtgaagcaatgggtgattttgttaatggcaaaaatggtaattgtaaatataaacaaataaacttaattgacgttaatagaattttaaaaacaggtttggacttgtatattgaagaatcagcaagtttagagttaatttctggtcaaatcatcaaaaattggaatagtaaacttaactatctaaccagctttgtgtaaatctctcgtctaacattttcaaagtacaaaccattactctactttgtccatattgttctaaattagcgtaatcattccacatagaacctagaagtaatccaggaccatcattcagcatcaatacttttaatggcaaattgtatgttttagcataacccaaaatttctgtgattttatctcgatttcctcctattctatcatcttcttgagaacctcctctgtcggagtcataacgagcaaatccaactactaatggagtcccatctaagcgagagattaacatatccgcaggaatttgagatggaaagttattcaaagccttatgtaacatgacatctttccccccacgaatcggtcctttaatagaataatctttgctaaatttttcgttaaaccataagaaaaaactttctgttaaatcataccctttttttccttttgttttgtattcaagaagaagtgccatgagagtttcatcaggtatgggacgactgtgcaacttttgtttaacttcctctatcggacgaaatttatcactaaagtttctgatagtattaggtatatcgcctttctttttagtcatttctacagatgtatctggagagacgtatctacgaaaaactctaagtaattgatttcgtaaaggattacgttctttagagatcatctccagtaattctgtagacgtttgtgctttatcaacaagttctataaagcatacttgtactttttcataaagtattttagcctcatctaagtaatctggatagaacggtgaatcaaataaatatagtaatccacttagatgctgttgttttgtaactggcaaacgtagtcaaaattatttccttattctcataaacagtacaggttattactataagcaatagtggtatttttgtccaggtatttgttaaaaaagcagtagttactcacctataagtatgctatatctgaaacttccaaatatcgctctctcttctcctcttccttcgtgttcttcgcttcttcgtggttcgttaaaaaaggatgttggcgaaaatgagctatcctctgcgttctctgcgtctctgcggttcgtttaaaaagagatgttgggaagttgaaggggtgcgttagcgttcgcgtagcgtctcgtagagatagcttaccgaaggtatcactttttgggaagtcgagagagtgcgttagcgttcgcgtagcgtctcgtagagatagcttaccgtatcgcttttgggtggtttgaggggatgcgatagcgaagcaccaagcaaaagcatcgctgtttgaggatgatgggatttaggagatagtgctataatttaaataatcaaattccaggataaattatatgccagtagaagccatttatgaacaaggaacattaagactatcacaaccgataaaactagcagaaggaagtaaagtacaagtaattatcattcctctagaatctaattatcaacagaaaaaaacattagaaattttgcaagagattgctgaacttcctttagaggggaaaacagatccttttgatggcaaagatcacgatcaagttttatattgtcaatagtttatgatttttgtagatacgggtgcttggtttgctagtgttgttccttcagattccaaccataaaaacgctattttatggttaactaataatacagattctttagtaacaactgattatgtaattgatgaaacattaactttattaagagcaagaggagaagcaaaaagagcaattattttaggtgaagctttcttctcaggtaaattagcaactatatattatttaacagaagaagatattcgcctaacttggcagcttttttgtgattattctgacaaagaatggagtttcacggattgtagtagtaaagttatcatggaaaagttagatattatccaagcattttcatttgattatcattttcgtcaatttggtatttttcaagtcgttccgtaatgtatcgctatttgggaggttgagggagtgcgttagcgttcgcgtagcgtctcgtagagatagcttaccgaaggtatcgcttttggtgaggttgagaggtgcgatcgcataggttattgtaggcgatcgctataatatttaagcaatagcaaattcagtatatttcctttcatcaggaggatgaaaagctaaaacaatatcaagattagaaatacctaacttcattaactcattagctattccttcctcagtccaatcttcttcaatccaaattttatcatttttaattctgacattaacttgaatattattagttcttttcttaccatcccaacccaaaaaacaccaaatgtagtgatagttattatcatcaaaaaccaaacaactttcatcagttaaatttgttgcaccagaaacccaattatgatattctgtgagaacttgtttaattgctatttgatatttttctagtttatccattgtaatatttcctccttttctacattcacgacaatgatcaaaatttgatttaattggacaatctctttaattgaatctcttgtaaaaaagttttgatatgtactttctttaatagccaaataaattgtatagtctggttctgtgagagtaattaaattacgatataaaatatattgccctaaagctatttcaaaatctctcatgggagaaggactaagaaaactcttaatttcaacaattattttccgtccactttgttctgctgcaatcggtttttctgcggatagatcagcgaacaattcagcatctttatacttgattttataaggatcagccgtaattgtccaaccatctttaattaaagcgtttttaacagcatcgtggtaaatatcttttgctggcattgtttttttgataatattgagtaaacactcgttaatcttaatagtacaattatatcatatactcaggcgttagcgttcgcatagcgtctcaaagagatagcttaccgaaggtatcgctgttttggaagtggagagggtgcgttagcgttcgcgtagcgtctcgtagagatagcttaccgaaggtatcgctatttgggaagttgagggagtgcgttagcaaagcttaccgaaggtatcgcttttggtgaggttgaaggggtgcgttagcgaagcttaccgaaggtatcgctttaccaaaacaataaaaacctcaatcagatattgacaattaataaatcagaagataatataaaggtaggcatagcctgggggtagtcgtatgactgccgcatcataaaccgctcgcgtagcggttttgttgtttttgggggctatcaaagcaataatacttaattcccaaagtagtaacataattctgctgcttttaacatcacttctgtggtaataggaagataaataatttctgcttttatttgattcagttttctaattcctgataacttatttgccctcaataattcccgtctaatttcataatctataatttctggtaaaattacctcataacctctttcaaaaagactataaaaccattcttgacattgcacatctagaggatttgctttaggattagtaattaatcccacaggtgcagaatctaaaacaataaccttactcattttattttaaattgaaatactattcatagattcaataatttctaaagtttcttgttgttcttgttgatcatctgattcattccatgactcgaataatcttttaatattagtttttctgtgttcttttttaattgcatcacttttattaatttcattaatagcattttcccagttctttaaagatgtctgtttcatcgtcacactttgacgaaataaccggacaatttgtagtaattctggtatttattcttctggagtatgttcaatttctagtaataaatcattgcggggtttcgttgatgatttatctgtaatggattggtgattgttaatcataaaatcctagattttattattttggtatattatcagtatatcaagaacttagtaaaattcattttaattcttaataaaaatatgattactacgcagttataatagaataaactttttcttgagttaaccaagctgcataaagtaaagattgacgaatatcttcagcttctaaatcaggatattcttctaaaatttcctctatcggtttaccattagctaccagatttaccactaaagagacaggtattcgcattcctcgaatacaagcttgtcctgccataatttgtctatcaaatgtaattctgtctaaatttaacataaaaatatttgttcttcactatctttgatagtagcataaatttatctataaaaaagaatgtttgggaacttgaggaggtgcgatcaacaaaattaatctaaatcttcctcagtcaaaccagcatctttcaaaatacttctgagtgtaccagtaggtaaatcacgattaccatgaacagggatagaaagaatcacactcataccttccttaacatagatatgatgactacctgtaatccttttcaaactccatccatagcgttaaacaatcttacacagagatttaccagaaacggatttcataaagataactcaattaactgtttttctggttcaacttcttcttgctgactagcaacttctaaccaaccttgaacagcatcttttaacatttctaataaatgttcataactttcaccccaggtatgacatcctggtaaagctggtacagaaccacaccatacaccatcctcttcccaaataattgcttttattttcatggacaatttgttggaataaatataaatatcatatcagaaattataaaaaatttctcagtaaatccaagtaaatccaacttagcgatcacgcaagtgctgactggtcggttcgctgttttggaggttgacgaagtgcgatcgcatagcttaccgtaggtatcgtttaacaacagaaattatgattaaactggaaaaaaatcagcatctaaaatttcatcagaggaaaaaggattatcttcaggaaaaatagataaaggaagtccagtttcaatcgctgcttctttacgagcgtggtgataacaattatccaaaacttctaaataatagccttttaaactaggactatctaaaaacgcatcttgtaatctttgacgatgttcatatattgtatacaaccaactatttgacctgttttgaggttgaaaattgtatttaagcaagtgcataattaaaactcgtaaattactttttaaagcatttttttcacttcttcccatactttcaacttcttcaattaaattttctaattctaattctgaaaactgcttattctttaataaataagcggtttttttaatccataaattataatcttctgcataaaaattattagttaatatcatagatggatgtgtcatagttttctccttaatttctgtagtttttttctattacaaaacgaagtgcggaatgtgggttagtagtgaggatttgactttacggtaaaatactcaatcaaattaaacaaattaaacagctaaaaacttttgaatcacatcctgactcagttctgtggtgaaaccagaggcgacaataccacctttttgcatggcgtaatagtaatcagcctgacggacaaagtgtaagtgttgttctactaataacacagaaatacctttagtttctacgatgcgacgtactgcggcttcaatttccaggatgattgagggttgtattccttctgtgggttcatctaagacgagtaactgtggttctcccattaaagcacgggcgatcgctaactgttgttgttgtccaccgctcaagtcaccacccatccgggataacatagttttcaacaccggaaataagctaaaaacttcttcagaaatttcggcttttcttgattgtttctgtctagcttctaaccctagaagtaaattttctctgactgttaaccgggggatgatctctcgtccttgaggaacataaccaattcccagttttgccctttggtctggagatttagagttaattaattctccatttaagttaattgtaccactgcggggtgagagtaaccccataattgttttgagtagagtggttttacctacaccattacgtccaattaaacagatcatttgccctggtggtacgcttaaatctacgttgcgtaaaatatggctttcaccgtagtaaacgttaagttgagaaatttttagcatcagttttttgattctcaatagcggttatgatttatctaagctccagaccatcggggttaaaaaacagcagttttattctggctgttctcctagatatacttcgatcacacgggggtcattttggacttgttcaaaattaccctgacatagtacggaaccttcatgtaatactgtcaccgtcttggcaatttggcggacaaattccatatcgtgttcaatgactagaattgaatggctttgggcgagtgttaatagtagttgtccgatattataggtttcttcgtccgttaaacctgctactggttcatcaactagtaataagtcgggggactgtgctactaacatcccaatttctaaacgttgcttttctccgtgggaaagtaaaccggcgggaatgtctgctttaggggttaaaccaactgtttctaataagcctttaatactattgttttccgtagcatgagggggattaaatagggtggaaaatacatttttgtggcggttaatagtaatttgtaggttttcacgaggggttaagttgaggtaaattcgcggtgtttggaattttcgcccaattcctaagcgggcgatttcatgttcaggtaaagaacgcagatttttacctttgaataaaactctcccaactgttggttgtactttcccggtaattacatccagaaaggtggtttttcccgcaccgttgggaccaattactacccgcaactctcccgcatccatactaaagttgagttgattgatagctttaaaaccatcaaaactgacggtgacgttttcagtttccaagattttcgcgttcatgttgcacctctgggtctgcttctaagttgggatatgtggcgattttgcgagggcgatggaaaaaagaaatctcttgctttttgaaccatcccatgagaccgtcaggtaagactgtgacgactattaaaaatagtgcgccttgaaaaaatagccaaatttcggcaaattgttcacttaaaaaagtgcgggcataattgactaataaagtaccgactatcgccccggttaaggtagcgcgtccccccacagccacccaaatcaccatttcaatagaaaacccaatatccatggttcggggtgatacagatccactttgaagtgtataaaatgctcctgctatcccggcgatcgcaccggagactgcaaacactaaaactttaaattctgtggggttatagccagaaaatcgcacccgactttcatcatctcgaatagcgattaataatcgcccaaagcgtccactggtcaaccagcgacaaatcccataggtgagggcgagaacaattaccgtcagggtatagaaaatgaattgggtttgggagtcactgacatttaccccaaataacgttctaaaacctgtgagtccgttagtaccgttaaacagttgttgttgaccattaaagaagttgaaaaatataattactgcggcttgggtcaatatggaaaaataaacccccttgaggcgattacgaaatactaagtatcctaataatcccgctagtaagccgggaatgaacaccaccgccacggtagcgacgggaaaagaatagaaaggataccaaaaccaaggaagttctttcacgccatacaaccccataaaatcaggtaattccccggaaggaacttggagttttaggtacatggcgatcgcatatccccccaaaccaaagaaaatcccatgtcccaaactcagcaacccagtataaccccagattaaatccagacccaaagccacaatagccagggacaaaaaccgccccagtagattcaaccgaaaccccgacagtattgctggtataattaaaatcaggatcagtgcgatcgctaccaccgccccaatctcaattaaaattaaccttcctcccttctgactcatgctctgcgtcctttgtggtttaaacatcaacagtacgacctttctggggaaaaattcccccaggcttccactgtaaaaacgcgataatcagtgcaaacactaacaccttagccatacttgtggtcgcaaagaaattcaacacatcagctaaaggttgaataggagataacaccacagctagagtcccagaaccaattaagaaattagctgtaccaattcccaaagccgccataatagttcctgctaaattccccacaccaccgactactactaccataaaggtatcaataatataattttgtccggtgttgggtcctacagaaccgagtaaactaatagcacaaccagctacaccagccaaccccgaacccagagcgaaggtgatagcatccaccttttgagtagggatacccaaacaagcactcatactgcgattttgggtgacagcacgaatccttaatccccagttagaacgctgtaaaaatagataaattcctcctacacaaattattgtcaaagccataataaacaagcgagcataaggtaattggagaccacctaaagacattcccccttgcaaccaaccaggagccgtcacatctacattttgagcgccaaaccaaggttgagtaaacatctgttgctcactcaataaatttcccattgttattgttatacccagagatagtaacaacaacaatccaacaaaccatttactaactttccccccattactccgagcatttaaaatctgtaaacctccaaaaaacaacagacaaaataggaagatgccaattaccaataaccaattcacactgcgaacaaactgttgaaaaattaaactcaccccccaagtagcgaggagagtttctaaaggtcgtccatacagataacgaatcacgccccgttctaacactaaccccacaagagcagtgaatagaaaagcaatcatcaaagccaaaaatatataagaatcaaaccacactccgcccaactgtttgcagccattttgtaccacaaaagtcgtataagctcccaacatcatcaattctccatgggccatattaatcacgcccatcaaaccaaatataatggctagtcccaaagcagcaattaataatactgccccaatactaataccattaaataaagcttctaagacacctattaacacttatttatcctcaagaaatatcaatagtcaatgactattgactattgactattgactattaacttaaatttgcttgtacttaccacctttagccggatctgaccaatcacagccaaatccttgagtttctttgacaaattgattccaaggaattggctctactggtgcgggggtagcatagacaatatcgaataaaccatcttgtctcacttgaccaatgcggacaatttttgacaagtgatgattggcgttcatcgtcactttaccttctggtgcatctaaagtttgaccataggccgcagtgcgaaccttatttaagtcagttgttccagctttttctactgcttgtttccataaataaacggcgatgtatgctgcttccatggggtcgttaattacccggtctgcaccatactcttttttaaaagctgctacaaacttttgatttgcaggtgtgtctactgtttgaaagtaattccaagctgcatagtgaccttggagatattcaacaccaatggctttaacttcctcttctgcaatacttacagacatagagggatatttatctgctgttaatccagccccttttaattgtttgaaaaatgccacattgctgtcaccattgagggtgttataaattacgccaccattgggtaaagcttgcctaattttagagataataggtgtaacttctacgttacctagtggtaaataatcttcacctacagtttttccacctaaagcttccaattgagctttaataatggtgttggcagtccggggaaatacgtagtcagaaccgactaaaaagaattctttgcctttattttttaacatccaatcaacagatggttcaatttgttgattgggagccgcaccagtatagaaaatgtttttagaacattcttgaccttcatactgtaccgggtaccagagcatatggtctttactctcaaataccggcttaacattcttgcgactagcagaggtccaacaaccaaaaatgacaacagtttgatcttgatcaattagtttggtagctttttctctaaaggtatcccagttagaagcgccatcttcagtaatcgcttcaatttgtttacctaagacaccccccgcagcattaatttctttaattgctaatctttcagcatcaacaacgcttctttcactgatggccattgtcccgctcagggagtgtaaaatacctactttgatggtactactgctatctgtagcggtatcactactgccattagtaacagtgggtgagtcattcccgcaagccttgagcaaaaggctagtaccaagagttgcggaactataaagtaaaaacttccttcggttaaattgtttactcatattttggttattttgttacactatcggatttgatgatagttcgatactttaccatgaaaaagttatctaatatacaaaattttaataaacaagcggttttttcaatagacttctccgaaaaagatgtagggacaattcatgaattgtccctacgaatgggtttcaggttatgcttatataattttcggagatgtctaatacataaattataatcttctgcataaagattattagttaatatcataggctgatgtgtcatagtcttctccttggaaaagatttaaattaaaccccaaaccccaaaacgacatccaaagcagtatgaatttctgcccaatactcagcttctaaaatacccaccaaccccaaaactcgacgataatcaacagaacgaatttgagcaacatcaataaaacgttcctgatctaatccattagttactgttgctttgacattgacaatatagggagcttgcttacttcctgctcgaaatggcatcacaattgttaataatccatattgattcataatatcattttgaactattaaacaagcacggattttttgtgcttctgctcccacggttggatcaagatttacccagcgaatttcaccccgtttataagttaaattaccctctggcattaataccatctccagctacatgatcccaagcagaaatctcattttgatagtctaaatcttttgcatcttcttgcagtgccgcaattatttctgcttctaaaattttacgtctttgttctgccaatattgcattaatataagcactacgattaccttttgcttgttgatcaataaatttcaatatatcttcttctaaagtaattgtgactttcatcattctgtatgactcattcatcttacccatcaatcataccacttttttgacaatttgcaaatactctgtattctctgtgtctctgcgtgaaataaaaaaagatattaggggaggatgtgtgttagcgtatccctgacgggactcgaagagatagcttaccgttcgcgtagcgtgtcgaagataaaaaaggattttgcgaagtttaagaagtgaatataagtgaatataaattatccagcaataggaatttccatgataaaaaaagcgattaactacaaaatatttcccagttaatcgcttaataaatatcatcaacccccaggtaaaagctgattactgattactgatagctgaatgcttacgtattttgtagctcaaactactttacagaaacagcatcaacatcaaccgtattatctacagtattatctgtagatgtagactcattgactctagattctacattacctttacgagctttccaaccgtcaattaccaatccagaaacttctgaaaccagcaatgttaacaaaaccaggtcatcaatttgaccaacaacagggataaaatcaggagcaatatcaataggactaacaagataagctattgtaccgataattacccaccaacgatatttagggttacgcagtacattgcgataccaagtgtaaagcgattgaatagagaagctcatatttttaacctctagtacctgcaattaacttttattttggcaaattatgttctaaactcccggtaggaataaccgccttttggagtatagaagatgggtaatattgatactccccacggctaaaagccgggggcttgcgtctcgtttcagggtcatgctttgttaactacttaggggttgctgagaaagtctttccgtgagggcataggagtcaggagtcaggagtcaggagtcaggagtcaggaggagatttgaaaatttctttgccatctcttgaaatcccaaaaaatgcacactttttccggtatacccttcaaaacccttgcactaatttctgtgtttatcagcctctaacctttgatatatcaaggttttaggtttattcagcaaaccctacttacctagcgatagagtaggtgagtgtggtaatggtgcattaatctttaaaattaaaatgccctagcatagttgctctagtaatggagagaggaaacctacaaagtggatattttagatttgtttaacaagggcggtccagccatgtggcctttgctggtgctgtcagtcctatctttgagtgtgatttttgagcgtctttggttctggttgcggatcttgacccaggaaaaagaaattgtagagcgcgttttagatgctgctaccgataattgggaaatagctacggaaatcgcccaaaaagccattgatcagcccataggacgttttctctatgcacccctacgcttacaaaaaagtgatgcggaaaccttccgactagcgttagagtccacagcagcagaagaagtagcagggatgcggagaggagaaaaacttttagaatctgtaattgccctctccccactgttaggattattgggtacggttttaggtttgattcagtccttgcgagcaattagaataggtgacttgggtactgaatctacagctggcgtaactacagggattggcgaatctttgattagtacggccgctgggttaatagttgcgatcatcactttggtattttatcgcctgtttcaaggttttgttgttaaccaagttaaagtttttaataaagctggcaatgatttagagttgctttaccgtcagtctccaccagatcccaacaaaagtacattaggaatagtacgggaacccacacaggaacgttttacttcaccccgtaagcgacgcaaaaataattctactccaaccccagaaccagcttcagatacaacagataaaacagaccaaaatccctttcctgactccccaccagagctagaaaatgaaagttaacttacatactcccatcgaagaagttcaaattcaaatcattcctttaattgatgttgttttttgtatcctgactttctttttgttagcagctttgcaatttaccagacaacaggcaattaatgtggatttacccaaagccagcacaggtactacttcctctgctagttcacagctacgaagtgacattttacctgtaactattgatgctgttggtcaaatttacattgaaaaagaagctgtgagacgggaagagttgcaagcacgattaaagcagtatatccaaacaaatcctaatggtattttggtgctgaatgcctctcgtacagcaacttataatgatgtgattcaaacattagatttgctccgacaagtgggaggtaatcgtgtttctttgggaattattcctggagcatctcaaccactgactaattcaccaaacttttctactaccccggttgtaccaatacctaatactgtaccaataccgggaactgacccccaaaataattttaacccttctctaccctctgcacccaatccatttccagcaccagagcaagggattaatccgggaatttcgcccatagttcccaacaacaccacaccccaagtacctgtaccgcaaaatagcgattctgcaccacaaaggtgacacaatttccatcaaattttctcagtctaaattccctcaaacccggttgcataatatgggctagggggaattttatttttagcaatatcaagaaatattagataaacctaaagatatttaaaataaatcactgtagagaaaaaacctctgctaatttataaataattggttaagctacaaagattttcccatcaatagaccaagtaatttatcgcgtaaattccgctatcagcactcagtgggcgattagaaatcgcggctacataggcaaaactcaccgtggtggatttggtttgtgtagtagcgaattatattcgccgatagggaagcttttaaaacattctctgacttgatcgccaatcaccatttacgtttcaagggttgcggcaatgaatattacgactctgttaattgtttggatagtcacgtctatcagtttgtggattattagtaagttgcctgtgggtgtggaaattgattctccacagaaagcggttttttccgcagcagttcttggtattattaccgcattagttagacccattttaggcgttgtatttacgataccaaatttagccacttttgacttattatctggtatctttacattcatgattgctgttgtttgttttagtattgccgcttggttagtagaaggtttccgtttacgttatgggatttggagtgctgttttaggagcttttgcactcaccattattaacaatataatttacaaattactgggtgtgtaaatagttcatgattcgtaattcgtaattcgtaattcgtaattcttaattgtcagcattcagctattggctttcagtagtcagatttttaatgcttacagaaaaatcactatttgataattaacaaatttatcaaatattctgatattctgactcctgacccctaagttctgaattcttacttgtaatgagaattgacagctttgtacatttttctcgttgtcaattaggttgcttggcataaataatcaataatttaatttgatgctctgcaacttttaattacgaattacgaatcacgaattacagattattcgttactgggaggagctaccggagcagtggatttttgctgacgttgatcgcgttttttccgatccgcagccagcatatctgccattactatcagtgcttgtgccatcttatcgagattagaacgatatagctctaaatccttggtaattttatcttcagataggtgtaaaccttgagcgatcgcttttagcgcctcatgacgttgctggtcatctttgacaaattcagcatctgccaattccaataatgaaaataaaccaatggcaaacaagcggctgtatttaaaatgaggattttgagcaatagcttgtagttgtgtttgtaaatcagcatcttgatggaattgagtggtttggctcaaccaagcaattaaatccttaactggcaaactatgtgctacagcttgcaatctagctgcatcttgtcgataccgttggggatcttgctctacagcctgaatcatggctttaaaaatagatgctaagtcctgttccggttgatagccttgcatgaagcggtcaaaagtggtgacaacccccaaggcataaattggattgtagctaaaatcaacatttactgacagcagatgcatttccaccatcaactcttccactacccgacggtaaatagtgttgatgggacgggtatgaagattatagaaagttcgctttgtatcagagacggtacggacgttattcacaaagaaaatgttaagggcgacgtatttttattttctcgtttaaaggctactttgccaagttatgcaagatatgaggttaacagctagtttcgcaaaaattctctttttccccttctgactcctgactcctgactcctattcgttcttgaccaagttcgggaataatctttccaaagcttctgcttcagtttcaaaaatttcaaagactgtatccatcattgtcacctcaaagacaagtttggcctctggatggatattgcagatcaggaaactacccttcgctttatcagcatcacgcattcccgccactaaagaagtaagaccagaactatcaataaaatttacctgtcccagattgacaactacatgacgactgagtttagaaatacactcttgtaacttcaggcgaaattgccaagctgtggtgatgtctagacgctctgttggtttcaagacaattacagtattaccgtctaggtttgtataggttttttggtctatattcactgttgtctccgtgatattgtcctgaaaataaactactttttcacttttttatatagacttcataaattggtgattgtttaaatttcaccatcaaccgtatattttccagaatcctcaatcagctaattaaatcaaatattacaggattctctctgtttgatcttgaacatgagccggctataactacaaactgagaattttgactcaatgcctatattgtactagtttaactaactgcaacagtggtaagtatctggattcactaaatttcccattaatctattgaggctgggtttggggaattttcggtttcttggtgaatggaaagcagagttctctagagataaaagtgtatctttctcagacaaaagcgactatttgccccaatatcctttactaagaccagatcacaaatatcttctttcatcctatttcctcaaaccagcccaaacccttgattgttcatcgaccagccccagtcctgtctcctggatctagataaatgtgtggaattttactgtgttaccaacacttgttactgctgatttagtttccagtttatccaatcttgtggtttcagaaaagtttcataaagttcagcttcgggagaattgggttctggttggtagccatattcccaacgaactagaggtggtagagacatgagaattgattctgtgcgtccattggtttgcagaccaaaaattgtgcctcggtcataaaccaagttaaattctacatatcttccccgacggtatagctggaaattccgttggcgatcgccatattccatgccatttcttttcttgacaattggcacgtaagctggtataaaagctccaccacaatcttgcaccaaagaaaataactgttcccaagtgcgtggaggtaatgctcccacctgattactataatttgcggcttctcctttgggatcaggtccgcgataaatagcaccttgaccatcttggtaatctaaaaacagaccgccaacacctctagtttccccccgatgtttgagatagaaatattcatcacaccaacgtttaaacacagggtaatattctgggtgatgttgatcgcaagcttgtttcaaagtttgatggaaatgagccgcatcttcagcaaaggggtaataaggtgttaaatccgcaccaccaccaaaccaccaaactggacctgcttcaaaataacggtaatttaaatggactgtaggtacataaggattacgagggtgtaacaccaaagaagtaccagtagcatagaatccgtgtcctgttgcttctgggcgctgggctaaaattgacggggggagatgggaaccccaaacttcagaaaaatttacaccagcttgttcaaaaatagcgccatcacgcaagacacgcgatcgcccaccacccccttctggacgctcccaactgtcttccataaacttaccaacaccatccagtgcttctaactcgttggtgatttcgtcttgcaactgtttcataaactgactaactctggactgagcgtcaggtgctgggagaaatttggatgattctgttgtgagagtgggggtttgcgagttggtcaacatagattcccgaacctaaaattacaatttttgtgcaagctacaaatttccattttaaaaatttcttgacaattagagccaaaaacctggcgcaatttgccaaaactgctttttctgatgagtggtcaaaaccaatagattatcttgaccatgccaattttagattttggattttggattttggaggattttttacttccagccccgccccttgtgggcagaacaaatctaacaccgatacaaaaaagctaactaatgctaacaaaagttggcttttatctaaaatactcgcttcgctaacgcaaatctaaaatccaaaattgattgactaaagctattttccatcaaatgcgtataggcttgtagattcattaagtttctttgcaataattatggagatatttctgttattaacaccagaacctagagaattagtccacaaagcagccgattttctgtatggtatctgtagtgagtagatagcttgactcaaattttcccagatgccagagtcaccagacagattgtagccaggaggattaggacagtgcaaggttggttatccaaattcatccaccgcaaacgtcgtcgattttgtgcttctctggtgcggacttatcgagagatcagttctgcttctgtagatgaactttggttaaaggtggctgacttaacagatgtttcctggcatccactactcaaaagcactaacgtaccattaggattagtacccaaacccggattaattttcctagcggtaacacgcttttggccagttcccattcagatttttgtagaacgggtaaatcctaaacagatgttaagtatccgcgttttggcaattcctgggattgaggaacggatcacataccaagtagagtcaacggtttgtggcagttatttgtcttattctgtaacactacgtggctggttatcacctctaatttggtctttgtcccgtccctatgtagatcgagtagcacggtctttagtagaatctgtagaaaaagcagcactgcaagcagtttccggcaagaaaaaatctctcgatgacagttgttttgatttttaagtgactggggactggggaagaagcaggggagcagggagcagggagaaattatttatattgtcaatcactaatcaccagtcaccaatcactaatgccccaagaaagttaagattcaagtaggagaacatgaaaattttttaagctttattaaggcggcaacggtacaaacgctatgtatgatgtcctcaattcccagtcagtcctagaagtgttgcgaccagtggaagatccagaacttcgcaaaagtctggtagaactgaatatgattcgcaacgtcaaaattgacggtggcaaggttagctttactttggtgttgactactcccgcctgtcctttgcgagaatttattgtcgaagattgtaaaaaagctgtgcaaaaactgcctggtgtaacagatatcagcgtagaagtaacagcagaaacaccccaacaaaaaagcctaccggatcgcactggcgtggctggggtgaaaaatattattgcggtttctagcggtaaaggtggtgttggtaaaagcacagttgccgtaaatgtggcagttgctttggcacaaacaggggcgaaagttggtttgctagatgctgatatttacggacccaatgatcccaccatgttgggtttggctgatgcagaaattactgtgcgctccacagaaactggggaaattctcgaacctgcatttaatcatggagtcaaattagtatcaatgggctttttaattgaccgcgatcaaccagttatttggcgtggtccaatgctcaatggcgtaattcgtcaatttttgtatcaggtgcaatggggagaaattgattatttaattgtcgatatgcctccgggaactggagatgctcagttaactttaacccaagcagtaccaatggcaggagcagtaattgtgactacacctcaaaatgtcgcattactggattctcgcaaaggtttgcggatgttccagcaaatgaatgtaccagtattagggattgtggagaatatgagttattttattcctcccgatcaaccagataaacaatatgacatttttggatctggtggaggttcaaaaactgccgcagaattagatgtaccacttttgggctgtgttcctttggaaatttctaccagagttggtggagatagtggtatacccatagtggtttctgatccagattcagcttctgctaaagctttaaaagcgatcgctctagctatcgcaggtaaggtatcagttgctgctctgacataagcaagaaggcaggaggcaggatagagtttttttcttcccagtccccagtccccagtccccagtccccagtccccatttaacaagtcgctcttcgcacaatgttgttaaaacgttcgctccctaaagtccgctggcaatattggattaagccttggcagcaggtagattggctattattttgcctagctgttgctgtcagtatgtttggtggacttatgatcctcagtacagaactgaataagccagtaactgactggtggtggcactggctgatgactggtattggatcaatcattgctctgtttttggctcgttgtcgctacgaaaacttaatgcagtggcattggctcacttatgctctgactaactttagtctgattttggtgatggtggttggtacaactgccaaaggcgcacagcgatggattagtattggtggctttcatgtgcaaccatcagaatttgctaaagttggtctaattattagcttggctgctttgctacataaacgtagagatcctacatttgatagtgttttgcgttccctggcgatcgctgctgttccttggggattagtatttgtacagccagatttggatacatcactggtttttgggtcaatagttttaggaatgctctattgggcaaatgctaatcctggttggttaattttgctggtttcgcctgtattctcagcaattttattcagcataccttggcctttgtccaactcaatagttctctttgaaaatatttctcttactcctttgggtttagcctgggcaggagctatgggaattgtgggttggcaaactttaccttggcgtaaatttggccttagtggtattggtacattatgtctcaatatgctcggtggtggactaggtgtttttgcctggaatcatctattaaaagagtatcaaaaagatagactgactgtatttattaatcctgaacttgacccccttggtgctggttatcacctaattcaatctcgaatagccattggttctggggaaatctggggatggggtttgttcaaaggcccaatgacacaactaaattttgtccctgaacagcatactgactttattttctctgctgtgggtgaagaatttggttttgtgggttgtttaattttacttttcgctttctgcttaatttgttaccgactattacacgtagctcaaaccgccaaagataactttggttctttgttagctattggttttttgttaatgattgtgtttcagttaattattaatgtaggtatgaccattggtttagttcctgttgccggtattaccctaccttggatgagctatggacgttctgccattctggcaaactttattgccttgggaattgtggaatctgtagctaatttccgacaacggcaaaaatattattaaatgggactggggactggggactggtgactggggactggtgactggggactggtgactgggtaatcaatttgattttcccaatcaccaatcaccaattaccaattaccaatcaccaatcaccaatcaccatcaactaatattaagctagtaaaagagaacaaattgagggtaaaaatatgattctgcctggagccactgttcgcgtcaaaaatcccgcagatacatactatcggtatgaaggacttgtgcaacgagtaagtgatggtaaagtagctgtactgtttgaaggtggtaactgggacaaaattattaccttccgcttgccagaattagaactcgtagaaactactgccaagaaaaaaggaaaataattctttcgtcattagtcatcattagtcagttgtcatttgtccacagttgataaaggacagatgataactgataactgttaactgataactgattgtcatgcgtctacccttaccacagtttgcgacaggcgatcgccatcctcaccacattgcggaggtgatcgaaaccacaactaccgaatttttggcgcaatgtctagaaccagaagacttgagttttccagttatgccaccttttggtagttgggtttgtgctgtagatgaagaatctgggaatcaaatctatgctgtggtatatcatgccacaactatgcccatagattctgtacaccgggctagggcgttgggtttgtctttgcaaactttgcgagaagaacaaccccagatatttgctatgctcagaacagaatttcgggcggcaattgttggatttgagcagcagtcacaaaatctcagtaaccaaggagtgtatcagtatctgccaccacgtccgccccaaatacatcaagcagtttatcggtgtcaaccagaagcgatcgtcaggttcacagaaaaattagattttttaaggacgttacttttgattaatggtgcgccagtagaatctttagctgcatctgctattcgtgaagtttaccaattacgcaaagctgacagagaatggctaattaaagctggtcgccatcttagtgtactattaaaagacgattatgatcgactacgctttattttgagccaaattcacccatagggaatagggaataggtagcgagcagggagcgacaaaacttcaacatttaacattcaacattcagtattcagtgtatgactcctgagtcctggaaatttttgaactcctaatagctgataactgacaactgataactgataaatgttttttatgatgccacttgtgtcacaagttctgacgttagatccaacctttcaagttctaagaccagaacctattgttcccttggctattttactgttagttatttttgttatacctatcctctttgagcgactaagattgccagcattagtaggtttggttggctctggagtggtactaggtccatcaggttggcgcttatttgaacctgaattgccaatgatgagcttgctatcagacattgggttagtttacttgatgtttatcaccggattggaatttaatatcccacttttccgtcaacagcaaagtcgttccttcatatttggtgcttttagtttccttttacccctgatgctaggaacattaggaggacgatttttggactttagttggcatagttctatactaataggctgcttcctgtcttctcactctcttttggcatatccaattatcaatcgtttgggattgacaaataatcaggctgtgactatgacaatgggagccacaatttttaaagatatcggcacactgctaatcttaactgtttctatagcctgctttcatagtggggcattcagcttttctcaactaatcactatattaggctgggtaataatatacttgatgatagtgttagtcggttttgattgggcgagccaagaatttttccgccgttctggggatgaggagggtaacaagtttttgtgtgtgttgatgtctgtatttttggcagttgtcgttgcacaactgatgggtttaaacaaaattgtgggctttttcctggcaggtttagccgttaatgaagctataggcgaaggaccagttaaagaaaaattaatatttatcggcagtgttttatttattcctattttctttattgacttaggtttaaggattgatttacctagcttctttggtgggtacagcacaatcaagttattactattaattttagtgggtttgattgttggcaaatttatggcatctgtgttggcaaagttggtttaccgctatagttggcaggaaacactaactatttggtcactatctcttcccttggcaggtacaacattagcggtggctgtagggggatacaggtctggtgtactgtcaggagaggtattcaacactgccattatcttggtgctgattacagcgactttgggaccttggctgacaagtctcatggctgctggatgtgctgtgaatttgacctgtgcatcagtgacagaagcaccaataattactttgtctcagcagcaattacaatcatctcagggtaattttactatcatcgtacctatccaaaatccccaaacgcaaaagtatttgatggaaatggcggccttattagcctgtcaatcccagggtaaagttttaccattagcgatcgctcatgctacatctcaaatggatgcaccccagttagataccgcttggcagcacagtgaaaagttattggctaaagccattgcacaaagtcagttattaggcgcaccagcagaaccattactgagaattgatgatgctttcgctcctggaatatgcaggactgctcgtgaacaaaaagcgaatttgattattataggttggggtaaacgtactggtttgcgggcgcgtttattagggaatgtcattgataatgtgctttgggcttcccattgtccagtggctgtggcacgtctggtagaatcaccaaaaaaaattcagcgtattttagtgccgatagaaaatttaaccacgccagcacttacacctgtacaatttgctcaaaccttggcagatgctaatcaaagccagattactcttctcaatgtttgcgatcgccgcaccagtgctagtcaaatttctgccagaagagagcatttatcccaatgggtatctaatttagctgtactaaatccaccagaaattcaaattttcactcatgaaaatcctgctcaagctattttacaggctgcaagattgtatgatttagttgtattgccttttatccgtaatcgtactatccctggagggttagctatgagtgatgttaccagcgaattagctaggcaacttacctgctccatgatcattctgggagaaccacaacgccatcatacacttgctttttcaaatattaaccacaataaaatagcggttttacaaaaatactaaccacaattctgctatataaaacctagacaaaactagactttactttctacttcaacgggagcatgggagcagttatccctcagtagactttcacgccttagccagacgcgattgtgttccaattaagtttctgaaaaagactaccaccatcattgcttggttttcgcgtcggcaatagtctcaattcaatacttgatatcaccgtattatatatcaagtagttgattttttcctaaaaatatattgatttttgtcaatacaagtatagttttgtctatgaaattgtcaacttaggacttgctcattatttaattcatcatcactggcgacacttcttgtaaaaaaacttgacattttttagattatgttgaagatttgatgaaaaataacagaaaattccaccgggatttaactgaagataaaagaagatcaataataattttgtaaaggctctgtaggaaaattacttaatctagtgggagttatcttacttaattatgtattaatatactgaagccgggtaatctaaaaataaggataatacccctggaaatatctagaaaataattgggaaactatgagaattttagtgactggcggtgctgggtttattggttctcatctgatagaccgactaatggctgatggacatgaagttatatgtttggataacttctatacgggaaataaacgcaatctcctcaaatggttcaataacccttattttgagatgatccgtcatgatattactgagccaattcgcttagaagtggatcaagtctatcatttggcttgtcctgcttctccggtgcattaccagtacaaccccattaaaaccgtcaaaactaatgtgatgggaaccctgaatatgttggggttagctaaaagggtgaaagcgagatttttattagcttccaccagtgaagtttacggtgatccagaaatccatccccaaaccgaagattatcgtggtagtgttaatcctattggtatccgctcatgctatgacgaaggtaaaagaattgcggaaactttgacatttgactactaccgagaaaataaagttgatattcgtgtagccagaatatttaacacctatggaccacggatgttagaaaacgatggtcgggtagtcagtaacttggttgtgcaagcattaaagggagttcctttaaccgtgtatggtgaaggtaaacaaactcgcagcttttgctatgtatctgatctagttgaaggtctaatgaggctgatgaatggtgattacatcggacctgtaaatctgggtaatcctgatgaatacactattttagaactggcacagacagtacaaaatatggttaacccagatgcagaaattaagtttgaacccctaccttccgatgatcctcgtcgtcgtcgtcccgatattaccaaggcaaaaactttattaaattgggaacctaccattcctttacaagaagggttaaaactaacagtagaagatttccgtcaacgtatcaaaactaataattagtctatagtcagttctcattagtcatttgttaaccaacaactcatgactaataaccaatgactgataataaaaaaacgaggagtttaaaaaatgcgtgtttgtgtaatcgggactggttatgtgggtttagtcacaggagtttgtttagcttatattggtcatgatgtcatctgcatagataacaacgaagagaaactaaagttaatgaaatctgggcagtcgccaattttcgagcctggactttcggaaattatgcaagctgctattaatagtggaaatattcaattttcgtcggatatggctgggggagttgcccacggagaaattctgtttattgctgtgggaactccgccattacctaatggtgaaagtgatacccgttatgtggaagctgtagcgcgtgggattggagctaatctcaatggcggttataaggtaattgtgaataaatctacagtacccatcggttctggtgactgggtacggatgattgttttagatggtattgttgaacgtcagaagtcattggtggcggtaggtggttcatctgctgaggaaaaaccaccggaaatttccgctcactttgatgttgtgagtaatccagagtttttgcgggaaggttcagcagtttacgacacctttaacccggatcggattgttttaggggggaacagtcaacaggcgatcgccatgatgaaggaactttatgctcccattgtagaacgcaagtttgctgttgatcagtctttaccgcctgtaccagtgctggtgaccgacttgagttcagcagagatgatcaaatatgctgccaatgcctttttggcaactaagattagttttattaatgaagtggcaaatatttgcgatcgcgttggtgctgatgttacccaagtagcaaaaggtattggtttagattcccgaattggtaacaagttcttgcaagcgggcataggttggggtggttcttgcttccccaaagatgtatcagcactaattcacactgctgatgattatggatatgaagcccagttactcaaagctgctgtgagtgtgaatgaacgtcagcgtttgattgctttggaaaaattacaacaagctttaaaaatcctcaaaggtaaaactgtgggactactcggtttaaccttcaaacccgatacagacgatttacgggatgctcctgcactcaacttgattgagcaactcaatcgattgggagctaaagtcaaagcttatgacccgattatttcccaaacaggtatgcgtcatggtctttcaggagtattggtagagactgacgcagaaagattagctgatggctgtgatgctttggtactcgttaccgaatggcaacagttcagcactttggactatgcaaaaatggcaaaattaatgaaccacgccgttatgattgatggtcgtaacttcttggacccggaaacgatggtaagagcgggttttcaatatgtaggtgttggtagataaacggtgattggtgattggtgattggtgattggggagatggggagatgactgtcacctagctttcacagataactttttcagcaaaccctaaataaaccacattttgatttaggtttcgcgtcaacaatgtaggggcgttcgcaaagcgtgctggaagcatcagcattcggatgatagtcttaggtaaaaaccgataattaattgtccgaatgcttcgcccttactgtggtctaaagacatgaaaactgctgtaataacccaatcaactatcacctctcccccaatccccattaaccacttttaggaattcgttctatttctgcatatccactaaaaatcaatctttgaccttcggtttctaaacgattaagtcgcatttttacaccatccaggtcaaaacggtctaaatcgaccatattatctaaaatttccaccagtgccatgcttaaagtttgggaggtttcccgttgtgcttctggtacttgttctagttcaatttttggatctttaaaagaaactcgtcgccgtctttcaatagctatacctaatgtcatacttaggggtatgacttcaccgttatttaagtcagctttagctagaagatgtaagcgatttcccggtaataactgtatttgaacgtcggtaaaggaaactggttcaccacctgaaattgctgttaaagctgattcagaaaggttgagaagtcgctttttcaccaattctgcttggaaagcttgattaatacctgcttctgataatattacttgggctactgcttgggtgggttgtttaaggttgagtttgccgctcaaaaccgaactaaagtcaatggcaaccgcatcggtttcaaaagacatttcttcaacagcgaagtctctccgaattactaggccacgaccgctcattttaaagctatcaatgctgccttgcaacagtttgctggagggatagcagcgcacaaagacttctactgactcgctctgggtaaacaggtggcgaatcgtttggctggcgactgtgttgagcattcgctctccccaatctgtgcctttgggatctgttaaaccagtaagtccgcctaacattaggttttgggtctctagaagttctttgtacttttgtaacaaattgtgaacaattctgcaagcgatccccagattttttgttctaataggtttgagcaggataactgatgctttgctttaccgggaatttgagatttgagatttgagattttagatgaaaaaatttggtatgggaaaaatcgtaacccccaaatccaaaatttttgagcttctacacttgagagggctattttgctgtaagggcgaagcattcgggcgataaattatcaatttttatcacaggttattttccgaatgcttcgcccctacttcgcacgtacaggagtcaggaatcaggagtcaggaggagaattaaagacattttttcatttctgtccgcccagaaaagtgcaaggtttttcagactcaagacgctataacgaaagcacctaccgtcttttttatgagcctcaaactctttattcatcaaggttttgagtttattcagcaacccctaaaaagttttgaatggtgatattagacacttgtatttgcccctattatgttattgcgattataaacggaggtatattgtatttgtgtaatgacaagacttggcgggcaatttataaaaaagttacaaataagattaactggcctatggctaacgccacgctgcgctatcgggcgaggcagaaggcagagggcaggaggcggaaggaaaaaatttgaattaagaataaagcctttttgactcgcccatttgggtttaagtcccccgccataatctggtgatttggtgagccagcactgccagaaggtttccttctgtaggtgactggcgaacccgcaagggcggtctacgattagaggtgggtttaaatcccccactaagaaagcctcctgcctcctttaagattttctagcttctataccagtattatagtagtagtcactgtaataattatgaagctgatgattttcaccgttagcaaccacacctaagacattgataggaaagagtttcagactgtcctgaagttgcatcactgctgatttgtcggttttgtccattctcaccaccagcagcgtaccatccgtttgtggagctatcagtctggcatcaactattttcagcatgggaggagcatcataaatcactaaatcaaaattttcgtgcaaatattccatcacttgcttcattttatctgatgaaagcaatcttacaggatctggtggtttatcgccagcggtaatcactgataataaactcatatcaggtaactgttgcatcacctgctcaactgggatatttgatgtgaggacattggttaaaccaaataaattttttaatcccgatatgctgtgaatcttagggcggcgcaaatcaccatccaccagcaatactcttttgcccaaggctgctgctgtttgagctagatggaatgcaaccgtagtctttccatctccaggcatcgtggaagaaatagttaaagatctaatcggttgatcagaattgagcaactgaatattagagtaaagaacctgtaaagattcccaaaataaaccttgtccataatagccataataacttttcttgcttctctggtagaaaagtttagacaaccaagaatcaacttgaggaaattttcctgattcagatttggaagtggagcgattattgtaagcagattggtaatctttgatgcttttgtctatgggaagagttcccaataaaggtagtttgattttctccttcaggctgtcgacatcatgaaaggtattgtcgagtttttccagcaggaaggcaatacccacacctgctgctaaactgccaaataatcccagaagcaaatttcgagggatatttggtaaaacaggatcttccttttgagttgctgcttgtgttaattcccaaggtagttctgtttgtgctacttgaattacaaggttttcacgggcttctaaaaaccgattcaggctatcattggctatttgcaagttccgctgaatttcggtgtattgtctggctaaggtgggtagttgcttaaatctttccttggtttgctgctctactctggctaattcctggctttgtacctctaggttctgaagcacactggttgcttcagctaattttaatcctacataccgcctttgttcatcttctatcagaggcaaaagattttgccttttctcttctaatacttttatagacgggctatctggttgaaaccgtactaattctccagataactgggcttctaattgacgtaattgagtgattaattgactatatataggggctgtatttaatgttgcttgttgtccttctggggttgataagctaacataagtagctctggctgcggctaagttttgctcaatttttagtctttcttctgctaatttttgcagttgttctgccacatgatcggactgatgttctggatcaataaaatcatacctttgtctgaatatttgtagttgtttctgcaattgacctaccctatttctgatggcaggtagttgtttatctacaaattgcactccctgagttagtttggttttgcgtttttctaagctgtatttcaaatagaaatcggatagtgtctttaatactaagtcaattttttgaggttcttgatgtcgatagcttatttttataattttggttttacctagacgactaatctttaaattttccattagtaaatcataggtgagatcaggataggaagattgtatctttggcagaacttctttcatcagttcctggcttataagcacctcaatttggctttcgtaatctagggtagagttattaatcagactagactcgggcagaggtacttgtcctaataaattactatcactattcacaggctcaactaaaagctgaaaattaccttcataaatattttctgctttaagtgtgaggtaaataacagtagacatcactacagagacaacgctgatgataaccaatgctcgtctctggataacagaaaaaaagtcttttaagtctatatcatcttcctcggtttcaaatgagggaaaattctgaggaggcaaggtttgaggtgcaataatgactctgccattttcactcaaggttgagtttatgctagaattatgattgttcatggattgttagatcaaatgattttttgggttaagtatttttttttatttttgtagcattctaagcttttattcagctaaattttatggctctcctagactagatatgaccatttaacacttaatacttggttaaattcattctgtgtttcattatacagcatttttcgttatgataaggtaaagatattaatgataaaacccttgtagcacaggcatacttcgatttacttcgacaccgcccttcgacaccgcccttcgacaccgcccttcgacaccgcccttcgacaccgcccttcgacaccgcccttcgacaccgcccttcgacaccgcccttcgacaccgcccttcgac

SEQ ID NO: 27 - DNA, 58243 bp, Sphaerospermopsis sp. LEGE 00249
  LEGE00249_42
ctcttttaggtgttttaatagcttttctctctgttcttgagacagatggttttttgctggcataattcagaagcgatcgcttagttacttaattccctattatacaatctagctgcacaacagcttatggcattcagcgaaagaatatatagcccacagattatttgaatcagtagaacagttagaagaattattaaataaattgctaaacgaaggaggtcttattattaaatgggagcgcaaagttaaaaataaaggtaatgctgtttattcgatttagctgcacaacagcttagattgaatgctaacgaactgaataacaattttctggatagtttataaaaatttattaatgataatcaaataataagcaaattaaattaacgtaaaatttaggaattacttagtatttcctctgattgctactgtcggaaatgatcactaagccaaaaaattaatatatagctgtagacagagtagttacgacatcaatttattatcattattatcaaactttgattacaagaggtttttactcctgacacctgactcttgtacgggcgaagcattcggaaaatagccttttcataaaattgataattggtcgcccgaatgcttcgcccctacgacttgatatagcaattcacctatctgatgtcatgataatcacatttcaccataattgcaagcacatcatagctgattcttgaggtaatttttttgtggctttttaagtcgaattggacggtctcaagaagtgtgaagcaagccaattggctactttgaaaagtagggttcgcaagcttttatccacatcagaaaatttacgtgatgcaatggaaatcgttctcaagcaagcagcgtcctaattaacttggctacagctatagcttgcccaaattttaatatattttgggcaatttttatcacagatgtcttaacattcaacacttctgtaaataaaggtatcccctcaagagatgtgtttcctgttgtctgaattatgaattgctttccaagctcttttcaaaactttcttagtagataatgaaaaatcgcctttattcatcatccagtcataataaccaggatctttggaaaaaacttctaacaaactctgacctttatatttaccaaagttaaacaaaatagcttgcttctgctcatcataaatcaacttattactaggatctaaaaaattaaatgtagtcagttgacttaaaactttaatatcattggtaattggtacaggaacaggagaaccatcattactatattctacattttcataacgttgaatttgtgctttaaaaacttgataggtagcacaaatatcaactgctgcatcatgcgctccttctaaatcttgaccacaataaaacctataagctgctcttaaattgcgtcgttccattgtgtgaaaaatactttgtacatctactaaatttctccctgataattttaaacaaagtcctgcacgtaaaaattcttctaccagcagaggaatatcaaatttattggaattaaaaccagctaagtcactatcatcaagaaaatttaaatagtcaacagcaatttctgaaaatgtcggtgcatcttttacatcatcatcataaattccatgtactaatgaaacagtaggaggaataggaattgtgggattaattatctggtttttcagttcttccctaccatcgggaaatactttgaggatagcaatttgtacaattctatctttgattatatctactcctgtggtttctaaatcaataaacgccagtggttttaataagttaagtttcataaggatttgggattctatataattggtgtgtaataattggtgtgtaatttgacaaatagattatacgcaatttgcactcccactagaacgtcgattcagtaatgctaggtaatctgtttttaccttgtaggggcgaagcattcgggtgataacctatcgctgaaaccagttcatattctgtccgaatgcttcgcccttacgattaatgaatcggtgttctaggaaactaattataaaataattatatcacattccgttatgatcaagatcatacttgaccaggttgtgaagttttaaaaatatgagtaattgagtaatgaagataaagcaaggatggataaaatggaaaatcagcttattgatatgcgattagcggtaagtgctttattggaaactgctactcatcatcagcgtaattttgaaactatgcagcgtaactttgatactttggtcttggaaattagagatatgcgttctgatatgatgcagatgcagtctgagattagagaaatacagatggatgtgcggggtttgcaaactgaaaatcggcggattcttgatattttgcaaaatcgtcctcctgaacaggaatcttaatttttagtgaattttaaattagtgaattttaaattagtgacttttaaatatgtatttttagatccctgactcctttaaaaagttggggatatttttaatcacaaatcatataactctttaaaccaattgataaacccctgcactttaggattgttgggatttaaaatattatactttatagcttgatgtatttgtctccctggttcattttgccatgctaaccaggtgtaaatttctgctttatcaatataagattctttaaatgttgcacctttattttttgcttctctgactacttcctgtgcatattcccaaagatattctccctgttcgggaatcatataacctaaaaatgtttctaacattccttctataatattatttggcataatccaaacaccaaatttttgattatctggtgtattaataattaacccattttctggtaaagcttcaggaagattaggaatatttggaaaacaagcatttctgatactttgccaacgtaaaaaagcatcatcatcagcatctaccattaaacctaaatgtgtgcgtcctctagtttgcaattctgtgtatatgagatcagaagtaatattttcataacctccacattcttgaattgatataattgcttcttctttcttattaccccagaaaatcccatttttttcaattaattctggtatcactcgtaaatcatcttgaccttcaactaataattttttaggtttatcattttttgccattgctaacgtacctccaattctctttccgcagcaatgaccatttgagattcattgaaaactatactttttgatttatctttctcaattctatgaatcctaataccatcatcagtgacattttcttgttgtgcaatttcagccaaacttttccagcaatcgctattatgtgtagttgcaaaaacttgtacatttagtcttttagctgtttcccaaatcattttccacataccggacattgtagtaaaatgaagtccggtatctatttcatctacaaataaataaccatctttagctgatactatagctaatgcaagtcctaatattcgccaaattccatctcccatacttccaataggtacacgctgttttttgtcactaagacggacaaaaaaaccagtatgtgagtcagcaacagcagaacgtaatctcgctatcttattagttttttggacatttgctgtagcaatacgttcaatttttggatcaattattttcaacgcttctgttgctagttcttcttcaggagttaataccacttcctcaaataattctttcatatttgtagtatttaaagaagaagcattgacaaatattgtcttattcaattgattctttttgtctcggctagaacgtttaatcagtctcaaggataagcaattattatctaacagaggcatatttacaatttctttagcttcattttctctattccaaattactcggaagtttaggcttttgaaattacttgataattcttcaataagttctctttttttttcttcgtctaactcttctaactcctctaaatcagcatcaatatgtaactttatacttcctatattgacagaaaactcttcttgaacattgtcattaattcctgaaatagaaaattgactatctatatcaaattgatgatcgtaaaataaatgacaaatatctagttcacgctcttctcctggatcatcactccaaaaatactcaccccggttaatcattatttcaccgagtggttcaagattagttcgtgaacataaaagctgaatagcttctaatatagaagttttaccgctattattttcaccgactagcagattaattctacctagttgctgaagttcaaaggatttgaaacctcgaaaattctctatttttacacttttcaacataatttttaagatgaagacaacagagaaataatgagagtagttttattataacatttaaatccccgacttcttaaagaagttggggatattagagagagcaattagtctataacattagcattaatatctacataatcttctattgcttgttctaaaagtttagtttcatcagtagaaaattgaggagatggtaaaaataaactgactaaaggacgaaaaacttgatactttgcaactgccatgagaaaaccgattgcaaattgaggaatatgatttctcacaaaatttgtaaagtctataaaaatactgtaaatttgctcccaccaggtaggatctcttctagcaatttcattttgaatattctccagttccgttgtaatctcatcgcgcttgaggtttaaaaaatcaataccatcacgagttaaaataccatgtctattccatgtcattgtgagatggtcaacattatccagtattttgataatttttccataatgtaattcattaaataaagtctccttagaatatacatgacttttaaatatccaaaagcctttttgttcataaatcatcaatcttatccgttttatttctctgtctatttttgtgaatgctcctctaagaatagttttttgctcaaatgaatatttttgatattcattgattttttgtatgactatcatgattggagttctccaataagttttttaatacttaggttgtatcatactaatgtataaactcatatagtatgtaattaaatttaacacacaacctctgtattagtgctggttctctaaaaagaataaatcactaatcacgctatgatagtaaacaatgaaggttaaagaagttctcaaaatcctagaagatgatggttggtatatagatcgcattagaggtagtcaccgtatcctcaaacatcaaattaaatcgggtattgtggtagtagcgggtaaacttagtaaagacttagcagaaggaactcgaaagagtattttttcccaagcacaactggaggataaataatgaacaattatgcagtagtctatgaatgggcaggtagtaattattctgcttacgttccagatttaccgggatgtattgcttgtggtgatactctacaagaaacagaagaactgattaaagaagctatagaattgtatttggaagtgttaaaagaagatggaaaacctatacccaaaccttctacaaaagtaggtcaagttgcagtgaatatataaatctaattactttatacttactgctgaatttgatatgatatttattgagagttagaaaatagtgaaaatccaatgacaattaaagagcaaattacgcaagaattagaaaaactacctgaacctgtgttacaagaggttttagattttgtgcagtttttaaaaactaaaaaacaacgaaaagagatgttagaaattacgattatgagtgaatcttcactggaaaaggattggttaaaaccagaggaagacgcagcatggcagaatttataaaaggtgatgttgtaatcgttccctttccattttcagatttaagtcaaaccaaacgtagaccagctttagttattgctacacttcagggaaatgacatgattctttgtcaaattaccagtcaatctgtcagtgatagatatgccattggattagataattctgattttaactcaggtgggttaaatcagcaaagtaatattagacccaatcggctttttactgctgataaacaaattatcctatataaagtaggtgaaataaaatctgaaaaattaacagaagtgattaacaaaatttttgagattatacagtattagacaaatccccgacttctgttaaaaaatcggggatctaaattctatttcaaccctgctaataaatcacttttcgcagtttctaaagcttgcggtaacttacttgcatcccttcccccagcttgcgcgagattgggttttccaccaccaccaccaccgcaaattttcgctacatttcctacaaatttacctgcttggattccttttttattcacttcagaactaaaagcagcaacgatacttacctttccctcttcaggaatagaacctaaaaccactgcaccattaccgattttttgcagtaatctttccgcagcatctttcaatgattctgcgtctacatcttccatctgtgcaacaataattttatgttctcctacggtttccgcagtttgtaataaactgtcagatttaactattgcaagttgtgattttagagtttgaattgttttttcactgttgcgaagttcggtttgtaaagttgtgattctgtcgggtatttcttccggtttgattttaaagcggaaacacaaatctttagttacttgatctcgcacattcaaataatctaaaaccgacgcaccagaaaccgcttctattcttctcactcctgatgaaactcccgcttcagatatgactttgaaaacgcctatttccgcagtattattaacgtgagttcccccacataactccatcgaaacaccagggaaatcaattactcgtacttcatcaccgtatttttcaccaaacattgcaactgcacctctagcttttgcttctgctaaaggtaatacttcaattttgacagaatgcgcttcagaaatccaactatttactaattcttccacctgttgaacttcatccgcagttaaagcgcgaggacagttaaaatcaaagcgcaagttatcaaaagaaactaaagatcctgcttgggaaatgctttcatcaactactttctttaaagcagcttgtaataagtgggttgctgtgtggttagcttgagcgcgacgacgacaagcggtatcaatttgggcggtaatttgatcaccgattctaattgtacctcgttctattttaccaaagtgaacaaagaaatcagattcttttttcacatcttcaattctgattaaaattccatcaccggaaatatatcctttatctccaatttgtccccctgattccgcataaaatggggttttatccaggacaatttgtacttctgtacctgcttctgcttcttcttgggaaataccagcaactaacaaaacttctatttttgcggttgctgctaattgattatatcctaaaaattcggtagagtggatatgttctgctagtttatccaaagaaccttggacagttaaatcaatggtttcgtgtgctgcttttgcacgttctatctgtttctgcatttctgcattgaaaccatcaacatcaacagttaaattctgttcttcggcgatttcttgagttagttctaaggggaaaccaaaggtatcatataaggtaaatgcactttctccactgatggaagttaaacctttttgttttacctcttggatgatttccgctaacagcttttcacctctttctaaggttttcaagaaattagcttcttctctggctaattctgctttaattgcggtttctcgttgtcgtaaattggggtaaattgattcagaaagagaaattgcggtttctgcaacttggttaataaattctccagaaattccgattaatctaccatgtctgacaacgcgacgaattaaacgccgtaaaatgtaacctctaccaacattagaagcacgaatttgatcagcaatcatgtgaactacggaacgaacatgatcaccaattacttttaaggaaactttggttttttcatcactttgatgataatcaattttggcaatattcgccgcagtttcaataatcgggaaaatcaaatctgtttcataattattaggaactttttggagaatttgcgccattctctctaaacccattcctgtgtcaatgttcttattttgtaatggggtgagatttccttctgcatcccgattatattgcataaataccaagttataaaactcgataaatcgggtatcatcttctaaatcaatgtgatcatctcccaattctgggtgaaaatcataataaatttctgaacaaggaccgcaaggaccagtgggaccagaaacccagaagttatcatcttctcccatgcgtttaatgcgtttttctggaactccaattttatccttccagatgttaaatgcttcgtcgtcttcttcaaaaacactgacaactaatctttcgggaggtaaaccaaaaacttgtgtggaaatttcccaaccccaggcgatcgcttgttctttaaaataatcaccaaagctaaaattacctaacatctcaaaaaatgtatggtggcgtttcgtcctgcctacattttcgatatcattggtacggatacacttttgagaagttgtagcgcgtttaaattccggtgtgcgctgtcctaaaaatatgggtttaaatggtagcatccccgctatggttagcagtacggtgggatcttccggtacgagggatgcactggggaggggttggtgtcctcgttgggtgtagaagtcaaggaataaagcgcgaatatcgttaccgctaagatactggggagttgatgacatgagtgtttaagaaatcaattttaattaagttggtcagttctgcaaaaagcatcattactatttattagttatgccataaaattagagctatggttagctttcaccatcttttgtatatagtgtcctattgctccttggtatcaaattaacatccattgagataccttgataatatttacgttgaaaaaatgcctcaaaaaatcagagaattaaaaagtctacttaaaaaagctgggtttatttaccgttcagcaaaaggaagtcatactcgttggtatcatcctttattaccagaagatcctattactatttctggaaaagatggagatgatgctaaactgtatatagaaaaagaagttaaggaaaaattagctaaattaaaatcaattcaaaaagaggagtcagaacaatgaatttaccctatactatcattattcactggagtaatgaagatcaatgttatttagttcatttacctgaatttcctactcaaaaatatcatactcatggtaacacttatgaagaagctgtaaaaaatgctcaggaagtaatagaaatgttggtctctgaatatcaagaagatggtaaacctttacctattgctaaatctttagaacaattaattaatgtggcttaatttatgcaattagaaaaactttcttctattgatgcagctatcattttagaacatttaccagaaagaattagaacagctttaattaaccatgcaacagaaattgaatatccagttgaagctattattgaaatggctatagctagtttcttggatacagaagctttaggttttgcagactgtaaaccaggacgcggacaataaaaatcgtgatatccaagatccccgacttcttaatttaatcatctcaataaattatgatttcttggtagaagtcggggatctgaatttttaatctatatcaggttcaacacctaaagcacgtaattgggcaattaatctttctgttttttgtctctcctgttctgctctttgtctttcttgatctgcgcgttgtctttcaaattctgtgggagttaatacccaattaccatctttatcataccaccgcaaccaaggcatatttacatttttataactaccttcccaaactcccaaacctaattctatgctgggtatccaaaaacgattatcagttaaggttgcttcggtatagcgattctctttcagagacacttcgtgaacgccatttaattgaaacatcctaaactcagattgataacgatcaaaaattgcgtaataaggtactcttaaaatctgctcgtaaatttcccatttaccaggtggtttttccacatctggcaatgtttgacctaagtcttctttttctgttcctggtgatagtaattctaccacaatataaggattaactccttcttgccaaactacataacttaatcttaaatctttttgatcactatataaataaggtacacccaaaaccgcaaaccaatcaggacgtttataccacaatggatgacgagaatcataatacagattcatgtcactagctgtaaatatttcctcactcgtataattagctggagaaaatgtttctgataataattgtggttgtaataaatgaaattgatctggcaaacctttctcctctggatcttcactcggtagatcatacattgtgggtaatgtttctttcggggaaagtggcggatctgtttgatacatttttccctgtcctcaatagatagtttctatttctatatttctattatgtcgcaatttcaccaattacctttttgcattcttcaacagcaaccccttttctcattgcttccactaaactttgataaatctcccaattttcctgaatcaaatttttagcttgcaataaatgaaatctttgtttctgttcaaaaattctctcctcaaaacccaaagctgttaaaaattgatttaacttagctttatcatctccaccaccttcagcagacttaaaaactaacatttccgcagcaattcccgccatccaaatattacaatatctttctaccattgaaacgccaattttgccccgttccaactgttgagcaatttcattatcttctaatattattcccccttgtcccggttgtccaattttccaagcttcccacgcactaagagtataatctgtaacgctaattcctaataaatgggcaactaaaaaatgtcctgcttcatgatgtagaatgcgttctttataagtaggagaaaatcgcgccaaccaatctaaaactattgttcctcccttaccttgaaaactaaaattatctaaagtcgcaatacctaaaaatcccactatagttaaagctgggatagttggggaaaggttgattaatggtcccaacaacgtagaaatggtcatcaggaaaacagagatagcaataagattgatagcggtttgattcatggtaggtttttgttaaaaaaattgtgttaaagtgatattacaaagagtataataataaaattatatcacatatatcacatatatcacatatatcacatatatcacatatatcacatatatcacatatatcacattctatttatatcctacccactgcgtgacttgagccatccctttccaacctaaaaatttaccaataggttctgcacgttgaatagatatcctggtaaaatttccccctactttttcataccattcaaataaggttttttccccttccaaagtcacaacattagctaccattcttccccctctttttaaagcatcccaacatatatcaaataatcctggtgctgtaactcccccaccgataaatatagcatcaggtgtgggtaaattttggataacttctggtgattttccagcaataatttgtaaattgggtgtacctaaagcagcagcattatcagcaatataatttagtctattctgattttgttcaatagcgatcgccccacatctaatattacttcgcatccattctatagaaatagaaccacaacccgccccaatatcccaaagtaattcaccgggtaaaggtgctaatgttgataatgtcaccgcccttacttctcgttttgttaattgtccatcatggtgaaaagcactatcaggtaaaccgggaaatcttgataaaccagttattcctaaatctgcaatacattccacggcaattgtatttaaagatgcgatatcttgatgattccaattattgacaaatcctgttaaaatccgttcattaacactacccattctttctaaaactgtgattttactattcccataaccccggttttttaagatttcagcaacagtttccggtgtgtttttacctgcacttaaaattaagaatttagcaccaggataaatataagattgcaagagagaaacaggacgaccgcataaacttaaagtttctgtttctgtaaagttccaacctaaccgagaacaagctaaactaaaagcggaaggtgagggaataatagtaagttcatcaataggaatatgtttaataatagtagcacccacaccataacacattggatcgccactagctaaaatacaaattgatttgcctgtatcacgtaggttgataatttcttgaatagaattattaaaaggagatttccaagtaattttttccctattatcttcaggtggtaacattgctaaatgacgttccccaccgatgataatttgagcttggttaagaatagaaagagcgatcgcacttaatccctgaattccatcttcaccgatgccgataattgataaccacttttgcataattcgtcattattaatagtattctgtcaagataatttagatgcgtttcccctgaagtgccaagattgctaacccaaaaaacaaaaattcgtttgaccacctaaccaaaattttgctcaaaaaaatattactagaaacttattctttataatcacataataatcacatattttgaatttcatttaatcaatactccagagactttttttatgcttcgagtatgccttcaccttaagagccttaatcgacagcaccactggcatcatgtcataccagcgagtatgaatcaggggtatggcaacgattcaagaaaaattccgccatagtgcttgaaacacttatccagaggtaattgtagtgattccagaatttaacatctaaaactttgcctagtttacgttatcatggtaagatttcttcgtgcaaaattatttacttttaaatttaccagatgtctattcctgaaattacgcaaactttattagaggcaaagaaagagaaaggtttaagctttgctgatttagaaaaaattctgggactggatgaagtatacattgcggctatattctaccgtcaagctagtgcatcacctgaagaagctaagttattagtagaagcattggatttagcccccatctatatccaagaattgaccaaatatccagtcaagggattggggcctgttgtcccaacagacccactgatttaccgcttctatgaaattatgcaggtctatggcttcccgatcaaggaagtaattcaagaaaagtttggtgatgggattatgagtgcaattgactttaccttagatgtggaaaaagaggtagaccccaaaggcgatcgcgttaaaattaccatgtctggtaaattcctaccgtacaaaaagtggtagagatttacataaatggttagtagcagccttcttatttcattcccatgcagagcatgggaacgagtcagtaactcttctcccctgcaacgccagtcgcctcaagtcgggagacccgcccacggcgctggctcccctgaccccctgcttcttctgtcacctgtcacctgtcacgctaaaaattcctccagttccacaatacccttagaaccatcaatgcgtacttgttgaccatcctgaaggagataggtagcaccgcgcacatccataactgcgggaataccgtattcacgagcgacgatcgccccatgagaaagtttaccaccagcttcggctatgactcctcccgccctgactaaaatagtcgcccaaccagaatcggtataaggtacaactagaattgtctgtttattaatttctcctgcttcttgtaaatttcgcactaccttaacttgtccggcggcctgtccttgactggcgggaatacctagtaaaatatggtcagaggtatcaatgggtgcagcgataggatgggggggattgttaccgtaaactagagggggaatttgagtaatttggctatcttcgagaaattgcgatcgccgcttttgcaataactcagcaacttgatctctcagttctggatcagcgtttgctgctaaacgtcgcacttctcctaatttcaaaaagaagatatcccctgtttgctttaataaactttctttgagccacatcttttctaaagctaaaaatgtccagcgtaattccgccaataagcgagaataaacttctgtgactctacctttaagatccacccgtctttgcacaaaaccttggtgacgctgtttagattcatccgtatttgctgcttcatgtccttggatgaactgaacaaacatttgtctgactaggtgaggttgttctttccatctggggacggaaatatcagttcccacttcactcaaataaccataatcttccaatatttcggcaaaatcgtctaaaattcgccgcccttctggaatttgttccaattgctcaaaaattctttctggctcaatctccagtaagatttcttgggcatctgcggctaaaagtttcagcgatcgcaatgatgctacttcaggagtaatactgtgatcaatttgctcctctttcaccccagacaccgcttgccggatagcagcactcaagggagataaaatactgtagtaagtaccctggttgagcaaatcaagaattaagtccactctggttaacaactgcggtggtgataattcctcaatcgcttcatttgctaattttgtcaaccccggaataaatctttgacgataatcccgcttaaattcctgttctaagctgatttctcgctgtaacagctttgtcaatcctggtaaattctccaaggtggaagctagaggcggtttactcatttttgcgcctctggttaaaaaatccaaactttctgggggtaaacccatctccagaaacacttcacctaaaaaggaagcattaaagtaagctctagaataatgcagcgtcgccattttggtgaaatctaactcgcgggttttgtcacctaagactatggtgaacagttctccccacatcccacaagttaagggtaaattaattgaccaggttaagggatgaatcacaccgggaatgacttcagcggcgattttccttgtccagattggtagtaaggtggtaattggtcgtgcttgcaatacccagagagtttgtccgtcataactccactctacatcttggggaacgccatgataacgtttttctaatcttcgggctaggtatgctacttgtttgattaggggttggggaatttttccttctccctcaaattttactgtagataatttatcttcaccgacgacaaacacccgatattgttctggtgtgattttcccggaaacaacttgtgcgggacttcctgatactgcttcaatgatgactgcatcaccttgttgggcaatgggatcacgactaaaggccacaccagaatatacactttggacttggggttgaatcaatacggccatggccgcatctttcccaccaagattgcgccgatactctacagcagtaggatgattataggaggcttgaacttgggcgatcgctagttctaactcttgtttattagtaacattcaatactgtttcgtattgtcccgccgcagaagcttgttgtgagtcttccccaatcgcagaagaacggactactaagggtgacagggatgatggttgcagaaaatcaatcaacaaaccaggatcatcaaagggcgctaaaatccagccttttggcacgggataaccccagcgtttgatttgtgataatgtagctgccttagctccaaatacctctggttctaagtcatcatctaaagtgataatcgtttgctcaccaccgcttaaatattgcatcatcggttgtgattctgtgtctgcttctgccactggcagatccatgtcatcgggcatttgttgataaatccaaccgactaaccccgctaatgcaaaggcagcgataatttttgggaaatcattaaaatgtaagactgctacaaatacgggaaataaaattaaaaccccatatttgatcgcctgtctagagcgcaaaatgataaaaccaatagctgctaataaactcacaaatccggcaattaggggatcgtgcatcaaaaatccccaaactacgtttgttgttccggctcctttccctaaagcatatctccctatcactaaggcgatcaaagctattaattcccaaaatgagccttgaggaaagaaaatacgggcgattgatactgctgcaattcctttaaaagcttccgacagcactgccagaatccccactagtttaccaccgtgatagaaagcagcagagacgctaatatttcctgtacccgtttgtgctaatcgctgacgcttgagagcgtaagtaatccaagcaattagcggcattgcccctaagagtgggcaagtaattaaaataactaataaaccccaaagctgaaacatttattgttgtttttgtattttagatttatattgcatctaaagttgcaaatcgcaaatctaaattttaattatttctcactattttttttagattgtttaatttatgccttgatggacactgagtagctaggttaaccttcgttgttcagtgtcctttgagcttatcaatgatcctagtttaacgcataggcagattgcaacgcccacaggatgagtgctgctatagatcccagaactagcacagtagagattgtgactacttttggtgaatccgcaccttcaaatttcataattccgcgatttaagtcggacatacttttgtaagcctcctttgttacattcccagtctgtccgatttgattgtagtctttctattcacctaatgatgttaaattcacattattattttgggaataggtgattggtgactggggactggggactggggactggtgattggggaattgctttagcgaagcttaccgaaggtatcgctgtttggttttggtaatcctctcatttacattggtgatgaacaaattggttatttattatcacctaatcaaagcacccgtcgtatgggcaaccgcattgaaattaataaatattctgtgcgaagtgcgacaatacaaaaaacacctcaaccattgacactgcgaattttgcttttaggtgattctattgctaatggcggttggtggacaggtcaacaaaatactatttctagtttaattgaaacttctttaaaatctcaaaaatatcagaataattaccaacaagtgaaagttttaaatacttctgctaactcctggtgaccaagaaacgaattagcttatttacagcgtttcggcaattttcaagctcaggtgatagtgttattaattaacactgatgatttatttgctactgctcccacctccctacctgtgggacgcgatcgcaactaaccagatcataaaccgcctttagcaattatagaatttttacagcgttatttaattaaacaaaaacccatacccataaaaattctcagattccactttaccagaacgaatccgctgatgataaacaacacggttaaataaactaacttgcatctgggtaaaatcaaacgccaagagatttttcttacctagatattgcgctagtcccgtcagttttaacaccatagatcccagttgagcttgattagaaatttcgcatttaccagatgctgtttgtgaatttgtgtgtaaacttgtttgtaaactggcatcatctaaactggcactaaaagaaatataaactgcggcaaactttggtaaataaaaacccttacccaaaataattcccccacgctgtctaactttcttagtaccagtagcaaaacaaagccgccatttacccatcaaagactcaaacggataatttaggcgttgctgcttggcagatttttctgctgctagtaaagcattgataactatttccgccgagggaggtttatttccctctcgataggcgatcgcagtttgagttaagatactgagaaaattaagcgtggtagtagatgtcaaatcagccgtcatgttaatagttgttttttctatgtctaaatagggcttgctgaataaactaaaaaccttgataaatcaagggtttcaggtggaaaatcaggaaatcagtgcaggatttttcaggggtatactcctaaaagcgtgcattttccgggtgaaatttcaaagaattggttactaacagatcacccaaactcttgcctattccctattccctattccctgccttaacgaagagactttttcagcaaagcctaaatagattttaaccttgatcaacaagctacccaacttttcccagaattggtaatctgtctgatagctgatggcataaatacagcagattgcagattatagcagttttcatgtctttagaccacaataagggcgaagcattcggacgaccaattatcaatttttgtcccaggttattttcctgtaagggcgaagcattcgggtgataaattatcaatttttatcacaggttattttcctgtaagggcgaagcattcgggtgataaattatcaatttttatcacaggttattttcctgtaagggcgaagcattcgggcgataaattatcaatttttatcacaggttattttccgaatgcttcgcccctacgactcctgacttctgctatctttctacttaggaaagattaaaaatcctaaaatctttagcacaatagtataacccgattgtcttttgcgtggtttgaggagttgaacttatctaaagacacagagaggtaaaattatggacgctaatagcttcctgagtcaatatacatcaggaaaacggaattttaagggagcaattctgcatcaggcacagttaactcaagctgaattaactggtgttaatttatctgaagctgacttgagtggtgctgatttaagtgaagccaacttgagtaaatgtaatctatctagagcaaatttgaccaatgccgatctcaatggcgcaaatttgcaaggtgcaaacttgagtgaagtaaatttgattggtgctgatttgacaagagttaatttccaggaaactaacctcagtcgtgcagacttgcgatccgcaaatttaacgtcagctaatctactgggtgcaaacctcagtgaagcagatatcagtggtgctgatttcagcagtgctaatcttcaaaaagccaatttgattggtagcaatatcgaagaatcagaactctatgatgcagatttaactggtgcaatcatttctgaaccagagatgactgaggaagttctgcatataggtttatcccatacatggatcacatgggctggaagttattgatttttcaaggggaaatgggaaatggggaataggaaatggggaataggagtcatggattttggattgtttttgtcatctccagtctaaaatctaaaatctaaaatctaaaattttcttccccactcaccagtcaccactccttaataaactaaaggtgttacaccacgcattgctcgtaaagaatttatacaagctgggcaatcacagccaaataaatccacggccatattgctttcttcaatattgaactctagcatctgaatatcagcaggagtatcaaaatcttctgcttgagcttgatactctggaatttgagctaatacagaagctctagcacatactaaaccaactttatgtttattgcgaatacaggacaaattatctttactttgggctgtattctgggatgtatttttaactgttggttctatcgcttgggcttgcttgagcatcactcccatagtcaaccaggagctaatcaatacaggagaagaaaagaggcttagtataaatttgttcatcatcttgcttgatataatgttcttgactgctaaggatacacgattaaatctttcaattcaagagaacagctatcaggaataataatagttgattccggtgctatagagtgtcagtattagtcactgaccagttatttaattttttggacataattgtagtagttatgtcttttgactttgacaattttttcaatcctcttcctttcagagagaggtcattgtcaattgtccattgttaattgtccattattgaagtgtgtagccaggaaacagcaaggatcaggaaacaggaaagacgggttttagttattcaatcaatttagatattgactgaaaattaactattaaaaaatgaataataaaatgtccgcaagagcggacatatatcagggcttctgtcacttttattggctacaatcatgtatggaacatgatgcttttattgttgatgatcaaaaccaaaaaatcaagggtttacaagcattagactagacataactacttgaattttatctttttatataataagccttgatgagtgattagagacgttgaccggaatgtttgtatggaattattgtcaaatttgtaattacagagaaccaattttgtagataaattatcaagtctgactccaacagcgatgatgattttgacttttgttagcacaactttggttaaggatattctatattctgcatcttggcaattttctaggaaatatcaacaggaaaatcacctgataaatattttggttgtttatataaaacaatttgtctaatagcatagcaaaaattactaaaatcggacatttatttttagacataattccgatatttatgtctttaagttctgaagatttatggtatttttaaattaaattaaattaaaaaggtaaaggtggtcaggtatgacaagccctgagaataatctgttattcttggggttttattcatcgacaattaaaaatgaacctggaatgaaacaattgtcaattatcaattgtcaattatcaattgataacgacgtggtgtataaactcttgtatctttttcactggtttcaattttccgagtttgggaagaaccaacaataatcaaagttcgcatatcagcatcctttggttctaattgttccaaattaatgacttttaccgtttgtcctggtctgccaagattccaccctaatattaccggggtatctggttttctgtactttagtaagatatttttcgcttcttctaattgccaagttctttctttggaaataggattataaaatgcaattacaaaatcaccttgggctgcgtttgtaatacgttgggtgataatttcccaaggttttaaaatgtcagaaagagaaattacacaaaagtcatgtcccaaaggtgcgccaatagctgctgcggtggcttgcatggcggaaataccaggagctacttgaatatcaatactttgccattctggttgttgatatttatctatgacttcaaaaactgcggtggccattgcataaataccgggatctcctgaagaaactactgctacatatttacctgttgcggctaagtctaaggccatttttgcccttgcttcttcttctctattatccgattcatgaatttttttaccttcagctaaagcaccaattaaattaatataagtcttataaccaactaaatctgtagcatgattgagaatttctttaacttcgggtgacatccattttgatgcaccaggtccagtaccaataatggctaattttccctgtggttgtccgatggtttcggggttgataatttctggagaaatactcagagtaatctgggaaaatggagaacacaaagatttgttatttggttctgtacctgcacaaacaactgcttcatgaaaacagtatccttgggtggtaaattttgtcagttgactcactgcaaaaaaccgaatgggtacttgaaaaatgtgggcgatattttcgagtatgggatcagcagcgaggtaaagaggtgcaagaataactgcgactgctttggatgaaacctgtgcgtcttctagtagttcgtaaatgtggctaagtgttcctgagttgggggaagtaatggcgatcgctacttttttgggatgataaactaaacagtcaggttgaggaattatttttttttctgtcacctcaatagttaactccccattttcatcaataggtaagttactttcactcaaccaaggtgctgttcctactaatttaacttttgcccctgctaataagtcagatataaattttttcgcattctctgggttagctaaatgatatccaaaaggaggagataacaacgctgtccgaaaacgcaaatctcctgtagttgtaatggcagcttgtacttttaaagctgctgctatttgccgtgctaattcatttactccacttagtccacccaaaagcgggacaactgcactaccatcttcagctatagctaatactggtggttcttgacttttatctgtaatcagtggtgctaaagttctgatcaaaatcccagatgcacatataccaattatcggtgtgccagcggcgaataagtcccgcagtgtatcgccaaagtttgcaaaactcacatcaacatcacaggtacgacttgctaacccatataatttcgctcctggtaaaatacttgtaattttccttgctactgtgatactattttgacccagtatgacaacggcagatgtcaaccttgttttcatttaatatttatgtttatttacttattttaagatagttcttccttatcaggagatactctatcaggttttcagatgggtgtcaatagtcttaacttactattgcgcggtgactggggactgggaagaggtaacatatattctttatcctgactcctgtacgggcgaagcattcgggtgataaattatcaattgttgtctaaggatattttcctgtaagggcgaagcattcggacgataaattatcaatttttatcacaggctattttccgaatgcttcgcccctacttcgcccctacgactcctgactccttgaactccttaaagtctttgcttagtcggaataacgatcatcgagaaataaggaacttgttcgggatctacttcatctagaggtaaaattctttgctgtgttgttgttgcccgttcaatatattttgcccgtgcagctagtcctaattgatgcaggatatcacgcactttaacaaaatgacggccaagtttcatgatggcggctgcatctgtagccaacagttgggcagttagcatttctgtgggcagtgtagcaggtagaactgtaagaatatcgttgtagtaggtgaagggtacacccaaggatactggacaggccattaaggaagaaatgccaggaacaacttccgtctgatactggtcagataaacgagtaaagatatacatgaaagaaccgtaaaaaaacgggtcgccttcacacaatacaaccacatcccgaccggctgctagatgttcacctatgggttcaacttctttgtcataaatggcttgggctttttctggttctagggcgcggggaagatgatacaaaacttctatttgattacccggtaagtatggcgacacgatttttctggcgatactttcccggtctattgctgactgataggcaataacagaggccgaacgtattaagcgtaatgcttttaatgtcaatagttctggatctccaggaccaacaccaactccatacagacgaccttttgagttcatatttcttcctcggttgctatggcgttaatggcagcagaagcgatcgcactgcctcctcttcgtccatttaaagtcataaatggcacaccacgactatcttctgctaaagcgacttttgattcggccgcaccgacaaaccccacgggaaagcctaaaattaatgccggacgtggtactccctcatctagcatttccaataatctaaataaggctgtgggtgcattaccaatggccacaactgccccatctaaatgaaaacgccacagttctaaagctgctgctgatcgagtatttcccaggcgtttggctattgttggtacttctggatcattcaaagaacaaataattgcgttattggtgggtaatctttttctggtaattccttgtgcaaccatgtgacagtcacataaaattggtgcgccagatgctaaggcttttctacctgctgccacggcattgagtgaatatgctaactctggaactatatccggcattccacaggcatgaattaaacgaacagcaatttgcgctacatcatccggtagggtatctaatttagcttctgagcgaataatggcaaaagattttctgtatatttcctcagcatcgcgtatataattatacatagtttcgatatttggaatttgagacttaaatggattgaacagtgaacaattgtttgagttcagatatatcataacgattggcaaattctctaaatgattcttgagaactaacccgtttcatttgatacacttttaacattcgttccatgagttgaggtaattcggcaaaagtcacattttcataaattggacgaccaaattgttgtaaggtatcgtcaccaagatacacttgatatccttccctggattcattttctgcctcaattttcactcctagcaatgtaatatcactttgatgatgttgagcgcaagatttaacacacccactaaaatgaatattaatagcagaatctaaggtgatgtgagtttctaaatattctcctaatgttaaagcgtgagttttggtgtctgttgcagcagcagcacaaccccgctttcctgaacaggaaactaacccgcttttaatgttggtagctgaataactcagttctagatgggcaatttctctttgcacttgtgcaatgtgttcttgggcaatatctgtgattagtaaattctgccaaggtgtgagtctgagattactattaccatatttggcggctaaatcagctaaaccccgcatttgccaagtttgcaaccgtcccaagggtaaaacaacaccgatataatataatcctgattgtttctgttcatgtatgccaatatggtacatttcttgattattttgattattatgtttagcttcatcatgtaaatttgcgagtttgcttatttgtgtgagattttgagatgctatttctttggctacctggaaattatttgcagttaaatactctgtagcttgttgtaaataattttcccagcccaaattatcaataacttcccgcaagcgtggtttacgtcggctactaggatctgtatgctgtaagtaaacctctgctaaagcacctaaaaatggtatacattgtgcggacgttaataaaattcctgtatttataaaaaatttttctttttcaccaccacaaaaatgcaaaatgagatatactaatttatgtccccatttccccgtaggaaagaacttcggttctttcctacccccctgatcaatctcaacagccgctaaagtgatatcattggggaagtgtttgagagaaagttttccaccaccatcgaagccaacgctaaattttgccgaaagtccgcctaaatgggaattttttgtgatgtattcatcccaagctttcaccagaggatgagtatatattaattcttgagagtctatacccgtaatgggactcgtcataatattgcgaatatggtctacagcaggattaatagaacctaatcccattttttgtaattgctggagaatatcaatatttatttcttgtttaatttctctgatttgtaaattagcgcgattggtaacatcaacatagccgcctccataattatccgctatattggcgatcgcgtgtagctgttcactattcaaaatgccaccgggtattcttaggcgagataagatgccatcttgggctggtgtggtgtaaaataaacctggacaagctgtaaatggacttaacaaaatggtcactccttccccgtgcgacgcggagacagaacagggataaatttcctagagttggcattctgacttgttcaatttaggattttagattttggattttggattttggattttctgattacccttattttgttacaatgtttttctcagtatcaatcatctaaaattagcaatctaaaatctgacattgctttacagctgcggcacagtcccggaatttaaccggagtttcccaaatctaagattttgaattataccacaaaaaagaatttttggaaaggtaattggtaatgggtaatgggtaatgggtaatgggtaattaggttattcatcttcccccagttcccagtcaccagtccccagtcaccagtcccctttaaaccagtgtaatagctgttacttcgggtggacaataccaacgtccgggggggaaagttcctaaaccacgattgacatacaattgatttgtacctagatttgtcgttatttgatgtagtccttgactccattgccaattttctacgacttttggccatttacccttcgtaaaaggtatccaaggccaaaacaattcaggtattttgtgacgggaagaagaaatccaatttggtaaagaacctacaccgggaatcacaatttgacccccgtgagtatgtcctgacaattgtaaatctacacgccaattttgcaaaactactgcactatcaggattatgtgataaaacaatacggggaatatgaatatctaaggaattcattacaggtgctggatgaaattctggagaccagaaatcagcgagtcctactaatgctaaatgtgaacctaaaggataggcgatttgattccaaagtacctcaatttctacacctgttaaagctttagtaatttctgtttgggagtgagtataataaaggtcatgattgcccaagatagcataaacaccagcgcgactttgcagatgttttaactgtttggcgagttgataaattggttggggattatgagtaacaaaatcgcctgttaatactattaaatctggtttgagttgattggtgaaatctatggcttgtgcgagtaaatcttctgctagtaataaaccatcataatgaaaatctgaaagttgtacaattttagtgttttgtagatatttaggtaatccgttgatttttacatttaaggattctatgcttaatggttctgaaagtattttaatcatatttactcaatgttgatgatttattaaaagggcgaattatattcaataatattattctaactgttgactactgactcctgtaagggcgttcgcgaagcgtgctggaagcatcagcattcgggcgataaattatcaatttttatcacaggttattttcctgtaagggcgaagcattcgggcgataaattatcaatttttatcacaggttattttcctgtaagggcgaagcattcgggcgataaattatcaatttttatcacaggttattttccgaatgcttcgcccctacttcgcccctacttcgcccctactgaatttttaccttttataattataattgccaacgcaaaaataacattaatctacctaacaacttttgcttaatatttgtctttctccattctgatatattaatctgatgactgtgagagaaaccattcatgaaaaactgttccacaaattgagctaatttagactcagataaagaaatattcaactcatcattatggaacatactgcggggatctaagttggtgctacctgtactgacaaaattatcatcaataagtaaaactttggcgtgcatcatgctgggttgatattcatagatttctattcctgcttttaataaatctccataaccttgacgtactgcatcatagactaagggtttatcatttcttgatcccattgtgagaatacgaagatcaacgcctcttttttttgcttgtaataaagctcgccaagagttactatcaggtaaaaagtagggactagctatccaaatgcgtttttttgcggctaggaaagctgtataaaaaagggcgcagatagaagaacttggagatggtgaactactaggggttactagcatagttaaactattatttaaattattatttaaactattatttaaaccaccgacaactggagttttaaatagttctgatctgagactggctacaccaccttcatacaaccaatgttgcatgaaaattccttctaggataacaacaatttgcccggtaaaacaaatttctacatctaaccaaggagggatgatttttttaggcataatgccatcccaatgatcagaaactcccataccgccaacaaaggcaatttctccatcaattaataataatttgcggtgggtgcggatgttataagtaaagggtgcttgccaattaaattgatgaaaaaatcggactgcgacaccgccagcttttaaccgctgccaatattttggtgagatagagtttacccccatgttatctgctataaatagcacttctattcctgcttgcgatcgctcaattaatgctgtagcaaattcatcagtccgctgaccaggagtcatgaaaaatgtttcaaaatgaattgttttttgagcgcgtttcactgcctctagtctagctttataaatagcatctatatcaaaccaaaattgttgtaaataaccagatgtaaggagtgaatttgacacactcatcattgctggcagaaaatgaggttcatccaaactgggaacatctgtcattctgtacttaacttttttatgccaagcaattcttaaatacaggataaataaaaccagtaccaataaaaccaggataaatccgccaatgagacagattatgtaccaaattaagttagaattaaaatgcaatggttgacatattttaacaacaaattttattataaattataatttttataattttattataaatataattcttgataattcttgcctgttgaccagtcaaataatacttttggtatatacttacgttaaaaatatctagccttgggttgaagaaaaataattattttcttgtttagaattgattaatgtataataaatctgtaagttgcgacatttttgtatttggtttgtatttttttgatgagagtatttggattagaaatgtatgaaaattcaaccagaaattacctatcgtaatgtagagaaatcagaggcaattgataatttagttcatgaaaaaattgccaaactagagaatatttgtaattacatcaatagctgtcatattgctattgaaaaaatccatgatcgtccccgtagcggttctccttatcgagtgagaattgatctgactgttccgcctggccatgaactagcagcggaaaaaaatccgggtgagggtgttcaatatcaaccgttagatgcagtagtgagagaaacttttgatgctatgcgtcagcagttagttaaactgactcaactgcaacgtgcaagtgaacaagctggcagatatgaggaagcgcaagaaagtacaggtttggtaacaaaattatttcgagaagatggctatggtttcctgaaaactttagatggaagggaaatatattttcaccaaaatagtgttttacatcacgactttgaccgtttaggaattggtactggtgtgcatttttccttagaagatggggaagaaggaccgcaagcaagcactgtaaaaatagttgataaacctggtgtgcgtgctggtaaatcttcagaaaaattggtggaaactcctttagattggtaggatttaataatggacaattgacaatgaacaattgataattaattattgcctctccctgtaagagaatgaaaacagcggattttttgattttttcaccttcaaaggagaggttttcaagtttgaatacaatagtcaattatcaactgttaatatcaattatcaattgatcacttattggctggaaaggatatgaatacacaaattgatgaattgaaaaaaacagcatctcaattactggcagcaatgctatctaatcctcacatttaccctcaagttagtgatgagggaggttatggaaatttggaacagaaattaattattgcatctgtagaaatggcagagaaattaattgagcagattgacaaaaatagttcaaaaaaatgatcaatatcaatttttttttcaagggcgaagcattcgggcgaacaatgatcaatttttctcccaggctattttttgaatgcttcgctagattctaccttaacggtgagagagttctaaaaaactaattttttgtggtataaaacttgatgaactttcccaataatctgctttgttaatattgacttttagcaaagcaatattcggttcatctattccttggggaaaccaagtttgtaattcgggtttccatttctcttgtaatttatttctatctttcaccagttctgctgtaccggaaatagaaatatatcgctgttgatcaggtgaagaaaaactcacatttacttgttgacgacgttgaatttctaagactttatgagaatcagcaaaggtaaagaaccaaagtttaccatctgcatcaatgtcgctaaaaatagacataggacgactatgtaaactaccatcatcatcgactgtagttaacatagcattgtcaatgtctttaatcagtgtacgcaactgctgagttttttgattgtgttcttgtgaatttgccatttaggtatttttttatttagtaatgggtagctcatatcttttttagtattaatgtttttagattcctattacatgagtctataggtgtaattctcaccttagtaattaagttgcttagtgtataactaaagaaagatttttagaaaaaaattagagaaaaatgataattttgtttagggattacaaataattatgtaacttgaggatgatggcaatagctagtaatttttatactatttttttatactattttagtgattgactggatcaactgataataggagagatgtaaaaatggcatctacattagacacaattattgaaggtttgacagcaattgtcttttcacctgtgattttaccgattgcatcagcaatgaaacaacctgtagtccaaaatactattaaagatagtattttgttatcagaaaaagttaaggatgcagttgcagaaatgggtaaaacggtagaaaaagtaagcgcagatgcaagaaaggagaaaccagaaagttttccatctagaactcaatctagaagtcaatttagaaatcaatctagaacttatggaaattatttcacaaatggtaaatcagaagcagcaaaagatttaatcaatgtcatctctgatattaatacagatgtggcaagaatgacaaatggtgttgctgatttacgagtgatattacctgtaggaattggtttactttcgctgcaacaattgttaagaaaaggatttcaattagaagaaataccttggtatatattggcttggtatgcttttgatatttttaccagactaaattttgaggatgaaactcaattaacaaatttatcaattaatactgtttcaatggaatttcaggagcaacaaagtagtgattcaaataatacacagcaatgtcaaagggagagctagatataaaattgatgaactttatcgttcgcagtcattaaagatatatttggagcgatcgcttgctaattacccagaaattatttctgttgctgctaatgtgttaactagcaatattttggttatttttcaaccagatgttagctatagaaaaattgcatattttattgataaagctttatcggcatataaagataaggctggatttactgatgttgaaacattagtaaaacctactaaaaaagataagttaactgtatccaagtatgagcaaaaaaccgaaaattggcatttaatgacagcggataatgttctgcaatcattaaatacttcccatatctcaggattatctaatgaaactgccaataaacacctgaataaatatggtaaaaacctattatcagcaacagtaacacgctcacaaatcagtatgttaattgagcagtttaaatcattaccagttgctttattaggtgttgctgcgggaatttctattttcactgggggaattattgatgctgtcgttattttgggtgtagttggtttaaatgctgctattggttatgttacagaaagtcagtcagaacgcattattaattccctgaaaaatcgctcagaaaaatctatttgggtaattagagatgataaactacaagaaatacctacagaaaatgtagttttaggagatattttagttcttaaacctggtagttatattgccgcagatgcgagaattattgaagttgataatttaactattgatgaatctgctttaactggggaaagtgttcccgtttctaaaaatcccacattattacatggtgaagatgtacctttagctgatcgtttgaatatgatttataaaggtacattagttattaatggacagggtttagcagcggtaattgctacaggcaaatttaccgaaatggggaaaattcagcaattagttagtgaagcaacaacaacccaaactccccttgctaaacaattagatcaagtgggtagtcaactggtttttattagtatgggattatgtggtttagtgtttggaatgggagttttacggggatataatttattagcaatgttgcaatcttctatatctttagcagttgcagcagtacccgaaggtttaccaacaattgctaccacaaccctagctttaggcattcgtgatatgcgaaaaaataaagttattgttcgcagtttgaatgcagtagaagcattaggttctgtgcaaactatttgtttagataaaaccggaactctcacagaaaataaaatgtcagtggtggaaatagtcaccgacagtaaacatattcaagtcagggatggtgaatttattactggggaaaaaattattaatccctacacttataatgaactattaaaattaattcatgtagcaattctttgtaatgaaagtgaagttagtaaaaaaaatgatgctgatgaatatctggttacaggttcagctacagaaaatgccttgatttacacagcgattagtgcaggtgtagatgtgatggcattgaaagaaaaatatcctttactgcaaactaatttgcgttctgaaaatcgcaaccttatgagtacaattcatgcaactcataattgtcagcaaatggtggctgtgaaaggaaatcctgcggaagttttacaactttgtcatcggtggatgaaaaatggtgaagttgtacctttgatagcagaagaccgacagaaaatagaaatagaaaatgatcgtttagcaggaaaagcgttaagagttttgggtgtggcttatggttatattgaggaagtggaaaataacaataatcatgaatcagatttaatttggttgggtttggtggggatggctgatccaattagaaaaggtgcaaaagaattaattgccaactttcatcaagcgggaattaatacggtaatgattactggtgatcaaagtcctacagcttatgcgatcgctaaagaattagaattaaatcgacatccccaattagaaattcttgactctaataacctcaataatctcaccccggaagcattagcagcactcagcgacaaagtagatgtttttgcccgcattagtcctagtaataaactgcaaattgttcaagcattgcagacatcgggtaaagttgtttctatgaccggtgatggtattaacgacgcacctgcattaaaagctgctcaagtcggtgtagcaatgggtaaagaaggtacagatgtcgcccgtgaagttgctgatattgtcttagaagatgacagattagaaacaatgatgattgcggttagtagaggcagaacaatttacaacaacattagaaaatctgtacattttctcttagctacaaatctcagcgaaattatggtgatgacaaccgctaccgcagtcggtattggtgaacctttaaacgcaattcaactgctatggttgaacttagtaactgatattttccctggactttctttagctatggaagcaccagaaccagacgtattaaatcaacctccgcgtaacccaaatgaaccaattattaaaaatactgattttgggagaattgtgtttgaatctgctgtcatttctattagtaccttagctgcttatggttacggtatttttaaatatggaattagtcctaaagctagtaccttggcttttatgactttgacttctggccagttattacatactattagcagtcgttctgaaaaacacagtatttttagtcaggaaaaattaccgcctaatccttatttaacgactgctgttgttggttcttttggtattcaaatttttgctttggttgtgccacagttacggagtttgttgaaaattgccccgttgaatatggttgatactgctgtaatttctggtggtgctttgttgccattgttggtaaatgaagggactaaaaaaatcagttgataagatattttgataacgaaccacagaggcacagagaacgcagagaaaagagaggatttttttatgaaaaaggattttatgtttacgtcggaatcggtgacggaagggcatcctgataagctttgtgatcaaattagtgatgctattgtagataggtttttacaacaagatccctatgggagaattattacagaatgtgctgtatcaacaggtattgtttttattgctgcgagatttgaacctagtgcaaatgtggattttactaatattgctaggcaggtaattgaacaagttggttatcaacaaacagaattcaatggtaaaaattgtagtattttaactagcttaacagaattgcctcctgaagaatatcatttatttgatgaaaagattttatctgatgcggaaatagagaaaattactgtcaagaatcaagctacagtttttggttttgcttgcaatcaaacttataattttatgcctttaccgatttggttagcacataaattagctcgacaaattagtgaggtgagaaagcaaaaaatcctctcttatcttaccccagatggtaaaacccaggtaggtgttgaatataaaaatcgtcaaccttataggattcacagtattacagttatcgctagtcaaaatcaatcaccaaaaccaaatttacaacaattacaagatgatattagagaaactgtgattgatcctgtgtttgcaaatgaagcaattaaacctgatgctaaaactagaatctttattaatcctgatggaccatttattattggtggacccactgcccatgcaggtttaactggtagaaaaaacgctattgatacctatggtgaatattctaaacatagcggttcggcgttaagtggtaaagaccccattagaatagatagaattggggcttatgttgctagatatgctgctaaaaatgttgttgctgcaaagttagctgatgagtgcgaagtacaattaagttattctatcggactttctcgacctgtgagtgtgcaggtggaaacttttggcactgggaatatttctgatgaggaaattactgctattttagagaaacattttgattttcggttagcaggaattattaaacaatttaatttaaggtttttaccttcattaactaaaggtgggttttatcgcaagcttgctgcttatggtcatctgggtagaattgatatagaattaccttgggaaaagttggataaggtggatgtattttgaatttggggttaataattagggcttgctgaaaaagttatctgtgaaggaccagtgacaggtgacaggtggcaggtgacaggtgacagtttcagctatctgtcatcctataatttcctgatttatcagacccaaaatgcacactttttcagatatacactttaaaatccttgcatctttttcttgtttattagcctcaaaccttcaatatatctagcttttgtctttattcagcaagccctacttacagcactttccggtgtaatgaggtacactatgggcggtcaagacttgtactgagcttgtcgaagtatgcccaccccacaagagttttatgattatgatttgtacctcatagccataaaatctgctgtaaatgtgaaaggagaatgaaaagtcaaaagtcaaaattcaataactcctgactctcccagtccccattcaccccctaagccgttactaacttctcacctttgagcatccgagtagcggcttctaatagtgcttcttctaaatagggtttagtaaagtaaccactagcaccgagttgaacagccatttgtttgtgtttgtctgcaccgcgtgaggtcagcatagctataggtaggtgattaagactaccgtctttttgaatacgggaaagcaattccagaccgtcacagcggggcatttcaatgtcacagaagacaatatcgcaaggtaaaccagaacgcagcttatcccaagcttcttgaccatcacgggcttgttcaacacgataaccagctttggtaaaagtgagagaaagtaattcccggacagtaatagagtcatcgacaattaacactgtcggatcaatcttcacctctggagcgttatctacaggaagagccgttcttcgttgccaagagccaccaccaatttgtttagacatcttaccttggaagatgtcaataatttctaaaacgtcggcaataggcataatgcgaccatcaccgagaactgtagcaccagccacaccactgggtttaggtgccggtccttcaaattgcttaatgacaatttcctgttcacccaacacttggtcaatctggatagcgaccattgtattacctgagcgcaaaacaaccacagaaattgtgtcatcttctcgtgtgttgctgtagacgttaccgcgagcaatatgacgattgaaaaccaaaatttcctgtaaagttcggaagggtaggactgtttcccgccaccaaataaacgattgtccatccgcatctttctgaacatctgtaacgggtatatctaatgtgtcttccacgccatccattgggaaagcaattcttgacttgttggaaatacagcagagagctttacaaatactcagggtgagtggtaggcgaatagtaaaggtagttcctttacctagtaccgaatcagtggtgacagtaccacgaatttcgttaatatcagtttgaactacgttcatacccacaccccgacctttgatatcatcaacttgatcggctgtgctgaaattgggcagaaacaaaagttcataagcttcttggcgagatatggtttttgcttcttctggtgtaatcacacctttttgcagtgccttctgttttaccttttcgtgatcaataccggcaccgtcatcactgacagcaattacagtttgattaccttggtggaaagcgcggatcttgattgttcccacaggtgatttacccgcagctgtgcgaacttctggagtttcaataccgtgagagatcgcattattgagcatatgggtgaggggatctgtcagatgatccaaaatcatcttgtcaactaatgtatttaccccttctgtcatcagttctacttgttttccatatttgatgccgttatcccgcacccctcgacgcaaccgatcaacagattgagcaaaaggcaccattcgcgctttagttattccttcttgtagttggctggtgacttggcggaactgtagtgctactcgttcagtttcttcggtaacaaagtcaatgtcgctggctgactcccgaactctgacaatgtattctatggtttcttgagcaagtaggtgaaattcggtaaactcgtccatttcttcggaggcaaaaccccgatcattggaactgttgtaacctttttctctggctctgcgactcttcaatagtgaagcttccaagagcgatcgctcgtataattcttgcatccttgcgcccacatcggaaagatgttgaatttgaatcaataagttatctaatgattgtcgcagacgctcatgatcctgttctaaggtattgcgattaaccaccaactccccaactaagttgctcatttcatccagttgcttgactggaattttcatgctttcttctcgaacacgacgagtagccggacgtggcactttgctagtatttgagtttatccctcttcctgatgagttaattgtttgatctgcttgttgaagtaattcctccaagtctttaaattcatctggtatgtctgaagacacagctatatttttagcttttgcagccacaggtggactcggttttggtggcgtttgtggtatctctgttgctgaagcattatctgtacccagtaatgcttctaaagccgcaaaatctgcgtctggaatggactttggattgggggtttctaattcttcttcatcgagtaatgcttctaactctgcaaattcatctactgcattttctgaagtattgaatactgccaattctgccagttcatctactacattttccgcagtatttgtggttgtggtttctaactttaatcgttgagaatttgctgcttctagtgttagaggtagccttagaggcgtttgagcaaataaatctgttgtaatttcttcttgttctaaagccaattctggcaaatcaacatctaaggaaagatcaaaggaaagatcaatatctatccccagattttcacttatatcctgctctaatacctctggctgtttttcctcactaagattgcgatcattgatcgctgtctttgtggtttcctggtgatcttcaattgactgaattactgtgatcttctcccaggaaagtgatacatcctcattactgttgtcatcaaaaccagcaaatatatccaattccaaatcagcatttgtctgagcagatggaacggtaaattctgctataaaattcattgctgctggttgttgggaaaagctatcaatttccggcaataacacctgattattatctgctgtgggagaagtggaaggagcattttctaaatcagcaaataaatcatctccaccagatgtcaaccaggaatctcctatctcttgttgttggttttcagtaaaatcaaagtctgctaaataaaagttgaggttagatgactgctgactatcagctacagtttccccaaaacctgcaaataaactttcttctaattccttagccacatcctgttctaattcagcagcatttaactgtgctggttctgaatccatttctgtccagaagctattaagatcatattcaggtgcagcggcagaaattgcttcttttgtattgagatttaaaggcaataaatcatcaatttctaaatcatttgttgtggctgttgtatctgcttcaatttcaccaaacaaatctaaagacaaactttctggttgagattgtatctgttctgatgtaggttcttcaacagtcagttcctctagaaaatcagtagttgtagttcttaataagtcatcaaaactgttttcttctaccgtggattctggttgagttaatttctcttgatcaaatgctaatggtgcatgattttctgatttcaagattacaggaatatcactatcttcaacctgagtatcaccagttcttaattgattgatggtagtgtctggtatttgttcttgttcccatctttcaaaatcgggagactcaccttgaaataaatcttctagagtattgaactcagcaatgcctacttctagtccatttaagttagtaagatcaccactgaagttgagtatttcgtcatcgttttcagtgaacaaggaattgagactaaaagcatttacatctgtgtcatccctagcgatttctggcaaactatcaaagtcttgaatgcttgtatctgctgctatgtcaaattcttctattggttcaacaattgcgctgctatccagtacattatctgtatgtaattcttgtatttctagtgtatcgttagaggatgtgattggctgtggtttttcctctgcccaatttagttctaacaactccagttctggaattagctccagtgcttctaattcttgaccaatggttatttctgcttctttaccgtgaataactaattcttgagcttgtttgatttcagtaataataattttggctaaagtgagataactattatcaggattggcgatcgcattattggcagattgacacaatttagaccaattaggcaaattaaatttttcaccaagtttaaataattgctgacagcatgactgtaaattttccctagatgaaggtgtgctgctttgtttaaaaagttgcagcatttcccgcagggattgtaggacttgactttgaaaatctgaccaattattttggctgactactggcggtttttgggtacttactggaggtacaacttcctgttttggtggtggtgtcggtgcagatacagcaatgggggtgttaatatttcctgattgtaaaagtttttctagatgctgatttagttctgcaaacagcggttcagtttcggacatcaaagtatttgcagtttcctctgacagaccaaagggactacccaaattatccaacaaagcttttaaagtatcagagacactcaaaaacaaagactctagtttttggtcaacctcaactcgttgctctttaagaactttaaaactatcttccagcctgtgagacgtatgctgaatactggtcaatcctagcatagccgcccctcctttaatggagtgagcagcgcggaagacttcgttgatcatttctgggtcattaagggtttcttgtaggttcagtaacccctgttcaatggtgttcaggtggtctctggcttcttcgatgaagtaacccaatatccgttgttgttgttccagctgcataaacaaggatgaagaataaaggatgaacgattaatgagaagaattcaggagtcaggagtcaggagtcaggagtattatcttgctcaggaattaacagattagagattttagaaaacatatcaattaggatgttcaaagtcttatttattctgtattttgtattatgaatcctgactattaatgcaggaataaggctgaatgttgaatttaggatttgggatcttggataaaaaaatctcaaatccaaaattaaacactccctttacctagattcaatagtttccactcggaagctttccacagaagcgatcaagtcgcgggatactcccaccaagtgttgtaatgctcctgaaactcgttgtgcttcttgggacgtttcctgggctgtgagttccactgattgcatcacctgagccacagccagagaagtttccgtctgttctacggtatcagcggtaattgagcgcaccagactgtcgatatgaccagctacttcgataatgtcttctagcgatcgcttggcttcttctgccaattttgtcccttgaattacctgttgtgtaccttcttccatcgctgtcattacagagcctgtatcgctctggatttgcatgacgatttgttcaatttctttcaaagacttggcggatttgtctgctaactgccgcacttcatcggcaacaattgcaaacccccgtccggcttctccggctctggcagcctcaatactggcgttaagtgctaataggttagtgcgagaagcaatctgggaaaccaaggcaacgatagagttaatttcttgcgaagattccgccaaccgtttcacttttcgcgtagtttctgccactgtttcccgaatttccaaaatccccgctaccgtattttctaccgcctctccccccttcactgcgatcacgctggcatcacgggctacaacttctgcttctttggcggcatctgctacccgtttaatagattcggtcatgacctgtacggaattaagggtgacagccaactcttctgcttgccgcaaagcatcccctgataaggctctagcaaaggtttctgagttggttgagcctttggttacttccctcgctgccatttttacctgttgaacaatatcccgcaggttttgaattgtcaggttaaaggcatcagctactgctcccaagacatcggctgtcacctcggcttgaactgtcaaatctcctcttgctgccccttccacatcatctaagagacgaatcacttggcgttgcaagttttctttggcttcttcctgttccaccgctttccgctgggcttcattggtggtcatgaaaattacccgtgccatatcattaaagctggtagctagataccctagttcatcttctgagtagacggtagcctgagcattgagattcccttctcgcacagcatcaaactgagcttgcaaatctttggttgtgcggcgaatttgtttgagtgtcagatttcccatgaaaccagctgtcatcccacctgccagtcctgcggctaaagccattgcccagcctgtatttcgcactgactcccgttggtctggtggagaaaatgtggtagctccaaaactgaccaaagctgctactactgcggatgtcaaacccactgtactagcgatataccattgctttttatctaaagaggcattttcaaaaaatccgaatagaccctgttcaacactgacattgggttctagtttagaaacttctggttgggtaaagacaggaactgcttcttgcgctcctgtaattgtgaatagttcttcatttctgtcaatatcttcatcatcaactgaattcatcgagaaatcttgagaaaaactactgttagcagtattcgacctttctcttgtttgtgatgacacactcatttctcgatactcagattctcctgtgaggttaaaactgggaatactgcctaaatcgtcaaattcgtcaaaatcgcccagaaattccatattgtttggggaattttctccctgcacatttggattctcttcttcatcagtggtaaagctttctgaaccaaaggcagactcaaatgcctctaaatcgaaatgatcatcatcaaattcatctgcatgatattttgtatccaaatttataccttgctcatcatcggcaaaattgttgttcacagatgatgaaatttgggtacttgtgtcaagttcaggttcaaattcttctgattttttttctctcaaatgatctggtcggttccaaaatgtatttgcactactgtctggcaaatcatgtctatttaaatgattattgatttcatgttcttcaatgactacattaatattttcctgactattgttggcaattttcaaattctccagtttcatatcttcaaagtctggtgaatcttgttccagcattaattcaggcgcacttgcccaattcttttcacctgataaattaatttttcccaaaaatggtgagttagtctccgcttcactggttagtgaaatttcctgttctgaatttgcatccagatcagttaaataactattttctactgatgttccaatattctcttcagatgaaataccttcttgccaaaaaggaggtaactctaaatcttttgatacttcagcatcattgctggttgctcctaactctgaaaatggttgatccaatgcaaaaggatcatgaccgaaatctattgagctatctggtagcttgtcaagatcaatactatctaaatcacttgtaaaaggattactcaaagacatatcttcaagcgagtcttgagatgcttcatagtcaccaaacgatttcaaatcaaagttggcgttatccaagtctctcataactcctaaatctagtaaatctgcttcatccattaccagaccattagactccagatgatttctctgttgactagtctcgacggtggattcatcttcaccaaaggcttcaaagtattgttgaatactttctaggtagttagttgcagaacctaaaatttcttgatcatctgtcaaatggaacacctgctcatattctgcttgggcaatgtcgaactgctgcaaaacatagtaaatgtgaccccgcaacagatgagaattggcttcatctggtgaactatgcaccgcttggtctattaaagtagcggcgaattcataatttccttctgtataggctgttagtgcctgctgatattttgaattacgatcatctatatttgctgccatatcctccctcccgacttcaacctgcccacctagcactccgcaaaattgctgtttgatcaatcaatcttagatacttattattttcagtatctatccattcgcccctgagaaaaggagccatcgtatctggtacattattggctggcattagatactgtacatcaagccaacccataccacatatttgttctactcctaagcctactattgtgtcttgatcttcaatagcaattactggtatctccgacctatccgtgtttaatggagtggcatctcccagaaattgacctaaatctgctacccaaattaatcgacctcgtaaatttagagtacccaaaagcagtggagaagcattaggaatcggggtgatccgatcaggactgagttcgatgacttccctgatcccagttgccggtaatgcaaactcctgttgtgaaggaatataaaatcttaaatgtaactcgccttttgggtctatggcttgtgccacgttaacgctatcaggactttctagttgtaattctgggctaaattggtctggaccgctgccacttaaaaagtctggtttgctgaccattttgttatcatccttatcctcgcagtaattgtttgactgttcctaccaactcagttggttgaaacggtttggctatataagcgtctgctccttgtctcattccccagtagcgatcaaattcttctcctttggaagaacacatgactacggggacattttgggttttgggatcggattttaaccgccgacaaagttcgtagccattcatacggggcatgacaatatccaaaactactaaatcgggaggtgtgctttgaatggcttctaaagcttctactccgtctcccgcatgggtgacagttaagccactagctttgaggagatctgtgatcatctccctttgggcgatgctgtcttcgacaatcagaactgtactcataaatacctatctacctcctatgtcagactttcggttctggaatgttcaccaattctcttcccagctaataattgtataaattaagtctaatatttaactaatttacaaagtcattttactggagttagctgattctgtaataacattttttaccctatctttgagcaaatccacaagtcttgtcttggtttatattcccacactgggatctacgttgatatatttttctataagcataagtaattccgtatctgcaaatggttttgtcaaatagtctgtagctccaaccattctcgctctgacacgatcaataaatccttctttgccagtgagcatgataattggtacaaatcgaaatgctgtggaatgtcgcagcatggagcaaatttcgtatccatccaattccggcatagctatgtcgcataaaattaaattgggttggagttgaaaaacgaggctgagggcttctaaaggtttagtgatggaaatcgcttcatatccttgtggtttcaaaattgactctacagtttcacagatggcgatcgcatcttcaatacatactatccgtccttttcctttatggttgtctactttctcccaatttggtatttgatcaccaggcactgaagaaactgaatatactaattgtagccacccctgttgtacgtagggatatattgctttggcaatagttaaaatatcacgattcagataacgagccaattggcgtatggatgttttcccatccgcccaatgttgtaacttattcactgtagatactggtagtgaatctgtcaatttagctagatcagccagcatcggtaactgttccggcgattgaatatgtggatataactgtttccattcttgcacctccttggtaatttttgtgactaaaggcgtaatttctaaactggtgagttggggaacaagtgctgtccctaaatcgaaaatgaaactgccttggtgtaagctcaacagatcaaacagtgtctcatgtaccaagccataaataatattcctagctacttttgggctaatgatattctgctctaaaagcgcccagatgtaggcatactctggggaatttgttgattctaaggtggtaagttgcattttgttaagccgttgctcaactcggtaatgacgtaggtaatcatcaatccgggctaaactactttcaccagcttgacagtagacgatttgaccgtttagaaaaaatacaaaccaagatagtggtttactctctcttgcagaacggtgcttgagggtttcctccctactcagtttgtggctttggtaagtgtggtgtgcctccacccacaactgcccagttctttgtcctaaggaaatcagttgtagaatactacaaatatcaatttcgtttaaatttccctgcatttacttaaaacccccctccttagtattctagaaagattactttataagaaaatcgagtgcgccaaaaccacgcccgataaagtatctccaccaagttccgatactttatcgtacttcagtcggtggatgtaggcgaacggcttgcccctttagaggcagtcatgatatattgcttttcaacaggtatggtaatcaacctgtataaaaacctaactgcctaacggcaatctgtaccttgacaattgaagattggtgggttctattccatagttctagttactacccaggaataagtaaaatctactattcgggaagccgcttcgcgtctacatgggggctagactcgtgttgagcgcacttgtactgagccacttgtactgagcgcagtcgaagtaagtcgaagtagtcgaaacacgacacataatttaaactcaaacaaattgggaatcatccaactagggaagggcattccctaagtaacgcttgaggagagaaccacctcgcttgctagaaactgcaagggatctagtctaagtggactcgttgaatcaagaatctgcgctccttgagaacgcaaagtgtcaattattgtcaccttcagcttttaccagtttcaagtagaatggctagatgattgtctctcaccaatattctgaaaacctagatatgctcattttttgatcgagttttgacaaagttagtgttcacacggtagtcatagtcactattatgtatacaggatataaaatatgcgatccggtctggtgttgtaaatattaatggttcttcagtacctagtatgccaaactattaattaaacatcaaaaatgtgtttaaaaataaaggcaaaaagccatatcccatgaaaaatacctaaaatgcgatgcactgagcttgtcgaagtgttaataaataatgcccgtatttatatcataagggttttatggtttttgtgaacgcaatctagcataatatataatgaagaccccgaatttctcacaagaggaaaaaataattgatgaaaagctacaccaagtgaaatttatttgatacatgaagggcggcgatgagaaaaaataaatgtcacagtataaattcgataaaagctgtaataaattatatgtaacctagctgctagatacggatatcaagattcttttggtaaaactcagacatcaggaaacacagttgagagaaaactgaattctcaactcgaaataaaaactaaaaatgagctattgttactttcccaccttggaaatttactactactgggtgggtttattctctttcaaatttgaactgttttggtgtacaatctgttgttaattgggtcgtactttataactgttgaaatgctttatacatatagattttctcagtttttgaccctttttttcttgttctttgtgagaaatacgggggtggtatcggcaaactttcaactcagcttagtacccatgacaagggttaacttgcagaggagccgtgtgatgtgaaaacatcacgcacggttaaacaagacaaatgcaaaaaataatctaaggtatatactgaaacacagacgtaaagtacatcaaaaggactagcggtgtgctgtatttagcagaagtacaaaagcagaaaggcggtttactgagtggcggttctaaaactgaactcaaactgctcgcttgtcaacgtagtgaccagaattggagtaatgtctcagaagaaacaattgtggctgaggaagccagcaaattgaatgatggcgcacttgtattggtggaactgagtccgaatcgtcaattacagcggattcaggaagccggtcggccgctagtaaacattttgcaaagtttttcccgtcaagtggaaaaatttaagctcaaggaagatgaaattgactcgtggaagcagtcactaatgtttcaagtccaagagataaatcgccgtgaaattgacatggaagcgcggtgggaacaactgcaaaatctagaacaagaggtacaaagcttagaaaaaaacaagcaggaagttgaaaaatcccgtgagcaaattgacagattgcgggcagaagttgaacgcaatcgtcacgaactcgaaggtgcttgggagcatttacggggagaacaacgtcgtcttgatgaaattaaagcagattctcaccaggggactgttttcaatgaggatgaaagccgaagaattgctgatttactcaatcgcttatctaatggcgttggttctacgggaatattgcggaaaaatctgaatttggcttttgaacttgtagaaaagcaacaagccactctcaacccacattggcaacaactagagtccaagcgccatttggctcaacaacaacaaggggaagttgaacaactctgccaaactttgagcgatcgccaatcccaactccaacaaaagcaaaattatttgcaggaacaaacaactcagttacaactgacgaaaacacagctgaacagtaaacaagattttctggacttacttaaagcacaattgtcaaatcaagaatatttataccaacaaacccaggcttttttgacaatgactgggaatatggttttggacagtcaagttgatgtagacgctttgcagcatctccctctggaagaactgcaaaaaattgtacacgacttacaaaataaactagaaatagattctagtttcgttcaagaccaggaacaagaattaaattacaaggaacaagctatacaagaaatagagaaaaagatccggcatgcatctggagatgaactcagaaatttagcatcagaactcgctgaagaacaagacctctatcagatgctaaataaaagtttaaaaccacaacgccataatttacgaaaacaggagcaaatttttaaacagcatcaagctattttactgcaccgacaaggacagtctgttccccactccacaggtaataatgcaattaatttagagtcaattcttgcccaaattgacacccaacgacaacaacaatcccaagcactgcaaaagctagaaagtgagattcagcaactgattgctgatattgaaagcaagcaaggggaaatagaacatcaaacccatgagttagagtctcagcgtcaagaaattaaatcactggaagcacaattactgaacttgcaaactacaactgctgaatgttggggtaaggtcaatctttatcaagaagctttacaacctattcaggattgtttggatggtttacgggataagctacaagctgtttctgaatctgtaaatcatgttcaaaagagtggtgattctcaacttcagactattacccagatgcgtcagactattaaaagtttgattcctcaattggatttgttagcttcttagaaaggatgaggatgaaaatctcactcatccttgcttcttgattatacatatccactcaccttgtacttgagcgatcgctccaccgggaaaaggatcagtttgagaacggttgggtgctgtaattaaagctgtgattttttcaatgtgttcaaagttgggagcatcaggtaatatttcctgtaatacctgacgcatcactcgacgttgcaaagctaggggttgtttttttaaaagatgacgattgagttgtaaatcttctttctcaccctttactgaggcttctaaccgcaattgacgggctgtttgttctagatattctacctctgcttgcagtagttctgctgtttgtgctaggtgagattctacttgggggttgaaattttgcttgagatatggtaaaagttcgttacgtatgcgattacgagcatattgtaaattttgatttgtggaatcttcccaaattggtaaattaaaatcctgacaaaattgctcagtttgggtgcgagtaacttctaaaagtggacgtactagggtaatattgtcagtcattggacgttgccaagttaaagcttgtaaaccgtcagcaccagtaccgcgcataaggttgtagagtaaagtttccgcgcgatcgctggctgtatgtccagtaatgatatattgataattatatgtttgggcaatattcgttaaaacctgataacgccaatttctagctgtagcttcactattaacaggatttatagctgtttctaaataaaaaggtatattccaagtttgtgctaaattttggacatgatccgcattagctggagagtcagaacgccaacgatgatcacaatgggctatagctagattccatccccattgaggttgtaaatctaataataatttaattaagcataaagaatcttgaccaccggaaactgcgactaatagattttggtgacgctcaaataaatgacgagcgcggatagtacgatgtatgtgggcgtggagaggagtccataagctcatttttctgttgctgctagtgcatgattttagttgacaaggatagattgaaattcataagtttaatgatcacaaattataataaatatttaatcaaaggtaaaaagagaaacccaccaatcacacagacaacaactaagaaaaacactttccagcctagtgttaatatatttcccatagctagtaaagtcaagaaaactagattgagagcaaaacttaaaaaaacaattggtacaggaaataaagttggcttattatctgctgcaatttctttgatttcctgtaaaatttcctgagtatttcttggtctgtctcgtggttgatgctctattaaatcatcaattaaatctttaaattcttcagaaatttctggagattcatctcgccataataactttgaatttcttggatctagttgcaagtttccatttccaggataaattccagttagtaaatgaacaaaagtacgacccaaagaaaaaaaatcagattgataagttacccctatgccattttcttgttctggtgaacaataaccaggtgtgccaatttgtgtaccaggaatagtttgcttttgagttttttgagtagcttctttaacaatcccaaaatcaattaatactaattgaccatcaggttttaacataatgttatctggcttaatatcccgatgtaaatagttttgactatgaacatgatctaaaatatcaattagttgttttagccattcaatagctaatttggtgttagtaattttttgatttttttttagccattcacctaaatcctgtccagcgattttctccattactaacccatgtaaaatttcctgggtgtgaatacaacgaaatttgagataaccatccactttcaccttgggaattcctggatgatttaattttttcaatacatcatattcttgttcaaaaagttccacaactttcggattgctagaatttccgaaccttaaaaccttaatgactttatgatcacccattaagctatcttctacctcaaaggtcttaccaaaattcccatctcctaattcttgaagtacatgataacgattgctaataatatctcctgtttcgatcataattatctctcctttcggttaataaaatatgggttgattttaagattttagcattatatatgggagcatcccaaatgtgtaaatttgtgtaaatttattttgatctaacgaacttaaatgttccaagggactgatatgattgaaccgcaaagggcgcaaaggacacaaaggtaagagagtttaagagattttttagtgttgctgctgtcattttttcaaaattgggatgcttcctgatctagacactttaaatctgatacattatagttaatcggtacaaacatagccccataggtagaacattgagtaggtacaacacggactatttgagaaatattttctttcctatctccatcctgatcaaaagaaatattacccgaagcacctcctataacctgtagacttcttaaatgctgctgtatatctaatctttgtttttgcaaagaatcgttgatatttagtttttccagagcttttgtcaacaccaaagtagcatcatgagacatggcagtttgagcatctatcttacctgttccccaaaggttttgggctttggtaataacctcctgattaggagcagttaaaggatgccaaggaatgaatattaaaagatttttgacaagatttctgcgattaagtatttgaggatcatataaaacccacagtcctcccatcggtaattgattttcattaacatcaatgatacttaaagtatttttgaaagagagagaattaacatgaccatcgggaataagaataagtgctttagctcgttgttttttaacttcatttaatatcttattaggaataaagttaggttgagatatatctattgcaattatcttatttgcatccaattgcttccgaaattcttccaaagcagatttgctataagtgctacttggtgtgtagaaaatagctactttttcttccttagctaatttagctaattgccatttttcaatcagtagagtagtctgaactttaacgctattaacagtgcgaaagaaaaaattatttggatatgtattaccatttaaaatatctggtcgcaaagcagtagaagcaggagaaataaaaactatttgatgcttgtgataaactggtaaagcggctttagtgagttcagaggcataatgtccaataactgcaactatgtcttttttagagagtatatcttcagctaatttattcacagtgtttgggttatttttatcattaacaatgataatttttagacctggatatttaggatttttgttaaattcttcctgaacttgtgcagcacctcttaacagagcttttgctataccttcagagtttccattaataggaactaccacagcaatagtgtaacttttttcactagtgattttttcctgttgcatcaatttggcattattaaggtagatcaaaatttccgggttatttggatctgtatttctcttttgagtaaaataattaacagctttttgccagttacctgcatgaaaatatgaaaatttctcttgtgtaaataaactttcctcaccacaagataaattgtcagataatttaaagttgttacaccaagtattataaaaataataattatataacccaataaataaattatcttgaggatgaataatccaatatccccaaacagtaaaacttaatatcaagattaaaaatgttattttagccctgatggtgtattgacggaagtttttgcggatttttttcatgtaatcaacctttacaatcagttataacgtcttttaatatattttttaattaaaggattcagaacccaaagaattttacctcctgctaatatatcagctttttcaagcaaacgcacttgccataaattatctatcgcttgactaatttctcctttaaaggggaaaatttgagatatttgagcaattaatagtggctctgtcgctatcgctaattgttgcataatttgaatttctaagtttgttaaattaaaaaaaagtttatcaagtaatcccatgatcacatcaggtatataaattgttccttccaaaaattcataaatttgtccatcgtgaatgtttttaattggttcagaagccagaattaaagctaatggatgtcctttgtatgtgtcaattagttgttctattcctgaattgacaattcccaaatctgtcaataggtttttagcatcttgaatttgtaaaccgcataatgaaagttccttaatttgttgcttatttacaaataaattcattactcttggtctttgtatactggtaaaaaccaagcagctattatgtgctaaatctccaatttttcttagtaataaatcataattgtccagtaattcactagttcccatcactccttcccattgatcaaatattaataaacaatgatgctgatttaataaattaatcagatttgtaattcttctatttatatttgtttctggattatttgatgcaaaatagcactctatatcagttaaaatttctgctaaggaaggggaatattcaagactcttccaaatcacataatcaaaatcatttttaaccttttcaactaactccctcactagcgcagatttaccaataccatttatccccaaaacacctaccacacgacagttttcggtaactatccatttttgtaaatcagacagttcttgttgtcgtccataaaaatcacttacatctggtgcttccagcaaatttatatgtgaatttatctgtgaatttatctgtgaatttatctgtgaatttatctgtgcttagtgttctcttctgtgacaagttctttctttttttttaaaagttcatctagcactaaccgacaattttttttatttatatctgttcctatggtatcacccagtttcttgaataattggggacctttaataatcatgatggtactgggagcataattgggaattttcatctttttgtatggttcaccgtgcagagaatattccagaattgcttcttcacaaggatctaaatctaaatcttgttctttttcccgctttacccaatctttaaatagtttgattaactctttcccatccatagtccagttttctttcaagctcgtattgtggattgtatcttaatttgcactaactttattaaatttattaactttattagttttattagttttatgagcttaaatactgataattagttagtgatgacaattacatatagtgatgagatacttttttgtgtaaggacaaaaaaagaggttgttgtggttgctcaatactcattcaggaactaaagctagttagaacaaagagaagttttactggtatcgttgaaactatagtagatcagcaatattgggtaaatttctatacaatcttcagcacaagataatttcgttttttagtttgaaatcaaagtttacctacacatgaaaaaaaactggtgttatttgctatctttaatatcagctactttactgactacctctgttcaagctgaggaagtttctaggaaagccgctgatctcatggcacaaagtcctttattacctactaacaagcagtctaattcatctaatttagtagctcagaatagggatgctgatttgtttgattctagtcaacctggaagtaactattggtatctaagtggaagtgttggtggtgctttcccaaatgatctaaaagcagaaaactccgatcgtggattaagcggtagcttaaacttagattctgcatttcaatatagcatagctgctggttatcagtggaaagatgctcgcgctgaactagaagttagtaatgcttcttttggtgttaataaaggtaatttgaatagtgactcttttccagctacaggtaatgtgagtgcaactactgtactggtgaacggctactatgatatcccgactggctctaaatttcgtccctacattggtgctggtataggtgttggtttaattagcggtaagcttgaagatatagaccttggtattggctcatcttttgcttatcaaggtaaagtaggtcttcaatatgaagtcgccaaaaaaggtaatgcttttgttgaatttaaatatttgggcataagctcctacaaaaatgatgctggtagcgatatcagcccacctaattcctatggtgtgagcgttggttatcgacaaggtttttaatctttaattgcatattgtagggtgcgtctgatgcactctacaaacttgattctattcattcagtatatttcaatttttctcttaaatcatctaacggtgaagtttcttgatttaattttgaattattattcacaactatttctttgactgtcggttcatcaggttcaaattctatgcaaaccctgattttaccctttttccaaccatcaccaggtctgagtacctttgcttccataccttctgtaaacagttttgcgtcgtgatcatcagaacctatatattctttaattacttctattaattcactagctgtcatagttttagatacatctaatctgtcaaaattttctggattcacagaaattacatcattttgatttagcattgcaaattgatgactcacagatattaccttgaaattcatcaaaccaagtatattcaagaatattatacgttataacttctcctgaatttttctttgtatctttgcgcctctgcgcctctgcgtgagatcaaaaaatattccccctctcaacagaaaggaggaattaatgatcaacacatcaaaagctgaaagctgaaagctgactgctgaaactagaaaaaccaaccgtaggaatgtaaacctttacccaaaagattcacacctaaataacaaatccaaactacaacaaaaccaccagcagctaaaattgccggttttctaccttgccaaccgcgagtaattctcgcatgaagataagcagcaaaaactaaccaagtaattaaagcccaagtttcctttgggtcccaactccaataagaaccccaagcttcattagcccaaacaccaccggctataataccaattgtgagtaggggaaaacccaaaccaataacgcgataactaatattatctagggtttctgctagggtaagacgttgaggagaaagaatttccgcagtagcaacagaggtaatttttaccgcatctaaaacagcagtaccattaccattgttattactttccaaccgggaaaaaccattattttccgatgcagaagtgagggtttctgtgactaattcttcagccttgataagtttgtaaccattggtgcgataaccaccattaccaaaagaacttccttgtaattgaatgttttggccgcgagtgacaattaagaaagcgatcgccaacaaagaacccaccatcaaagccgaataactcaacatcatcacactgacgtgcatcatcaaccaattcgactttaaagccggtactaaaggttcagaaacctgcatttctgaaggtaaggttaaagtagcaaaagctgtaattcccatcgctacaggagcagttacaacccccactaacttgctacgactcgtattttcagcaatgagatggacagcagtaattccccaagtgaggaaaaatagagactcataaagattgctaagagggaaataaccagcttcaatccatcttgcccctaaaagagtagcaatacacaaattagcgatcgccattccagctgtccccaaagccgcagtcaccgataaactcggaaaagccgcccccacccaatacaccagcatagtgcagaacaaaacagcaaaggaggcattatccagccagttctggagtacaaccagattcataaacaattctctccagtaaatcagtgatcagttatcagttatcagttatttaacccaagttgctagttaagaataggagtcgtaggggcgaagcattcggccgaccaatgatcgatcaatttttgtcacagcctattttcctgtaagggcgaagcattcggccgaccaatgatcaattttatgaaaaggctattttccgaatgcttcgcccctacttcgcccctactttgcccctactttgcccgtacaggagtcaggataaagaatcaattatgatagtattccctggttttttcctgtctatttctccttttcacttccatttgagagcctttcttgcataactagcaacttacgttagttatcagttccagttagagaattaatttaactcaaactctgatactttgtactgaaagcattccaactatcctgatttgatcctatctagttttggtgatagttgatagttgatagttgatagttgacagttgatagttgacagttgattgggaaatataaaattgattacccagtccccagtccccagtccccagtcc

SEQ ID NO: 28 - DNA, 57932 bp, Sphaerospermopsis sp. LEGE 00249
  LEGE00249_43
ttagtcattaggcagtagtcaccagtccccagtccccagtcaccagtccccagtccccagtcaccagtccccagtccccataattcgcagtgaaacggtacagttaaacaaggtcaaatagatagagacacacgggcaaaatgacaaacattgaacttaaaccttgtttcctgactcccaaaagagtacaactagagtatcccctgtttgtctatttaccaggaatggatggaactggtcaaatgttgcgatcgcaaactgctggcttagaattgggttttgatgtccgttgtttagcgatccccagacaagacctcaccacctgggaggtgttaaccaataatgttttagacttaattcacgcagaattagaaagaagttgtcaccgtcctgtttacctgtgtggtgagtcttttgggggttgtttagctatgaaagtcgctacccaatcaccacaattattcaaacgtattattttaattaatcctgcttcagcctttcaattacgtccttggctcaattctttatctcaactgactgactttgtgccatcttggttttatgatattggtgcattaggattactaccatttttagcatctttatcacggatgtctagtagtattcgccatgaactgctgagaaccatgcgttctttacccgcagaaacggtaaattggcggttgtcattgttgcgggagtttcaagttgaagaggaaagattgcaaaaattaaagcaagaggtattattaatagctggagggagcgatcgcttgttaccttctgtcagtgaagtggaacggttagatcagattttacctaatcctaagaaactaatcttacctgatagtggtcatgcttgtttattagaggaagatgtaaatctgtatgagattcttaaaaataatgaatttctagaaactgtaaaatacagtcatgctactaagtaggtaaacagaaaaaatcgaaatatgtaactaaaagtaaaatctacgtaaaattaaaccttcagcagcgtagcttatacatgatacgcagtaatcactattttcttgtcaggactataaatagattctacccttggatattgatcatgaatccaccaaactttaattctattaccttgggctggcgcagtacctgatattgagtaaccagcatcaatcattaatttctcaaattgagttgcgcttaatgtttgacatttgaactgtggtagtccctggattttatgcttgtttagggtcatgggtagcctggtaaattatgaatattttgtatcttactaccctatttttttcataacttgtaaaccaataactcatattggatttaatccaattcaatcttttacgttactaacctatccttttctcaacctcatcttccaatgaatcataagtaccctgataagttgtaaaaatcttgtaacctggtaatactaaagctatgccggcataactgtgaatcttacctggatatctgtagggttgatcatcaggaacagcgccaccaaggcgaatatttattcccggtagccataagtataagccaggaattaataaatccatgctgtaagcaatttctcttatagcttgattttcatcaagagagttattagcaataaagctcaacctggtgtttatgatatttaacatagtttttttcatccccaagcggggaactttgacaagatggcttagtttcaatccctaatagggattatcttaacaggagttcccacacgctggaaattttgagcaatactggtacaagtaaggaaggtttacagaacattacaaaaatgatgattcaacctacaaatacagctttattagattggactggtgataccttagcagttggcttatttgaagacgcagtagagttaacaggcgatttagcgactctagacgagaaatgcgccggaattgtcaaagaaatcattgccgaagaagaatttacaggtaaacctcatagcactgtcgttattcgcttaggtgctagtcatcccgtgcggaaggtgattttggtaggtttgggaaaaccggatgctttgaaattagaaactttacgtcgtgttgctgctgctgtcgctcgcactgccaaaaagcaaaaaaccaaaactctggcagttagtttaccagtttacaacaacgatccagcagccacagcccaagcgatcgcagaaggcgcacaactggcactttatcaagatactcgctttaaatctgaaccagaagataaaaatcccaacattgaaactattgatttattgggtttagctggacaagaagcggctattacccgtgcagaacaaattgtttctggggtaattttagcaaggcagttagtagccgccccagctaacgctgttactcccattacaatggcagaaaccgcccaagcaatagctcaggaacacggtttagaattacaaattttggaaaaagaagattgtgaaaaattaggtatgggggcatatttaggagtagcccaagcttctgaattaccacctaaatttattcacctcacttacaaaccagctactacacccagacgcaaattagcgattattggtaaaggtttaactttcgactccggtggtttaaacattaaaggcgctggtagcggcattgaaaccatgaaaattgacatgggtggcgctgcggcaactttaggcgctgctaaagtgatcgggcagctaaagccagatgtggaagttcactttatctcagccgtcaccgaaaacatgattagcggtaaggcaatgcacccaggagatatcttaaccgcatcaaatggcaaaacaatcgaagtcaacaataccgacgctgaagggcgtttaaccttggctgatgctttggtttatgcggataaattgggtttagatgcgatcgttgatttggcgaccctcacaggtgcttgtgtagtggctttaggtgatgatatcgctggtttatttacacctgatgatacagtagcttcccaactacaaaccgcttcagaagcagcaggtgagaaaatttggcggatgccgatggaagaaaagtattttgaagggttaaaatcgggtattgcagacatgaaaaataccggacctcgctacggtggttctattactgcggctttgtttttaaagcagtttgttaaggatactccttgggcgcacctggatattgccggtcctgtttgggctgataaggaaaatggctataacggtgctggtgctaccggtttcggggtgagaactttggttagttgggttttgagttagttttttcggtttgatacagcaggagtcaggagtcgtaggggcgaagcattcggaaaacaaccttggatcaaaattgataatttatcgcccgaatgcttcgcccgtacaggagtcaggagtcaggagtaaaactctctttctgtctaggtttcaagtaagaatctgtaccagattgatctgtaatctgctgtaaattattaaaggttctgctttgggtgtgatccaaggtagagcctttttatatgctcagaatattaaacgcagataaacgcaaatgatcaatgaacgcagatgagaaataagagatttttaataccttgaaattaaaatttatttaggggttgctgttcgcatagcgtgccgttaggcataaaagtcttgtcgtgatgacaggtaacaggtgacaggtgactggggaaaaatatttacctcctgccttctgccttctgcctcctgctatagtttttcatgtcttttttgggaatttttaattgttgagtgttgcgatctgataaaatttgtaaggtttctttgagctaggagcaatgggatcgactggtgtaagcatcgcaattgacgctatgggaggggattacgcacccgctgaaatcgtcgctggcgcattacgagcgaaagaagaattgggtgtgaaaatcttgttggttggtgatcagcaacaaattgaagctgtcataccgccaaaaaccaatatggtaggattagagattgttccggcacaggaagcgatcgcaatggatgatgagcctttgaacgcagttagaaaaaagcgtaaggcttccatcaacgtagcaatggacttggttaaaaacaaacaagcagatgcagtattttctgctggtcactctggggcagcaatggcctcagctttactacgtttaggcagattaccaggaattgatcgtccagccataggcacagtatttcccaccattaaagcaggtaagccagtattaatactggatgttggtgcaaatgtagactgtcgccctaaatttttagagcagtttgcagtcatgggttcaatttatagtcagtatgttttgggaatgcctgaacccaaaataggattattaaatatcggtgaagaagacaccaaaggtaacgaagcagcccttcgcgcccatcaattattacgggaaaatacccaaataaattttagtggtaatgcggaaggacgtgatgtattatcaggtgaatttgatgttattgtctgtgatggctttgtcggtaatgtgttattaaaatttgctgaagcagtagggggtgtaattttacaaattctgcgggaagaactaccccaggggattcgaggccaaattggcacagcaattttaaaacccaacctcaaacgcgttaaacagcgcatggatcacgcagaacatggtggtgcattactattaggcgtaaatggaatttgtttcatcggtcatggtagttctgaagcaccttctatttttagtgctattcgcatggctaaagaagctgtagacaatcaggtattgcaaagactacagtcacaatatcaaattctacagagcgagagtgattagccttctgtgagcgagaatccatagtcatttgtcattagtcaatcatgaatggggtttgctgactgttgactgctgacttctgactgcttcttgacaactgacaattgacaattgacaactggggagatttaggagtgcagaatttattcctacatggtatagcaattacaggtagtggctcggcagtaccagcaactaggttagacaaccagttactaactcaactggtggaaacttctgatgagtggattaccacaagaacaggaattagtcaacggcagttagcattaccgccagaatcattgactacactagctaccgatgccagtaaacaggcgatcacatccgcgggaattaaaccagaagatattgatttaattttgctggcaacttctaccccagatgatttgtttggcaatgcttgtcgcattcaagctgaattaggagcaattaaagcagtagcctttgatttaaccgcagcctgttcggggtttgtgtttggactggtgacagcagcccaatatattagaacaggagtttatcaaaatgtactgttgataggcggagatatcctctctcgttgggtagattggcaagatcggcgcacttgtgtgctgtttggcgacggtgctggggcggtggtattgcaagcaaataagagcgatcgcctattaggattttccctgaaaagcgatggtagtcaaaatcactatctcaacctgggttatcaaggcactacaaaacaggttagtccagatattcatgtacctacaggcacttatcaccccatcaccatgaacggtaaagaagtatatcgttttgctgttcagaaagttccagaagtcatagataaagctttatttgaagctcatctcagcgtagatcaaatagattggctgattttacatcaagcaaatcagcggattattaactctgtagctgatcggttaaatattcctgaacataaagtaatcagtaacgttgcccattatggtaacacctctgctgcttctattcccctcgcattagatgaagcagtaagggaaggaaaaattaaaccaaatgatatcattgctacctctggttttggtgctggtttaacctggggtgcagctatttttcaatggggaaggtaggtgacaggtgactggtgacagcgaaaaggcaggggaagcaggggaagcaggggaagcagggggagaatattaacttttgcctcttgcctcttgccttctttcttttccctgttcccttttccctgttcccttctttcccaattcccaattcccaattaccaattcccaattcccaattcccaattcccaattcccaattatcaattcccaattatcaattatcaaatgacaaaaactgcttatgtatttcccggacaaggttcgcaagccttaaacatgggaatggatctactagatataccatctgccaaagcaaaatttgaggaagctgaagcaattttaggttggtctgtgagtgaaatttgtgcagacgaagaaaaactatcacgcacactttacacccaaccttgtttatatgtgatcgaaagtattctggcggacttattacgagaaaaaggagaaaaaccagatttagttgccggtcacagtttaggagaatatatagctctttatgttgctggtgtttttgactggtcaactggtttacaattagttaaacgtcgtgcagaaattatggataatactgctgggggaatgatggcagcattacttaattttgatcgcgaacaattagaaaaagtaattgcagaaaccccggatgtagtgttagcaaatgataatagtcccgcacaagtcgtaatttcaggaactcccgaagctgtacaaattgtaatgtctaatgtcaaagcaaaacgggcattacctttaaaagtttccggtgcatttcattcccatttaatggcagcagcatcacaggaatttcaagaaatattagatagtatagtttttcaaacagcagaagttcccgttgcttctaatgttgatccagttcctacaactgatgcagaaattttaaaacaacgtttaactcaacaaatgactggttcagtacggtggcgagaaattgcattacaattaccaaaaaatgggattaccaaagtagtagaaattggaccaggtaatgttttaactggtttgattaagcggactgttgaaggtatggaattgaagaatattcgtaatactggggagttgccaagttaggggaaattaattcacaattaaattaggttgagcagatacaacctttaggagttgatggatatgaaaactgtatataatggacaatcaggtatcattcgcacagaacggggactaattatagccggaactcggattactttgtgtgatgtgatggactatgtaaaagctcagtatccacctaagttaattcgtgaaaaactgggactaagtgatgcacaggtgaatgtggctttagactacatagaaaatcatgctgtggaaatagaagctgaatatcaagagtttctgcaaaaatcagcagaaattcgccaatattggcaagaaaaaaaccgtgaacgatttgccaaaatagcaactcaacctgctaaagttggccaggaagatttacgcgcaaaactgcaatcttggcaagaacgcatcacatccccattatgaattttctcattgattataacttaacaggggactcggttttattttggggaacacttgcggctgaaggttggattgatctgttatcaattcgtttttttacctttaaacaagctggattagagacagatagcagtgacaaaattgtatggcaatttgctcaagcaaaccaaatgattctgatcacagctaatagaaatatgaaaggaactgattcattagagcaaacaattcgagaggagaatacagatacttcactaccaattattactattggaaatcctgatcgatttgatgagcgcatttatcgagaaaaatgtgctgctcgcctagtggagattatattagatattgaaaattatatgggagcaggtagaatttttattccttgaagctttttattgtaggggttgctgagaaagtctttccgtgagggcataggagtcaggagtcaggaggagatttgaaaatttctttgccatctcttgaaatcccaaaaaatgcacactttttccggtatacccttcacaacccttgcactaatttctgtgtttatcagcccctaacctttgatatatcaaggttttaggtttattaagcaaaccctgtagatattataagagtaccgctgctattcttagctgaagaaatagtaatgaatagtgggatttaaacataaattattagtattttttgcctaaatcccactatatatcaaatgccaaaaagtagctaatgaactagacatgaactagacagacaagaacagaaacttattcaaaaattatctaacttgaccaaattcgtgttccacgtctgccatgttttcatattcacgctctggcatttgtcggagaacgtcaattacttcctgacttgcatttttctgtctggcatggttaaccaaatcttctttatttgcaggaaaatctatgccactaagacttctggaaatatcaattgctgatactgccataacctaacctctatataataattggtcgtttaatatctaggctattagtgttctctctatatattctctacctgcggttgcatcttattttgatgtttatgttgaatattgagcatatctttgaggatagggaataggtaatagggaatagggaagataagctgttgtgcagctagattgtataatagagaattaggtaactaagctatcgcttctgaattatgccagccaaaaaccatctatctcaagaacagagagaaaatctcttaaaacacttaaaagagcaagataatccttatgtaagagagaaaatactgatattattgttgatgaatgatgggaaaacttaccaagaaataagtgattttttaaacatagcatatacaacagtagcatattgggcagtgcatggagatccggataacatagacagttttttagatggaagaagagaaggtaacttccgtaaagtaacaaaagaatatgagaatttgttgttagaagtaattgaaaagaaccctgatgaatgtggatatgaatttggcagatggacatcagcaagattagcaacatatctagaaatagagacaggaataaagttaagtagttcacaagtaaggagaattttagagagaaaaaagtacgtttacctttgggcaaagtatagcctagaggataaacaaagtccagagaagcgtaagttatttaaagaaaaattagctgaatatttaaaaataacgaaatcatccccagagcgtttacaggtatggttttgggacgagagtggatttagtttaagagtgataagaagaaaaacatggggaaagaaaggcaagagaaaagaggtaacaggacaaagaagaaggggaagagtgaatattatgggaggattgcgttatcatgacaagaaaagaataaattttgtgattaaacagggaaatgcagatgtgttttatgaacagttgaaatccctcaaccatttttgaaaacaggaatggatagaagcaggaaataagcctgaagactttaataataattcagctaaaatagtgattattcttgataatgctagttaccataaaagaaaagatattttggctcgtattgaagcagaaatgccaaatattattctggaattcttaccaccttatagtccagattataatttaattgaactggtatggcattcagcgaaagaatatatagctcacagattatttgaatcagtagaacagttagaagaattattaaataaattgctaaatgaaggaggtcttattattaaatgggaacgcaaagtcaaaaataaaggtaatgctgtttattcggtttagctgcacaacagcttaaaacaattaaaagtaattagccggatataaaatgcacccttgaaaacgctttcatctgtaaatatgctaaatctacctttgttcattgacgaaaagcgatcgccatagcttattctaaataatagtcttatttaaaatatcttccgtgaccagagaacgcgaaccttttattagtttggcactttaccacgctttcaagtggtcagtggttagccccatgctacacgcttacttcgggggtaaaatttatggggtggaaaatgttcccaaaactggaccattggtggtagttagcaaccatgcaagttattttgatcctccaatagtttctaactgtgtatgtcggccagttgcatacatggccaaggaagaattatttaaagttcctgttttagcccaagctattaaattatacggtgcttatcccgtcagtaggggtactgctgatcgtgcggctattcgtgcggctttagaatatttagagaatggttgggctgtaggtgtgtttttagaaggaactcgcaccccagatggtcgtattcatgaccccaaaagaggtgcagcactgttagctgcaaaagccaaagcgcctttattaccggtgagtttgtgggggagtgaaaacgttgtccaaaaaggtacacctattcctcgtaaagttccgatgactattagaattggtaaattgattgatgcgccaacttctacaaataaggaagaattagaagctataactcgtaaatgtgcagatgtaattaatgaaatgcacgatttaggaagataggtgataggtgataggtgattggtgattggtgattgggtgaaatttaactaatgactaatgactagtgactaatgactaatgaattgcaaattatgtacaattgagatcctaacaaaactgtgaaaaattatgtcagatttaagagaacaattaaaagaaaatctggatgaagcggagtgggattggctaattccccatgctcaaagagatgtgattattgtagtagctgatgggttagatttgctggatgtgggagaagcgatcgcaactgataatattccctctgtgcaaaattggattgatgaacaattgctggccaaaccttcaccagaacaattaggaaattggaatggcgatcggactaagaggtttaacgctttaattgttgaaccttacgttttagtgcaagaaaaagctgttgtttaacaactcataattcataattcataattcattattgataattgaaaaaattatgaattatgaattgcaaattattaattactttctttttcttggtgattcaagcttggtagtttcacagagttgttactacttactatttggctaacttgcccaattaaatcacctaatttaccttcatctaacaaggtatttattaaggaaagtccgctagtagataatagtaacttgttaatatcttgactgccattactaccatttgcaccagggaaggaataaatgcgagtgtctcctaaaactcctggttgtggtgctaaagcagtaacaatttctggtagtttatccgctaattctggccagatagttgtgagaattttcgcacttaaattagcattgctaatggtattttctgctgtaattttggcttgaataccttcagcttcagctaaagctttatcacggttagcatctgcaagagtacgaatggcttctgcttctaattctgctgcttcttgggcaatttccgcttgacgacgacgacggaaagcatcaatttctacaacgttgcgatcgctaatactcctttcttgtgcttccctttctgcgatgattatagataaacgtttttggcgttccgctttttcaatttcactggcagtttttaccgcttcttctgctttcgcttgttctgcttgtgcaacaaaactttcacgttttttattagcaattgctattgcgacatcttcctgcgctagttttgctaatctttctgattcaactatctttacttgcgcttgcaactttcctgattctacactttgttggcgagaaatatcagcaatttccgcttcttgtttttgcaatgcttgtgctacttttagttgtttattccgttcttctaaagcaatatcagcttcaatttgactttcttgtaaagctaattttttacgaatttcttcctcttccactgatttttcctgcaaaattttggtacgtcttaccattgcagcttctctatcttttgcttcttgaatttccctttctctctgtgctttcagtgcttcaacttgcaatttttgagctagtttagcactttcttgctcttgggcaatttgtagtgatcgcttttgtgcatctagttctttttgttcaatagcgacttgggttgctaactcaacttcccgtttttgttgaattgaacgttgaataatttccgtccgcaaccgcacaccttgagcatcaaagaagttatcaggatcataagtaacactttctaatatttccgaaatggcaatgttatttaaagttaatcccacctttttcaaatctgtacctactaaattcaaaacttcctgagcaaaacccaatttatcagaatcaatttctgctaaatctttagttttagctgccgccctaatagcatcatcagcccttttttctaaagcttctttgatgtcttcaggagtaattctactgccattttgagatagtcttgctgctgccgttaaaacatcttcttcggaagcattaatacatacataaaatgtgactctaatatctgctctcaggtaatcttttgttcttactgccagttttccagttctttctacatcaatagacatttctcgcaaaggtacacgggttaattgatgaaatcctggtaaaacaatgcaaccaccataaagaattactgatttctttttagtaaataatccccccgttctcacaaaagcttcgttgttgggtgtgacaacataaaccctggtataagcaaacaagcttaataaaagtaatataactaaagttacaatcaaaccaggaaatactattcccccattaatttgagctaaagttggctgagttgtcagcggaaatgtgggagaatttgatattctatattcctgttttgattgcagttgaaatgttaataactccgatacattaacacttggtagagcctgaataaatgttaaccaaaaaagcattttcttgtcctttcactaattctgatttttagagtcggaactatttaaccaattttcttcgtctacactgtctttggcaattactaaatagatttgctgtttaagttcaattactatcactttttcccctctttgtggtgcgatagttgcccaatctgggatcacagcattaatagttaaaaagttaccttttggatcgaaaatatctacctggccaattttgttgatgttttcagcaggaatataaacagaagttacagtaccaatacaaccaactaggcgatcgccacttgcatcttcactaaattccgcaaacattttactaatgggttcagctatcaatctgccaatgaataaactaataattagggaaattaacaagataattatccccattaaaggcagttgttgattttgattaatacctcccagccacacatttaacatccaaccaatgacaccccacagactcaaatctgttgccaacatcaatattaatggaactttaccaataccagcccattccagaaatcgtccaaagcttaaatcaatgttggtttctatatctatatctaaatctgcatcagcatctaattccgattctcctcctagcataatcataaacaggaaaagcagtattcctgtaatcaggaaaatccaataaggtaagtttgctggactaaacagcatatttgctcctgcaaaatattcagcaggttttttatattttcgtttgaatccatcttattctcttcttctattcaatgtcaagattaaaatttattttttgattatttattgagatatttaacaaaatagatgatttattattaataatattaacaaattagacatttattattaataatattaacaaattagatatttttagtgtgaataccttgataacttagggtggcggcaatgaatgaatcacttaaaattattttttatagcaatttaggcaaatcctgatacagatttttcccagtgatcaaacccaatcaaacctagattcaaattcagctaacaattgtttagcttgtgggttacatcatataatgtaatgtaactattcaactaagcatgagtaaagcagctaacaagtattaaaacctggatgtatattggtgggagtaggtggtggtggagaaaatttcatcctgaaagacttagctttcttgttaccagaattgttaccatagtttcagattagatattgaagccttgattcagtctgaaaccttagaactactagaatggcatcgcctctgccagcacctttccacctttgcggcaactaagttaggggcgatagttgcccgtgccttgccaattccatcaactctggaggaaagtaaagagttgttggcacaaaccaaagaagtctatcaattggaaagccgactgacaccagggttatcctttgagggcattcaagatattggtgactccttagaacgtgcggaattacaaggaattttatcaggtgaggaactgttagcgatcgctaccacccttgctggtgcgagaaatttacggcggttaattgataaccaggaagatgtacccattttaactgagttagtcgccgaattacggacttacccagaattagagcaagaaattcaccgttgtattgatgaacgagcgcaagtgacagatcgcgctagtcagaaattaggagaaattcgggaagatttacgcaggttacgcagtcaaattacccaaaaactgcaaaatatcatccaagttaaatctaatgccctgcaagagttgattattactcaaagaggcgatcgctatgttctccctgtaaaagctccacaaaaagacgcaattcctggtattgttcacgacacatctaccagcggagcaactttatatattgagcctaacagcattgtgcaaatgggcaaccaattacgccaagctgtgaaaagagaacaggtagaagaagaagccatacgcaggaatttaactacacaagtagcagaagttaaaaccgacttagaaaagttattagccattgttacaactctggatttagctacagccaaagccaggtatagtttctggttaggtgcaaatccgccccgctttattaatccccaagagcaagaaataattactctgcgacaattacggcatcctttgttaatttggcaacaacaacatgaacaaggacatcctgtaattcccgttgatttgttgattagtcctcatattaaagtagtcacaattactggaccaaatacgggtggtaaaacagtaactttaaaaacgttggggttagcggctttaatggccaaggtgggtttatttgttcccgctcgtgaaccagtagaaattccttggtttagtcagattttagccgatattggggatgaacaatcattacaacaaagcttatcgacattttccgggcatattcgccgcattagtcgaattttgaatgccttggggattcaagaggcaggggagcagggtgcagggtgcagaggagaagacttttccccaatcaccaatcaccaatcaccagtcaccagtcaccaatccctagttttactggatgaagtgggcgcaggtacagatccggtggaaggtagtgcattagcgatcgctctcctcaaatatctggcggatcatgctcagttaaccattgctactactcactttggagaattaaaagctttaaaatatgacgatgttcggtttgaaaacgcatcagtcgaatttaacgaagccaccctttcacctacctatcggttattgtggggtattcctggacgttccaacgccttaaccattgccttacgcttaggcttaaaaccagaagtcatagaagctgcaaaaagtcaagtgggagaaacaacggacgaagttaaccaagtaatagccgggttagaagctcaaaggcgcagtcaagaaaccaaagcagcagaagcacaaaaaatattaaagcaagcggagaaattatacaaagaagtttcccaaagagccgcagctttacaggaaagagaaaaagacttgcgagcctcccaagaaatagccgtacaaaaagcaattcaagaagcgaaaggagaaattgcccaagttattcgtcggttacaacagggtaaaccaacggctcaggatgcacaaaaagcaacaaaagcgttaagtgatatttcagaaaaatatcaaccagcaccagcacccaaacccaaacccggttttatgcccaaaataggcgatcgcattcgtatacccaaactagggcaaaccgccgaagtcataaccgccccggatgcagatggggagttaagtgtgcgctttgggatcatgaaaatgacagtgaaattacaagacgtagaatctttagatggtcaaaaaccagaacccatagtcaaacccaaaccagcaccaaccgttaccccgtcaccaacaccaaccgtagccattcgcacatcaaaaaatactgttgatttgcgcggaaaacgggtagcagatgccgaatatatattagataaagcaatttctgaagctgttggacaaatatggattattcacggacacggaactggtaaattaaagcaaggagttcacgcattcttgcagcaacaccccagagtcagccattatgaaccagcagaacaagcagatggtggtactggtgtcactattgctcatgtagattagggcattgggcattgggaaaaactattacccaattaccaattaccaattaccaatcaccaatcttaaccaaagcatcatgaatttctcatatttaaacaagaaattttcatctaaagtaaaaccaaaacaacagctgtttactaaacttatttacagctagatgacgagaaaccaattttcatacttgatggtctgtttcaaaaagggtaacagcaacagcctttattcgcctgatcaactatgctaaaagttatgcaatcggccgccaattcagctacatctaattcccagtgggaggatttaagccagtttccgacctccaataccgttcaatgggaaaatattaaaacccagttagatttggtgttattagcactagaaactttaactggcattggttctgatgctatgctatctgcggcgattaatctccagttagagtcaaaagtaccagatagggtggccttgtggcgactgcgccaatctaaccccatacgcaaaggtcaaggaggacggaaaaaactagatgtagatgaagcgcgatcgctggttctgattacctgctatcttgccaaacaacaccaagaattaatccggcgtgctgttgggttattagaaacaatagctgccaaaaatcaagaacctcatcaaaatgctttacttggagattatatagatgctttctgtaacacctaccaagaacggatggaagaagatgaacaaatctccacagatttgctaaccaacttagcaataaaactgctggtagatttactattttatagcgcccctactggacaccgccgcctgtggttaacattgttggatcgatccacaaaacaattttagattttagattttagattttagattttaaatcactgatccaaaatcgaaaattctcttttgtcccccttgccattcttgctatgcctggatcaaattctgtcattcgtcgctacactccccccacttgtacactggaaatcttggcgcaaagctcacctttatctcgttggatagggcaaacagtcctgaatcaacttcgttttcaactgcactttgatgatccaacactaccagaagaactgagagtacctattcagggcgatcgcgatcaactagaagccttgtgtaatgctgttactaactacgttcaggcacttctacaaaaatcagcagataacttttgtctcacttccttagaatcccaaccatcaagcaaaacatctgatcaaccagaagtacaagatgttaccccatcatcatcatcgtcacctaaaaccccaaatccctctagtatgggaattttagaggcaacaatttatttagaatctagtgacaatttaactcataaactatatctcggttcccttgctaatcaaacgtcaggaccgataattcaacttactctattacaactatttgatctggccacggccttagaagaatattccactgatgtcataatattaccaaatctcaacagtgagaaatcaataattcccagtttgcctacttggacacctatagccgcagtaatagcactagctttgggtttagctcccttaacctggcaatatgccagcagcatgaggcaaaatcagcagacagctaaaaagactacttctgacacacaaccagcaactactgcaactgcaccatctcctaacttaaccacttctcaaggagaattgactccctttactggtttaccatctccccctagtagtggtgatactataaagccgcctgatttagagactcccgtgatacccgctgattctactctagatccaaaacctctgactcttcctgatgctaccgtgccacccacagctagaacattgccaaataatggactgacaatacctccacagacacagccagtccctcctagcagtctacaaattccaggaacagcaccaatacccagttcccaacaaaactctacaggagtgattaaccaaggtggtattcctcctgtcactggtcaaaatttgccttctggaaatacaagtagtatctcttctatatctggatctattgctaccttacctaatgatgtgcagagtcagatttctggacaacaatcctctacaccaaattcacagcaattagatcaagctgcttctgcaaccaaatctcccgataatgatttaatagaaaaattgcgatcagcaagacaaagaccattcccaacacaggttgctgctgaggaaaacaaattatttgatgtacctcaagcagcagaagctagagcttatttacaaaagaattggcggccacctacgggattttcccagacactagaatatagtctgattttgggtgttgacggtactattgaacgcattttacccttgaaccgagccgctagagaatatattaatgacactggtataccagaaattggtaaaccctttgtttctactaatcaagctggacaaaacctcagactcagagttgtctttagtcccgatggtaaggtgcagacgttcccagaaaacccttgattatgtgtaagaattcaggagtcaggagtcaggagtcaggaggaggttggaaaatttcgattcttcggtacttgttatgctaaattactaattggttaagagggaacaggcaacagggtaaagaggcaatttttgtaataatatccaatatctgtagctgatgtcttatgtatattaagccttccgcagttttttgagattgattttgcatactatgtactgaagaaccatagattttatccatcaagtaaaacctgttctctatgtgggcataaaaaagatcgtctttccttgtcccaaagaatttattgctgcgagaactgtggtttggaaatagatagggatctaaatgcagcaatcatgttatcgcgtctggctaaggcgtgaaagtctactgagggataactgctcccatgctcccgttgaagtagaaagtaaactctagttttgtctaggttttatatagcagtttgatgtaacaaaacaggatgccgttttggtaacggggatttatgtttcaatggcaatgttattcctgaataggaaaatgctagaaaaatatttgcgtaagtttttaattttgtgttgttcttctataccttttatagccgatttagcacttgcgaattcttcagcccaagcattaccaggacaaagcacagaagaagtaatcacttggattcaagcccatccgactcttcgccccagaagtggggaacgattgtttgtgagtaaaagtgatacagcagcccaaagattcacttttcaagcttcggtattaccaccaggtaaggtaacatttactaaagatcgcagtacaattcgtactgaacggatgactatgtatgatggtgtaaatggcgtgacaattcagcgtcttgaggaatctttgcgggtaatttatggaatagatatttatcaagactataatcgcgctcaggtggtttatgagtatcctaatcaaagtgcaataaatcaagcacgtttaacaaaaacaccgattcgggaggctttacaaggagagttaagggtgggcgatcgctatgcttattgggtagaaatagctcaacccaaggaaggaaaagctttgagtggtcaaatgacagtctttcggaaatctgacctcgataaattagaagcagaactgagaacacgttagttacagcagcgtgtcgaagggcggtgttgaagtaagccgaagtgctttcaaaaagtgccagcttttatgaggtggcaactgaaaaaccttgcacttaattcctataaggttaacaggcaagatgcctgttccacaagacttaagaatattaagattatacagtttagctgcataacagcttacctaaagaaaaaatcgtttctatccaactcttgaaactgtcaccgtggcgtagcacctgtcacctgttactggtctttcacagataactttttcagcaaaccttaaatagggcttgctgaataaacccaaaatactcgtaaatcaaaggtttgacgctgatcaggaggaaagaaagtgcaagatttttgaagggtataccttaaaaactgtgcattttgggtctgataaattagaaaatctggggataacagatagctaaaactattccctattccctattccctgcctcaacgaagggactttttcagcaaaccctaaatagtttcccatttaccggaaaagatactttcagcggatcgggaaatgcgttgtaaatcttcttttagcagtggcggccattcaactccagatttagatcctgtagcaaataactgcaaagctctaatacctaatttatataaagctaaagctagttctttatctaagctatgagcatcttttagagcttcaaacacaatttttaaggctaataaaacagaggtaatttgacctggtactggtggttttccttgtttgagacgatttaacaaagcatctgggttttcttcatttgctgtttggtctataagtaactttcgcgctatttcgtagttcatacaggaaataattgataattgataattgataattgataattatcaattattttaaatctagtaaaccttcttcttttaatttaggatgaaaacgcatttgagtttttaatcctcttgattctaaaactgccaaaatttctgattcaactcgccgagctacatttttgatgattttacttttcgacgattcatcaattagtggattttgataattagctttttcttcatctgtcattaatgcttgagtattaataggattagtccatttttctttgttttctccattccctaagggaacgctaccattttcaacaatccaagtattttcaatcttttctaaaatcgtgcggttagggcgttcaattgtgtgaacttttaaccaataacatttttctggttgacggactaaatgctgcttgcaactaagataaacatcacgggaataaccaacgaattgcagaattttatctttgtcaaaaatagcataggctcctattttcccctgaaaatgtgctggtaattctccattttcgtcaatgtaagtgacatattctaaagtatctaaagcaggaatatcaatttccgtagtcatctttattaaatgtatgatttactaatttactaaagcagcaagtgtgcaaacagtcaagcatcagggtagaggtaaaacttcctatggacttttataagctgttgtgcatttaatttgtataagtggaacaggcatcttgcctgttaaacaagagttcagaacattaggattatacaatttagctgtgtaacagcttatcagtaattagggtttaaggaaagaaggtttgagagatattttgcgtaagtcctggaaataaagaaagggtttagcattgctaaacccctacatttgctttttccaaaaattacctttcggttttattcttcatcataatcatcgtcctcttcctcgtattcatcttcctcttcttcctcaacacctgcaatcacttcatcagcaatcaaatcttcatcatcataaatagacctgtcaccccgtctaccaccgtaactaccatcacccaaatcagaagaatctaagctgtataatttagcagtgcggtcatctaaaaccatatccagtgaatcatctacctcatccaaaaccccagtacccaaatcagtaccatagtcttcaatggtggtagtttcttcataggtgttgtaaccagtgccagcaggaatcaaccgcccaataatcacattttctttcaaaccccgtaaccagtcagatttaccctcaatcgctgcttctgttaacactctggtagtttcttggaacgaagccgccgaaataaaactgtcggtattcaaagatgccttcgtaatccccaacaacactggggtatactgcgccctcgccccaccagtaatggacattgcttcgttcacctgctccacctgccgcaattccaccaactcacccggcaacatggtggtgtctccaccatcatcaatgcggactttgttcgtcatttgccggacaattacttcaatgtgcttatctgcaatatcaatgccttgggactggtacaccatttgcacttcattcaccaaaaagctttgtactttttgcaaggcatgactcgcacaggcatagattccttcttctgaacccaaactaaagaaaatttctaagatctcatgagggttagaaggtccatcagttaagggttgtccagcttctacatgaacaccatcaggaactatcaggttttgccctggtccaaggggataatcggtaacgctaccaccagcttctaaaactttaatagcataagcttcccttcctaaagcttcatctccatctccataaaccaccttcacctcaccaggacgacggcataaaatacaagcttctttgggtttccgagcttctaacaattcttcaattcttggcaaaccttggataatatccccagttttcgccctctcaaacaccaacaacaccaaattatcaccccgttgcaccagtcccccgtcttctatctgcaacactgctccaggactgactcggtaaggacgaccaacgcgaatggtaatggagtatggtgattgggaatgggtgatgggtgattgggaactgtcacctttactgtcacctgctttgattgaaattacttgtcctgattctggtgctagtacccctggggcaatttctgttccttctactaacaaatcaccttttttcacttttggcccttcgacaccgctcaggacaggcgctgtggtagtttctacggtgatcatgtcagtttctcgcaggactaaacaacgacgcacggcttctgcgtctctcctgacaccgcgaactgttcccccttctttacacaaaatctgtgttcttgctaccactgcccccggtgcaatggtcatgccatcttccacttctagggtagtatgggtactgccttgggtggcatctgcggcaatgtctcgccgaatcaccaaagattccaaaattactaactgcaatctttgaatctcagcattttcaccatctgctaccaattcaatgtccgctgctaaaggcgaagcatgatcctgttctccctcttgttcaatttccaataccaactgagtccgcaacaattccaccccttccacggatttcactcgttccccatctttgtagggtaaacgctgtaatgcccgtagttgaatggatctgcctgtttgttgactgacggaagttgtagaaggtacatcaggacgagccggtacatcaaactctaccactggacgacttaacaacgctggtccttcgggcgattccacgtactgaatataccgcagttctgtggccactgttcccagaaactcttcacccggctgcacaaaggtattatccctaccgatcaccgcttctggatcatccaccatcaacagttcaccaggttttatcaccacttcccgcaaaatgtcgtttttctgggtaacttcaatcacgccactggtttgacagaaaatgtctttgactacttctgtaccagcttctacaaattgcccatcctccactaacaacaaagaaatatctttgtttacttcatggctttcttctggtatccataacagcgttcctcctgttaccacttcatagcctaatttggctttaccttttttctgaacttcaatgcccgcaaacttcaaaaagccgcctgtggtggtgcgataacggtcatcaattaattctgctactacttgaccattttggacttttgttccgggggtagcacggaggttaaaagtttgagacttggtgactggtgattcttcactgtcaccgtggcgtagcacctgtaacctgtcacctgtatgaattaagtaattatttttcccttgggaactgtgaaccgttaccgtcgcctgatccaatatcacggaagcggtaataatttcaatttccctggtagcttttccggggatagcttctggcaaccgcactactccaccatgtacggtggttaatttagtttctgctaaaactccattagaggcgatcgcatctccattttttactactaattctgcacctggcggtaaattatacacttctccagataaaatccaaatcaaaccacctctagctgctgtggtggtagtgttaccttgtcggtcggttttttgttctgctactacatcggcaaattgtacttctccggctaggtcggttgctacgtctttaacggctttttctgtgtttgctctggtggttttaccgcctaaagctacttcggcaattagttgggcaacttttacctgttgtccaggattaatatataaagtcgaaccttgggtaatggaaatttcttgactttccccatctcccttggcttctaaaaccatagtgccattggtttccgcatatagggcatcttctccgtgacgggtacgataggggcgagtttttaatttacgagaaaattttactgtaccttcaactttcgctcgcacttgttgggcaacttctccggtaaatactcccccagtgtggaaagtccgcatggttaattgcgtacctggttcaccaatactttgagccgcgataattcccaccgcttcccctaagtccaccatcttggcgtgtgccaaactccaaccataacaatgttgacacacggaacgagcggcttcacaggtgaggggcgatcgcactatgacctctttcactcctgctttttggatctctgctgctaagtcatcagaaatcggagtattccggggtgccagtatttctcccgtagtcggatgaaccacatcttgagccactacccgccccattaatcttgtaccaatgggaattaatactttagctccttctgtcatatcccgcaaaggaatacccctggtagtgccacagtcaaattctcgaataatcacatcctgggaaacatccactaaacgccgggtgagatatccagagtcggcggttcttaatgctgtatcaactaatccttttctggctccataactagaaataatatattctgtaacagttaatccttctcggaagttggttttaatgggtaaatcaataatttccccttgggggtcagccattagtccccgcattcctactaattgccgtacttgagagatattccctctggctcctgagaatgccatcatatatacggagttgagggggttggtttttttgaagtgtgtcactacttcatctttgagactttcggaggttccattccaggtatcaatcactttttggaaacgttcaacttctgtaatttctcctcgtttaaaccgttcttcggtgctgagaatttccgcttctgctgcttccaggagggattttttagaagggggaaccatcaaatcatcaacactaatggaaactccagctttggtagcataacgaaagcccaggtctttaagtttatctgccattaccgcagtccgagccgtcccgtaatgggtaaatgaccatgcaattaagtttctcagttgacctttattaacaacaaggttacgaaaaatcattttttcagtcatcttaataattgataattgacagttgacagtggacagttgacagttgacagttgacaattatcaattgtcaattgttaattgattagcttgctaacgcttcctgaatcgctttgttataaatcaccctcccaggagtagtgtaaatatattgagaaattaaatttccttcggcatcctcacgcacacgacggaacttatacaacaaagtccggctgccatcttcattttctacaacttcctgcggttcatgatccggctgtccagtttccatctctccatcaaaccgcacgtaaatataggaatgtaggtctacctgatcctgctgataggccataatcacatcatctaaggaagcaaagaagctgtttttacctttggtagcgttgggattttctgctgtcaggtaatatgctcctaacaccatatcttgactaggggtgactataggtttaccggttgctggggaaagaatgttattggatgccaacattaataaccgggcttctgcttgactttctaaggacaaaggcacgtgaaccgccatttggtcgccatcaaagtcggcgttaaatgctggacatactaaggggtggagttgaatggctctaccttctactaaaattggttcaaaagcttgaatccctaatctgtgcagtgtgggcgctcggtttaacataaccggatgcccttcaatcacctcttctaatacatcccacacactggggtcattgcgagaaatcagctttttcgctgctttgatgttgttgaccatccctgaacgaatcaaccgattaatcacaaagggctggaacagttcaatggccatttctctgggtagtccacactggtgaatctgcaatttgggacctactacaattacagaacgtccagaatagtctactcgtttacctaacaagttttgccggaagcgtccttgtttaccttcgatgatgtcggataaagatttgaggggacggttatttgctcctactactgtccgcccccggcgaccattatcaattaatgcgtctactgcttcttgcaacatccgtttttcattacggacaataatctccggtgccagaatttcctgtaacctcgccaagcgattattccgattaatcactcgccgatataaatcgtttaaatcactggttgcaaatcttcctccatccaattgtaccattgggcgcaaatctgggggaatgacgggaatagctgacattaccatccattctggtttagaaccagtggcaataaaattatcaattacccgcaatcgtttaattaatttcgcccgcttttgccccttagcgttattaatttcttctcgcagattttctgcttcctgttctaagttaatatcagccaacaatcgcagcagtgcttctgctccaatacctacttctacccctactagttgggaatcttcgctataaattgcatcttcaatttccagccactgatcttcggtcaacaattgtttgtaggtgagagtatctgcattaccaggagctaacaccacataagaattgaaataaacaatttgctctacatcccgcaatggcatatccagtaaaatggcgatataactaggaatacctttgagataccacacatgggcaacgggggcggctagtttaataaaacccattctgtgccgtcgcacccgtgattctgttacctccacgccacagcgttcacaaacaattcctctgtgacgcactcgtttatatttaccacaatgacattcccagtcttttgctggtccaaaaattcgttcacaaaacaaaccatccatttccggcttcagagtccggtaattaatagtttctggttttgttacctcacccactacctgaccattaggtaaagtgcgttcaccccaaatacggatacgttctggtgaagctataccgatttttacgtagtcaaattgattagattgaatcgatctcataattaattgataattgataattgataattgataattaacaactgataaatttcaattgttaattatccaattcatcgccaacacttgatgagtgtcaattgttactcgtcttcttccaaggactcacgggaaagtgactcataggtaggacggggaggagtacggcgagaaccttgatccgccattaaatcaacttccacatccaaagaactaccatcagcttgggtttctaccttatgcacagcaatatccaaacccaaagattgcaattctcgcattaacactttgaaagattcaggagtacctggacgaggaatagctttacccttaacaatggcgttaagtgcttcatttctaccttgcatatcatcagatttcactgttaacaattcctgcaaagtataagcagcgccaaatgcctccaaagcccatacctccatttctccaaatctttgcccaccttgttgagcttttccacccaaaggctgttgagtaacgagagaataaggaccagtagaccgggcgtgaattttatcatctaccaaatgcaccaatttcagcatataagccacaccgacggttacaggacggtcaaaaggttcgccagtgcgtccgtcataaaccataattttcccagagtcatcagggttatatacccaagttttccctgtttcatctctggcttcttgcaacttgccatgcacaatgcggcgggaagactcttccccatacatttcatcaaaaggagtaatcttaaaccgcactcccaaattttgaccagcccaacctaacaaacattcaaacacctgccccacattcatccggctgggaacacccaaagggtttagcacaatatccactggtgaaccatcgggcaagtaaggcatatcttctgctggcaggatgcgggaaataatccccttattcccatgtcttcctgccattttgtcgccaacttggattttgcgtttttgtgccacatacacccgcactaccatatttgcccctggtggcaactcatcaccctgttctctggtgaataaacgcacatctaccacccgccccttttctccattgggaactctcagggagttatcccgcacatcacgggctttttcaccaaatatcgcccgcagcagtttttcttctggtggttggtccgattcacctttaggagtcacttttcccactagaatgtcaccagattctacccaagcgccaattctaataattccctgttcatctaattgcctgagggcatcttcccccacgttgggaatttctctagtaatttcctctggtccaagtttagtttgtctggcctcaatttcatatttttcaatgtgaatagaggtgtaaacatcatcctgtaccaaccgttcagaaatcaaaattgcgtcttcgtagttatagccctcccaaggcatataagcaacaacaatgttttgtcctagtgccagttctcccccttctgtagaagaaccatcagccaatacctgaccagctaccaccttttcccctatacgaaccaggggtttttggtttaaacaggtatcttggttagaacgttgatatttagacaggacatatttaatttcctggggtttagaaactggggaagaagaagtttcttcgctgtcacctgttacctgtaacctgtcacctgttctctctcggactctgacgcgaatttcgttagcatctgcatacactacatcgccatcggtgcgagaaacaattaccattccagagtctctagcagcttgagcttctaaacctgttcccaccaaaggacgctctggtttcagtaaaggtactgcttgccgttgcatattagaacccatcaatgcccggttcgcgtcgtcgtgttccaagaaaggaatcatgctggttgctacggaaacaatctgcactggggaaacggctacgtagtctacctgttctggtgtggtggtggaaaattcttggcgatagcgtactggtacttggggtccaataatgtgtccgttttcatcaacgggaatgtctcctggcgctacccgtagatcgtcttcttcgtctgctgtcatgtagacggcggctttttcatagcacactcgtccattctctacaggtctaaatggtgtttctaaaaatccatattggttaacacgggcatgggtagccaatgaaccaattaatcctgcgtttggtccttctggggtttcgatggggcagatacgtccatagtggctagggtgaatatcccgtacagcaaagccggctctttctctggttaaaccaccaggacctaaagcactgagtcggcgtttatgggtcagttccgctagggggttggtttgatccatgaactgactcagttggctagaaccaaaaaattctttgattgctgctactaagggtttggggttaactagagatgctggtgttaaaacttcggcatctgatacggtcatccgttcccgaatgatgcgttctaaacggttcaatcctactctgacttggttttgcaggagttcacctacgcttctcactcggcgatttccgaggtgatcaatgtcgtcaatactaccgatgtcgtattctaggttgatcaggtaatcgactgcggctaggatatccccaggggtgaggacgcgcatggtgtcgggtacggaaaggcgaagttttttgttgagtttgtatctaccaactctgcctaagtcgtaacgtttggggtcgaagaagcgggagtctaagagttgttgtcctcctaagactgttggtggttcaccaggacgtagtttgcggtataactccatcagggcttcttcttcggaaaactgcccttctttttctatggttttttggaagtattctgggtggcgtagggcatcaaagatttcgttgtctgataatcctaatgctttgagcagtacctgtgctgatagtttgcgggttttgtcgatgcgtacccacactaaatcgttacggtctgtttcaaattttagccatgccccccggttggggattaaactggcagaataggttcttctcccgtttttgtcaatttctgatttgtaataaactcctggcgatcgcacgatttggttgactataacccgttcggctccgttaataataaacgttccccgatctgtcattaagggcaaatcacctataaatacttcttgttctttaatatcacctgtttctttgtttaacagtctggtagggacatacatttgtactgcataggtgctgtcccgacgtttggattcttcaacgctatacttaggctctttgagtttatagttctgtccgataaagtgcagttctagttttcctgtgtagtctgtaatcggactaaatgagttcaactcttctattagcccttcttctaaaaaccagcgaaagcttgaacgctggatttcaatcaagtctggcaacagaaaggctggttccatgtatgtttcgtttgtcatgcctctacctttgtcaacctggttaaactttcgcttggatcgagcagggaaacctgctgtggtgttccgactctcactttgtggggagcaagttgttgagtaacttctcctgacgctgccaactctttactgttttgcagtcattaaatctgtaattggtgtttttgacaagtggttaagcgcttctgagtatcagtaaagatggaaaaagtctgtgtgctaaatcttgaaacaagattagatggtctataatcttgctgatttttcttggtttttctctctccagttctttcacacagcctgttcattaattccgcatccatactgttgtatcttttagggacctcatctatactcacagtaagaacccaaaaacaatgaagaatccgcgagtgttggctgggaatcaggatggatttcttttgctgtttttttgtcacaaggcttttaagtctaaaaatttaataattttctatatttcaatacacaaaaatccgctgctgtgtaaaattccatatcaaactaggcttccagggtttgttatttattgagagcatctgcattgtagagatatttttagatgtccttgaattttgtgttgatcaacattcactgctatacaattaactagatatattttatacctagcatttaacagtaattttcgcacctagttaaaaattcccttcctttatcattatgacgcaagtaaaatgtttttgagggaataatattagcacagttttgtcctccgaaagtctgaattttggtttttttatcaggtttcagtttttctgaattttggcgactgactgatagctaattttatgttattgacagtccgaataacctacaagcattttcagtggtttgatgggcgatcgcctctactgtttctcccctaattttggctatttgttcggctacataacctacataagctggttcgttgcgtttttcgcctcttttgggtgtcggtgctagaaatggacagtctgtttctatgagtaggcgatcgctactcaccatggccgctgatgcttggattgttttcgcgcttttaaaggtaacagtgccactgaaactgatgtaaaagcccaaatccagaaaccattgagtttcttctggtgttcctccccaacagtgcattactccccgtactttttccccttgtgtttcccgccatttttgcaatatttctctgacctgtggtgcggcatcccgacaatggatgatcactggtaagttcagttctgcggcgatcgctaattgtgcctcaaataccttatactgttgttcctggttattggccttgtaaaaatccagccccatttccccaatcgctactacttgaggatcagcactggctagagttttgattttctctgctgtctgatcctgccatttatgtgcatctaaaggatgtaaacccactgcaaagctgatttcaggaaattcctgtgccaatgcttgaatgctggcaaactcttctgggtgaacacaggaatggactaaatgcactactccggcttgttgccaacgcgatcgcactgctgctaaatctggttgaaaaaggtcaaagttcagatgtacgtgggtgtctattaattgcatgatggagtcagaaaccattgatggggtttggttaagtcattaatctcttagttcatgactaatgactaatgactgatgacttctatgctgtttgtgtcagtggtttgagtttttgtgctaaccttgatttttttctagctccgttgttgggatgcagcacaccacgcttgacagctttgtcaattttgctgtaagcctctgacatccgagtatctactacctgttttgattcaggagtaggattagctgcataggcttccaccgcagccaaatatttcttcatcagcgtctttactgctgatttatatgctttattacgcagtcggttgcgttctgcgatttgggcgcgtttaagtgctgattttgtattcgccacagtcagttccaaaaaaactattaattaatatgtacacacactactagatttactaatatagcacaaaatttgccaatgttataatttcacagaaaaattttccggtgggatgttagggcaggcctgcctcctgcctcctgcctcctgcctcctgactcctgactggtgagtaggaaaataatagacctggatgtatattcaggacggggaaataggttagaataagttacctataaataaattaaattgccaacgcaactactcccagcatctaacctgctttttagtgagtataaaatcattaaattcttattatgcaagtaaaatatctgtagccatcctgggagtatcaaaagaatgcaggttaagctagagaagagagttaggaaaagcttgatatcctcagggtaaaaagccagactaatgatcaaacaggaaaattctaattttggcattgtccttactactccatgctgcgaattattactcagcaggcagacgttatatccgaactacaacgtatctgcgatcgtactcacgatgaacaggtgcttcacaaagaagcaacggtacgtgaagtgttgcaagcagtcaagcgccaaggcgacaaagctgtactgcactacactgccgaatttgaccatcaaaccttgcaaccagaagaactgagggtgacaggttcagaactggatgcagcttaccaacaggtatcaaaggatttgttggcagcgattcagcgggcttgtcgccaaattgaagtgtttcaccgtcagcgagtaccaaaaagctgggtacactttggcgatgatgaagtggtactgggtaaacgctatactcctgtagatcgggcaggtttatacgtccctggaggtagggcttcttaccccagtacggtgctaatgaatgcgataccagctaaagtagcaggtgtaccgcgtatagtgatggtaacaccaccaggagcaggtaaagcaatcaatccagcagtcttggtggctgcccaagaagctggagtagaagaaatttatcggattggtggcgctcaagcgatcgctgctttagcctacggtacggaaacaattcctaaagtgaatgtcattagcggaccaggtaacatttatgtcaccttggctaaaaagctagtttacggcactgtaggcattgattccttagcaggaccgagcgaagtgctaattattgccgatgaaacagctaatcctgcccatgttgctgcggatatgttagctcaggcagaacatgatccaatggcggcggcgattttgttaaccacagatgtgggtttagcgaaaaaagtccaggcagcagtagatagacaactggtagatcatcccagaagaatagacacagaaaaagcgatcgctcactatgggttaattgttgttgtcgaatctttagaagcagcggcagaattttccaatgaatttgcacctgaacatctagaattggaagttgaagatccttggactttaatttctcacattcgtcatgccggggctattttcctgggtaattccacgccagaagctgtaggtgactatttagcaggtccaaaccataccttacctacttccggtgctgctcgttatgcttctgccttgggtgtagaaacttttcttaaacactctagtattatccaatactcaccaaccgcactagagaaagtcgccggcgcaattgagactttagcgaaagcggaaggtttgccttcccatgctgattcagtacgaaggcgagtacaggaagaagagtaattgagaacgcttatttttttactgagtgcggttgacagcagctactccataattaaaaatagaaagtttgtaattttagcaaactaaagttcacaagaaaatcgctcaaaggcacggaagccacttggctgtcttacagtggaggaagtgccaacggcgaatttattcgccgcgaatatgatacgattggactgcgagtaggaacaaccatctacacgaagaagtattttgatcaggagaaacccctgatttatctcgtctcggcatttgaccgcagcctgggtaaacaagcaaaggcaaatatggagtgtaataccgccaaaatttgatggactcggaaagcaaaaaaacataaaagtaagcgcaattgcaatacctgtcgtactggtagttgttttgagcgcgtagggggataattgactatcccttttgagcaagtcttaaagaatctgcgtgtctttagaccgcagagtgtcaaattaagaaaattgttggtgttcaaaccaagaaaattcttaatgtgataatttaaggggtctacttttgaggagacaaaagcggtgttaaaaactattttagtagctctggatggttcggaaattgcggaacgagtaattgaaactttaggtgatttggtgctgtccgcaaacaccaaagttgttctttgtcatgtatttcccgcaccagaggcagaaatagaattacccgctgatcgtcctcatccagactcaccaaagttgtcttatttccagatagaaaagcagttgcaatcctaccaggaaaaattaccagttcaaagcgagttagaattagtaactggtgaacctgcggaggaaattattagactggccaatatttacaaagctgatctggtggttattggtagtcgcgggttaacggggatgaatagaattgttcagggttctgttagcactcaggtaatggaagaagcgcattgttcagtgttggtggtgaaaccggggaagtaatttgtagttattcataattcataattcataattagggcttgctgaataaactcaaaaccttgataaatcaagggtttcaggtggaaaatcaggaaatcagtgcaggatttttcaggggtatactcctaaaagttatggatgaagaggaatttgaaattgctcaagtgaaattaaataaaagagtcaataattttgagaaattgtatagtctcaaaattgctctggaacgtggtttaattaatgaggaagaatatactcaaagaaaggctttacttgaataaaatatgaatttcactagcccagaaattagcctctgggctaataaataattaaaatgatatcaagtagatgatattcaagctacataaaataaatcttttcatcctccttaaacagctcagatatcacaaaatattttttttgtcaatacccaaaattataaccagcaaataacaacatcaaaaattctcaattctcttgtcaggaaaccttgatgatttgctcagatttttttcagatgttcagttatgagagttctgaaatagttactgggtaaagactttcaatctgctgctgtaaacgccgtattaaaaatagttacaataaagcaaattacaaattctcctaaatcatagcagatcgctaaaagtattgcaataccgttagtaaataaaaataattctcaattaattattaaaaaaatataaaggaagaaattttgaaagttataaaatactaaactatttttagttttaaataactgaaacttatctaaaaaccaagagcgatcgcatcgcatggaatagatatgtattttgaataagttcatcaaaaagaaattattcgcttttaattatatccgataatcaaaattgtaattgctaacggagtgagtcagatagcgtttgactcaccgcacaaaaaacttctcctttaactctttgcgcctttgcgcctttgcgtgagaattacccctttttaccccgcaaaaactcccgtaaactcagtaaagatacagtctgacccaaattcaaaggtaaaattgacacaccttccaaacgagactggacccaaccttccccccagtaccactcatgaaaaccatcaatacccccactcagtaacaagcgcaaacaattatttttcgctacatctacatgatgatgaattttcacaggtccagtggaagtagtaaaatcaaaacccgaagttaacttttctggcattcctggagaaaaactttgtcctggtagccatttttccagttgtgcaggaattaatagactatcgtgaatagcatcagcggatgcttcgatttcaattcgcagttggctttgttgaaaagtgcctagcatggtgattggtaattggtaattggtaattggtaattgggaagaaaaaataaactgttgccttttgccttttgccttttgccttttgcctcttgccttcttactgtcacctgtcacctgttccctgttccctgttccctgaaaaacttacaatatataaagtcatcttgttaaaaattgtaaaagttttcatggcagataaattaatacgggctacagcagcggatgggggtattcgagcggtgggagtgattaccacacgcttaacagaggaggcacgagtacgccataagctttcctatgtagctacagcagcactgggaagaacaatgtcagcaggtttactgatggcttctagtatgaagcgtccaggctctagggtcaatgtccgggtcaggggtgatggtcctttgggtggtatattggtagatgccgggttagatgggacagtcaggggctatgtaggaaatccatctgtagaattgcctcccaatgctaaaggtaagttagatgtggggggtgctgtaggtagtggttatctctatgtagttcgagatatcggctatggatatccttactctagtacagtagaacttgtttcgggagaaattggtgatgatgtggctcattacctggtaaattcagaacaaactccttcggctttggttgtgggtgtgtttgtaggagcagaaggagtgactgcggcaggagggatattaatccaagttttgcctaaagccgctagagatgaagctttagtcacaaccctggaatcacgagtatctgctttatcagggtttacaccgttgatgcaagctgggaagacgttaacagagatttttcatgatttgctgggagatatggatctgaagatttttccagaaagtcaaatgttgcgcttccactgtggttgctcttttgatcgggtgttgggagctttgaaaatgctaggagcagcagaactgcaagatatgattctcaaagacgatggtgcggaagctacttgtgatttttgtggcaatgtttatcaagcaaatggtgataatctagcacaattaatagttgatttacaaagggaaacttctgtttcagaataagtgtgaaatactactaaagcccaaacatataaatggtatttgtggaggaagataaaaaatgaaaaaaatagctttttaatgatgagaaagaaagttactatggcaaaaatggaataatcagtttcatcagaactgctattcaattactttggtgtgagagatgacagatcgggatatttcagacagttgttctccaaccagagccagaaaaccagatcctaatacaagattgtcccgaactccagaagtcgggacaactcaatcatctggtgtccctcctactggttctaactttaaatcagtgacgcagcaacaagataacaattcagaaggattacctatagaaaactattcagaggaatcttttgatactaataaaaaatgggtaaaattgccaagctggatgaaaagctgggtgatgtggtcaattttattaacattgattcctagcagtatcgggtttatatcaatgtcgatgctgctaaaattgccatcagcgccaaattgcccaaaaatcttttggcctttagctagtgcgtctgtacgtttacactgtgcttccctggctgcttctaagcagaatgtgaacgacttactgcaagcgatcgcactggtgagagacttaccagaaaatcacccactcaggggacagattaatggtttgttggaggaatggtcaagggatattttaaagctggctgaggaaagtttccaatccgggaatttagaagaagcgatcgccacggctcgacaaattcctgaagacttagaagctcgtaatattgtagaagagcaaattactaaatggcagtctacctggtctaaggcagaagaaatctatgacgaaacattaaaagaactgggagaaagacgctggcaatcagcttttatgctgtcatctaaactgctccgcatcaacaatcaatattggtcaactaccaagtacgatgaactaaatcgcatcattgtcacagcaagggaagatggtgataaacttgacaaagctgaaggtttagcaagacgtgcctcagtggatgatattctagcagctatcaagctggtagagtcgattaagtcggagagttacgtatatcaaaaagctcaggaattaattcctgaatttgggcgcaagatactgcaattggcacaatctcgcatggataggcaagatgcggatacagcattagaaattgctagaaaaattccgccaatagcttcattacaatcagaaattgatgattttattgttttgggtgaagcccaaagaagtgcttggataggtacggttgctggtttagagagcgccatttcccaagctcaacaaattgatgcttctagggaagtgtatattaaagcacaagaattaattgctcgttggcaattggaaatagaagatgtgactcgtttagaaaaggcgcgaaccctagctagtcaagggacgatcaatgatttaacagcagccatttctgaagctcagatgattcccaatagcaacccccgcgcttcagaagctagacaggagatgaatcgttggcaatcccaagtagaaactattgaagacagaccttatttagaccgtgctgatcaaatagctctgttagaggatattaactccttgcaaactgcgatcgcagaagctagtcaaattcgctctggtcgtgcattatatccagaatctcggcaaaaaatccgcaattggacggctaaaattcagcgtattcaagaccaaccttatttagatcaagcacgaattattgctgaaagcggtgatttaactactgcgattagggaagctcaaaaaatcgcttcatcaggaagggcgctggctagtgaagcacaagcatcagtggatacttggcaagaacaaattagggcgagagaaaactggaaaaaagccagagaagtggctattgctggcacaccagaagctttagctgaggccatccgcatagctgatcgagtttccaaccgtaacattttacgcatggatgttaacgtggctattgatcaatggagtcagcaaatattacaaatggcacgttctcaaagcgagtttgatattcctagaagtattgaaactgctagattgattcctcgtggtagttctgcttacagagatgcccaactacaaattagaacttggagacaattcctcattcctcggacatcacctacaacattacctacatcatcgctggagtcattacctactccatcacctgaagctgaaccatctccatcatcaactggtaatggtttgtaatgggtaatgggtaatgggtaatgggtaatgggtaatgggtaatgggtgattggtgaagttgacagtgcgaacgcctttaggcaggagagtgtcaatcatttagtgccagtttcacccaattacgaaaagcgcgagttgcggacatttgtccaatttttttactttccgcaataaatcgaggaatttctgtgatttggataggtgcaaaagtggggctgatttgagtttctgaatattgcccatttgtcagaatgtagattcttaatgaagttccgttgtaacgccaaaattcagagattcccattgcagcataaagcttcaatttatctattttaggtcgtgaatattccacttctagcactaagtctggtggtggatcaaaggctaaatcaatattctcttttcctctgactaataattcattctggatataataaccactgtctggttctgcaccatattctaaatcatctctagttaatgtgagtgaaccaacgcgatcaacttctaaaccaaattcttcacacaataccccgacaaaaacctcaattaaccgatttgcgttttcatgaggtttttgtggagtcataatttctatatttccctgatggtaagaaattctatttgcgcgttctgaacccatttccactagcatggttttaaatgtctgccaggagatgttttctagtaaaactctggtttctgcgggtgttgctgttgttaccatagtttctttttctcacaggtgatagatttgaatataacaaaattttctgtttactttaattttgttatcttcatttagcctctaacgcttttcttgggcttgaatttgcctaactactgtcaatgctgaataacttacccctgctgtaccttctcctggatgggttgagtcacccactaaccacaaattattaatagatgtacgattggcaaaaccaaagggtccaaatgtcggtattctttgcccaattccgcccacaattcccttttctctacctgtataatgggcaaaggttttaggtgtggcagcttctacataaatgatggtttctggttttaaatagaaatattgagcaagtttggaaattgcatcttgggtaaattttgcttttaattcttgatagttttctgtgttccaccattgggtaaaatcaacaaaagaagatgcaataattgtcgcttttcctgttggtgcgcgtccatctccttcatgactgacagatacaaataaggagttattttccccaattggtccattaatatcatacataaattgtaaatggggcggacaatcatcaggaatggcactttgatcaacaccgatataaacgacaaaagcaccggaagcaggtggtaatttttctactctatgtttatatcccgatggtgctttttctcctaataatcttactaagtcttgtacagtgacgttagcaattacatgatctgctttttctgtgaaaacttctccggttttttgatttctaattactacaccgttagctttgccattttctacatttattttttctacggtgtgacgcattaataatttaccattgtctctttctaaagattcaactaggcgatcgctcaatatttgcatacttccttgtaaatgatacaatccttggggagattgggatacactcaatgctgtagctgcataaagtaaagcggtttcttcggcattcacttgggaatataattttagttgtaaatctaaaaatgtccgcagtcttttatcatttcctaaaccatataatcttaaagcatccccaacagtaaataaggtaaaaggtgcagtaatcaatgtactcggacgaacagcttttgttaactgtaaaagatcccagaaacttcggggtggtaataccggatctcgtccttgaaattcccaacttgcattaaataaagtcgctaataattgccagaaaccttcacttccaggaaactgtttttgtctttcttcctgccatttttcaggatcacgccaaacattaataggtgtattttctcctggtaaaaataccgcacaagcaggatcacaaggagttgcttcaggtaattctatattcaattctgagaaaatgcggtgatgtatacccccaggttctaaccctgcaacttgagttgcaccgacatcaaaagtaaaaccctgacgtttaaaggtggaagcacaaccaccgggaactaaagcttgatctaaggttaaaacgctataacctctatgtgctaataatgctgcggtggttagtccacctatacccgcaccgacaacgatcgcacgggattgatttttgttcagggatagactaggcatgaatacttattttacaattcttaatattactactcataattttacataatttgtaattaaatcgggcgatgtggaatatatttctgtcacctgtcacctatcacctatgactttgtgatacagtatttctgctgcgataataatagacaaaattaaacatgagtaaaaattttgaaattcaagaattagcgatcgctatcactgctaaaaatttgaatcccacagtcataacccctgattttttgaaatatactggaattgttcccacagattgggaattagcgacagagccagtttttaacaatgttgtcgtgcagattttctacaaaagtggtgtaggaattgtagcccagccaaataatgttacagtagttgagtccataggtgcaaaacaacaggcagaaattcaaatacccaaaattactcatcagttagtagaaaaactctcccaagttgagtatcaaagagtaggaattaaccccagaggattcgtagtttttaactctgatgcagaagcatatcaatacattaatggtaaacttttagtacctggttcatggcaagaatttgaaggtgcaaaagtgaatgctgccttgcagttaagttatcctttgaaacggggaatactaaatttaagtattaaccaagcaaatgtacagtttcctgataaagtagcagcagcaattttattttctggtaatttcaactattctttatcaggaaatacagcagcggataaacttcaagatttgcagcaaataattactaactggcaagtgtcagtaggtactttccaaaaattattagtagagaattttttaacttcttctgaagctccaaaaaacatttctgtttttccaccaatggcgaaaaattgataatgtattagtctagttactgtggggtgggcatcttgccagccctaattatagtcattctctgatagtttattcaatcaaataaccatcaacattaacatccaaaacatccgatttagtaaaaggacatgattcaggaaaagtagtcaaagatagttgagtttccacagcagcagctttacaagcttcttggtaacattcatcaaatacagcatcgaagtgacgtttgagactaggactatttttaaaagctttgtttaatcggcgagagtgttcaataatagtataagaccaactaggagagcgtttttctggttgatacttccacctgagtaaatgttgtaatatgcgaattagattactttctaaagcatctttttctttgcgactcattccttcaatttcttcaattaaattttcaatatctaattgttctaatttaccttcttttaagaaaatagcagtttgttctaaccagagattaaagtcagtttcatgcagggtttttacagttaacataatgtaaatactccaagaaataaaaattagggataaaaatctaaatcgaaaatttcagcgtgacaaaaaggacaggattctggaaaaacaccaagaggtaatttagtttccttacttgcggattttctagccatttgataacatttatcagaaattgtagctagaaaatttttctctaaactaggactatcttcaaaaataaataagatttgacgacgttgttcatcaatagtcgctaaccaactactagattgatttgctggttgatatttccattttaataagtgcattaataaaatgattaatctattttgtaattctcgtttatcacttttacccattgcttcaatttcttcaatgagatgttctaaatctaattgatgaaaattttgttcgcgtaaatgctgtaatgtggtttctatccattcttgataatcagtttcataaagagttaacttagattctgttttcatagacaaatcctcttaaaaacgaatataaatctattatacaataatatagaaaattaaatatccctcttctgtcacttgccgaaaacatttgccatttctaaattttgtaaccttttcctggcaagcgatcgctcatttatttatgttaatgaaattaaaattgaaatccaaacaggaaaagatgatttagaagatgcaaaagataagtcttttgatttactaaagattattgagattgcagatgctttcgctactggtgttggaatagcagcacaaggtattgctcaattattatattaacaagtttacaatcaataggaatatttagataaaaacatcccccacaactcccccaacccagaccactgctaacaccatcaaaggcattgtaagatataagcagtaacatagccctcaccaccaatgacatcaactctgttaaaatctcctcgtcttcacgctcccaaggtgcatcctctacctaacggtttaaccattattgccgagcaaatgccagtagaagcagtgaacctgaatgtatgggtaaaagttggctctgctgtggagtcagatgctatcaatggcatggctcactttttagaacacattgtatttaaaggtacagaaaaattaggcagtggtgagtttgagcgtcgcattgaagaaagaggtgcagtaacaaatgcagccactagccaagattatacacatttttatatcactactgcccctaaagattttgcagaattagcaccactgcaaatagatgtagtgtgtaatcctaccattcctcaagaagcttttgaaagagaaagattagtagttttagaagaaattagacgttcggaagataatcccagaaggcgcatttatcggcacacaatggaaaccgcttttgatgttttaccctatcgtcgtccggtacttggaccagaaaccgtaatttcccaagttacaccccaacaaatgcgagaatttcatcaaacttggtatcaaccatcttccataactgcggttgctgtgggtaatttaccagtggaagaattaatagaaattgtcgctgagggatttgaaaaaaacagtcaaaaatcacaaagcttcacatctaaaaatcaacatttaaccgttagtcaagaaccagcatttacagaaattgtgcgccgagaatttgttgatgaaagtctgcaacaagcccggttaataatattatggcgagtacctggattaattgatttaaatgacacttatgctttagatgtgatagcaggaattttaggacatgggcgtacatctagattagtccatgatttacgggaagaaaaaggaatagtttctgcaattgctgtgagtaatagtaattataaactccaaggattatttactatttctgctaaatgtgatgtagaaaatttaccagcagtagaaacagcaatcattgaacatttggaaaaactacacacagaattagttaaagaatcagaaattgctcgtgtgcaaagacgagtagcaaataggtttatatttggcaatgaaacaccaagcgatcgctctggtttatatggttattatcaatctttaataggtgagttagaaccagcatttaattatccccaatatatccaaaaccaagacgaaaatcatttaatacaagctgcacaacaatatttatcacccgaagcttatggtgtagttgtcatcaaaccaaattagtcatgggtaattggtgattggtaattggtaatataccattctataacttttacttcttactaataaccaatacctataggacttacgcaagatatgactaaaaaccttattcttgcgtaggggtaattcatgtagcttgcttcccgaagggtattacccctactttcgttgccttttgcgtaactaataacctataacctataaccaataaaaaaccatgatttggcaagaaatagatcaccatataagtcaagtaacaggacaaaaatttcaaacctctcaacattcatctgtaagcggtggttgtattaatcaaggttatgccattagtaatgataaaatcacctacttcgtgaaactcaacaaagctactcagggagaaatgtttgcagcagaaatgctgggtttacaacaaatgtatgaaaccaaaactatccgtgttcctaaacctgtatgttggggaaatacaaataattctagttatatagtattagaatggctagaaatgaacggtggtaataacaaatcttggcaacaaatgggacgaaacctagcagaaatgcacaaaaccattagtaaaaaaggttgcggttgggatctgaataatactatcggttctacaccccaaattaacacttggaaatctgactggatagaattttatacagaacatcgtttaggttatcaatttcaactagcaaaaagaaagggaggaagatttcctttagcagaaaaattattagcagctattcccgaattattagcaaatcatcatgttgaaccagctttagtacatggtgatttatggggaggaaatgccggatttacagttgatggtgaacccgtaatttttgatccagcaacttattttggcgatcgcgaagttgatattgccatgacagaattatttggtggttttccaccagctttttatcaaggttatcaagaaatattacctttagatcagggttatgaacaacggaaaaccctttataatttatatcacattttaaatcattttaatttatttggtggtggttatgcttcccaagcaaacgggatgattgagcgaattttgcagaatttgtaaaatttagattttaattaaaaataagatacccgacttcttgtttattttgtaaattactcataatttataatttataatttataatttataataatttataattcggttatctgtgtagttaatttatcaaataaaattatgaactaaaaacatgaaatactatcaactacaaaccaacgttttacctaataattacctcaatgacttgtggggtgaaattcaatctagtccttactttgctatcaacaatctcaaccgtgattttatcaacaccaaaggattttctgtggtttttcagcgtcatggattacccaaagttatagaaaagtttcccttttttaaaccttatttagatttagcattgcaacctaattgtaatgctttttatctcaatcccttactattaaaagaaggttctcgcgttgatccacatatagatcgttctttgcgttcttattgtaaaaccattgaaccaccaaacctagttagtgttctttatgtgcgagtaccagaaaacatggaagggggagaattggtgttaaaatcaactaaacgccaagtgggacaagttaaacctcaaactaataccctggtttactttcaaggagatttaacccattctgttaacgctgtgacaactcctggaaatcgcctcagtttagtttgtgaacagtataatttaacagaggatgaattagaggaaataccagtatttatcttagaatcaagagctagtcaatctgcaaataaaaaacgaaaatatgggtattagagatatcgtacttaatcattaataaaaacaatgctgctaaacaaccgctatcaagtcattagcaccctgggatctggtggctttggtgaaacctttctcgctcaagataccaatatgccatcacagcgtctctgtgtggtaaaacaattaaaaccgattcacaataatccacaaatttaccaaatagtacaagaaagattccaacgagaagcggccattttagaaacccttggtagtgcatctgatcaaattcctgctttatatgcttatttttctacagggggtgaattttacttagttcaggagtggatagaaggagatactttaacagcgaaaatgcaaaagcagggattatttactgaaaatgctattgaggaattattagttaatatattgcctgttttgaagtatattcattcacaaaaaatagttcacagagatattaaaccggataatattattattcgtaaaagtgataataaaccagtcttaattgattttggtgcagtgcgtgaatcaatgggaacggtgttaaattcgcaaggaaatcctaccagttctattattattggtacaccgggatttatgtccagtgaacaagcagcaggaagaccagtttattctagtgatttatatagtttaggtttaacagcaatttatttattaactggtaaaccgcctcaaaccttggaaacagatccgcaaactgggaaaataatttggcaaaattttgctagtaatataaatcctcatttagcaaaagtcattgataaatctattgcttatcatcccagagaaagatttacttctgctcaggaaatgttggatgctttgcaaataaagtcagttattaatagtcaatcaccagttactcaaacaataattgctcctccactgcaaaatacagttacagttagtccagggaatacaaatcaaccagttaatcagaataataaacaaacaggaatgattctacctagtattatcgctagtagtttgataggtggttctattattattggattggcgattaataaatcttctccacctgttgaatctgccaataacacaaatacaactctatcttcctcaaataaaaattcagtagaatcttcatcaccaactcaggaagaacaaaaaacagaatcatctaaaaatacttcacctcaatctactgacgcaacacagactcaagttaatcccccattagcagatgaatctgtagtcaataattcattttattttgtagctgattctgcctttaaagatttaccaactgctactcaacaagttagaactttacaagttagaggttattctcaagctggaatgttttggataccagattatccaaatctatcaggaaagcgtttatatcaagtatacgcaaattggtttagcgatcgcacgaattgtatcaactttctaaaaacctatggacaagttaattcagatgcttattgtgtgcttgcgagtaaagacgctaatacatcacctgatcgtgtatatttcaaggaaatttttaaggtttccatatctgatacatcaccagtaaataacacaaatatcaataataattatttttggctttcgcaaagacgggtgacagcagcagatttatctggtaaaagtggttatgaattagatattatgagaaacacaatatttgcagttcacggacgcaggtttaatactcctgagttacaagcatattttaatcagcaatcgtggtataatccccaatattcaccccaagaatttcctgttgatttgttatcaaaaatagaaattgaaaacgcagtatttattaatcaatatcaagaaaatcataaccgtagatacttcgcaacaacatctaattctcatccaaatcctacaggaaaaccattagaaactgaatctgtaattatcgatccagtaaataaagaaattcagccattatcagatggatactattatatagtggttgaaaatcagggtgatactactttaaattctgtacgtcaaatagttcctgacgcttatttatcaacaaacaaaaaatttatttatttgggtgctgtgaagactcaagaggaagcaaaacaaaggttacaaaaactagaaataaatggtattaaagcatatattcaacagcagtaaaaattaacaatatcaataggacttatactcttatcttactttgtccctttgcgcctttgcgcctttgcgtgagatttaaaaattcagaatcagatttttatttcaatgttgggtaattcctaaactccttgaaattctcgctcctgactcctgacttcaggaaacatcctatagttatatcgtcaaagtatctgatatacattgggaaggatctcgcgtctaacgtttcatgacaacaaaactgttaaacaaccgctatcaagttatccaggtactcggtgctggtgggtttggggaaacttccctcgcagaagacatccaccttccttcccgtcgtcgcttcgtcattaaagaactaaaacctattaaccacgatcctggaacttctcaactcattcaacaaagatttgagagagaagccgcgatattagaaaatctaggggaaaccagcgatcaaattcccaaactttacgcctattttcccgaaaatagcaaattttacttagtgcaagaatggattgaaggacaaaccctcagcaatattatccaatcaaaaggcaagttaaatgaaacagttgttagagaaattcttgtcagtttgctgtcagttttagattatgtccacagcaaaggtattattcatcgagatataaaaccagataatatcatccttcgctcccaggataataaaccagtgttaattgatttcggtgcagtgaaagaaactatccgtaccgtgatcaatccttcaagcaatcctgtacaatccatagttatcggtactcctggttatatgcctagtgagcaagcgatcggtcgtccagtttatgctactgatatttatagtttaggcttaactgccatttatttactcacaggtaaacacccccaagaattagaaactcacccgcaaacagggcaaatattgtggcaaaaatacgctgagggaatatccccagtaatggtacagatacttacacaagctattgaaccacgtcctggcgatcgctataccacagccagtaaaatgctctatgctttaaaatctggtcaaaataattataagaattacaaaccctcccattctcccaccaccagcgccacaaaaatccttaaccagccaactcaacccacatattcacccgcaaaaactccagttatcaaacaagtcaacaatcctaataactggcagaaacccgctatcatttttggtggtgtagcaattggtattgtaattggtttagtaacagcttctaaccgtcagccacaaccttcaacttcagcgtccaccaactccacagtaacaacagaagcacaaactccctctgttttacctacaaattccccggttttggaagtttcacccacaccagtaattacaccaactccccctattcaacctgaaatcatttctaatcccataccagaaagcaattcttctccagaaataacaccaccaccagcggataagcctgtaattgaaaatacttccattcctccagtcacatccacaccccaagcggaaatacaacaacagcaaccacagccagaagcagttccctcagcagaggtattatctgattctcggaaacagccagaacaaccgcctactcaaccagaagtattgcccaaatcagaggtattttcagatacccagaaaaagcccgaaaagaataaacctaagtcaacaggccaattaaatgccaccaatatcaggacaagtgtaccaacatttactacaggtacatccagaagcacggtagaagccgcattaggcaaacccagaagggatttaaggggattatggcctaatacccgtgcagttatctatgaagtagtacccgataaaatagacctgggttatttatttgaccgtgacactggtagactcagacaaacagaagtcggttttgcgggaactgtagatcatcaaatcatgcaaacaactttaaatggtttattagcaggaaaagcaaccgcagaaattcaacaaggactacaacaaattcaacaacgtcagacagacaattttaccttcaaaaaaggtggagttaaagggcaaataatcaggcaaaattgcgattcaatttatattagtgtttgggaagcagatttacatgattttgttgatcctgcaacggctaaacaatgttaaaccaatttaacaattacctctaaaatactctcaattttttgccagaattaggatgtccaggatttgaggatttacaggatgttacttgatgatggttggttatgtagggtttgctgaataaacctaaaaccttgatatatcaaaggttagaggctgataaacacagaaattagtgcaagggttttgaagggtataccggaaaaagtgtacattttttgggatttcaagagatggcaaagaaattttcaaatctcctcctgactcctgtacgggcgaagcattcggaaaataggcttggacaaaaattgataattagtcgccctaatgcttcgcccctaccacttctgactcctgactcctatgccctcacggaaagactttctcagcaacccctatgtagggtttgctgatagcgtagcgtggcgttagccagtgccagcttttatgaggtggcaactgaaaaaccttgcacttaattcctacttcaagaaaaaatcgttcctatccaactattgaaactgtcaccgtggcctagcacctgtcacctgtcactggtccttcacagataactttttcagcaaaccttaactatacgcaagcaataacattaataacagcctaataattttgacaaaatatagaataatttttaaccagttgttagggcaagctaaaagaatagctcaccctaaataatttacaattacaaattacttgatggttacagtaccaccagcttcagcaatgcgtttcttgatgtcttcagcagcttccttattaacaccttctttgacgggtttaggagcagcttccactaagtctttagcttcttttagacccaaaccagtgatttcacggacaatcttgagaactgcaattttcttgtcagcgggtacagattcgagaatagcatcaaattcggtcttctcttcaacagcttcagcaggagcagcagcaccaggagcagccatcatcatcatgccgccagcaggagcagcagcacttacaccaaaagcttcttcaatttgcttaactaattccgcagcttctaataaagtcaaagattttaactgttctaaaatttgatcggttgcagtagacattgatagaactcctaaagaattttgatttgttttttgtcagttgtcattagttattagatactggttttaactaacagcatttaactaatgaaaaattgttattcagcagcagcttcagcgccgtctttgtctttatcagagacagcttgaatagcacgagccaaagaacttggaacttcgttgatacccacagccaccttggtagccaaagcgttgatagctccagcaatttgcgccataagttgttccttagatggcaagtctcctaaggccttgacatccgcttctttcaacaagcgcccttccatgacaccgccacgaagttctgtcttcttggtggctttttggaattcctggtaggctttaattgctgataaatcatctttaactaacacaaaggctgaagaacctttgagcagttctgacattggtttccattgctcatcttcctgaatggcaatgcccataaaggtgtttttagtcaccttacaaacagcgccactaggacgtaaacgccgccttaagtctgtaatttcggcaactgttagaccttggtagtcaattacgagtgctaaagttgactcgtttaaagtccctttcaggtcagctactatttctttcttgttttctaacgttctacccatgcttatctcacctccaagggcaaaatcttaattagtgaacattggcaaaaggcaggagtcaggagtcaggagtcagaaggtcaatatttcttccccatctccccatgtcctcatcttcttatctccccagtcaccagtcaccagtcaccagtcaccagtcaccagtcaccagtcaccagtcaccagtcaccagtcaccagtcaccagtccccagtcaccagtcaccagtcaccagtcaccagtcactagtcaccagtcaccagtcaccagtcaccagtccccagtcaccagtccccaatcaccaatcaccaatcaccaattcccttgtaaaatatgacagttgtattatatgcccgaatgtgattgagcgttatactttgcccgaaatgggcaatttgtggaatgaaaactataagttacaaacctggctacaggtagaaattgctgtttgtgaagctcaagcagaactaggttatattcccaaagaagcggtagcggaaattaaagccaaggcgaattttgaccccaagcgggtgctagaaattgaggcagaagttcgccatgatgtgattgctttcttgacaaatgtcaatgaatatgttggtgatgctggacgttatattcacctcggtttaaccagttccgatgtactggatacggcattagcactacaattagttgctagtttggatatcttgttacaacgattagaagatttaattggggcaattcgcaacaaggccagagaacaccgttatactgtgatgattgggcgatcgcatggtattcacgctgaacctattacctttggttttaaattagctggttggttagcggaagtattgcgacatcaagaacgtttgcaagtcctgaaaaaaaatatcgctgtcggtaaaatatccggggcggtgggaacttatgccaatattgaacctcgtgtagaagcgatcgcttgtcaaaaacttggacttaaacccgataccgcttccactcaagttatttcccgtgatcttcatgccgactttgtgcaacaattagctttactggcggcatctatagaacgctttgccgtagaaattcgcaacttgcaaaaaaccgacgttttagaagttgaagaatacttctccaaaggtcaaaaaggctctagtgccatgcctcacaaacgcaaccccatccgctcagaaagactgacaggaatggcgcgactggtaagaagtcatgcaggagcagctttagaagacgtagctttatggcatgaacgagatatttctcacagttccgtcgaacgggtaattttaccagatgcttgcattttaacacactttatgctacatgagatcaccgacttggtgacaaatttgctggtatatccccagaacatggaacgcaaccttaactgctatggtggagtcgtctttagtcaaaaggttctcttaaccttagtagataaaggacttagccgggaagaagcttatagcatagttcagcaaaatgcccatactgcttggaataaaccagaaggtaatttccgtaatttgattagtaaagacccccgtgtaactgcaaacttgtcagcagcagaaatagatgcttgttttgatccacaaaaccatctgagacatttagatcaagtttatcaaagactgggaatttaaaatttaggagtcaggagtcaaaactagaagtgagaaactgttcccggatctacctgtggaaatatgaacttttcacatcttaattgcttctgactcctgtatttttgacaatttggtacaggttctgatccttcataacggaaaaatcgtcaatccaaaatcgattgactcctgaactcctaaccctcacgaaaagactttttcagcaaaccctacttacctgatacttgtatattaaaataacttgaatccataaaattactgatttagtaaagaatctgctaattgatgtgcaaaaattttcaatttaaattcctatatatctacccaaacatctgaactatagattacaactttgtatatagcaccaagttagtgaggtacagagttttttatctttgggaattgggaattgggaattgggaattgggaattgggaattgggaattgggaattggtaacagtaaataaattagggtgtacctcatgagactgggaaacgctatataaaacataaagacagtattgtaaaatattttatggatacactgattaacgtccgttttgcacaaaaaccattcccaaaaaaactaaacattcataactcttctttgctcatctacttatagaaggtatactcctatgattgaaatcctcgctacactctctgctggagcagcagcaggactaagattagctatacctttgttaattattggcttgttacaaggtagcaacctctggtctgagataccaattttatcacgtatttcaccttatgttttaatttttgtactaaccagttggtcactatttgaaatatttgcttccaaacagctacgaggacagagaatattacaactggtggagttatttttgtcccccatagtaggagcaattatggggttagcagtagcttcagctacagaattaccaagttggttaattgccttggtaggtggtttgttggctttggtacttcagttagtacagttaggctggttttatcgtttgcgcggtttaccattgtgggcagtttttttgcaagatagcttgtgtattgtactggtaatttttgccgtggatgctccccaacaaggaggattaatagctttaattctgctctggtttgcagttcgtagtgccgcacagtggtatcactggtattgggaaaatcgtaagaatagggaatagggactggtgactggtgactggggactggtgactggtgactggtgactggggactggtgactggtgactggtgactggtgactggggactggtgactggtgactggg

SEQ ID NO: 29 - DNA, 57080 bp, Sphaerospermopsis sp. LEGE 00249
  LEGE00249_44
cccagtccccagtccccagtccccagtccccagtcaccattacttcccatgttgcgctccactgtaccatttcaataacaccttcgctagttttcggggatcgtggcggacaaaaccagtttcatcttcgtgtaaaacgttagcggggactaagcgccgtcctaactgagtaactgcttctctgtctaggaaaacgggatgggaattttgttgggcgtaacggattaatgcttgggctgatggggttttgcgatgtacgagtacagcatcaaaaagttttctgtcaccagcagctttatcaatggcttggatatgttcagcaacggtatagccctctgtttctcccggttgggtcataatattgcaaatataaatgcggggaatttttgtagccgcgatcgcatcggctatttctggtactaataaattgggaattaagctagtatacaaactaccaggaccaataataatgtaatcagcatctttaattgccttaattgctgcgggtaaagcgggaggattttcgggaatacagccaattttaatgatttttccgccggctttgggaatactagactcaccttcaattctgcgcccatctgccatttctgcccacagacgtacatcactaagagttgctggtaaaacttgtcccctcaccgctaacaccttggaactagcagcaacagccctttctaagtccccagtaatatcagtcatggcagttaaaaacaaattaccaaaactgtgacctgttaagccatctccagcgcgaaaacgatattggaataattcggttaataacttttcttcatctgctagtgcagctaaacaattgcgaatatccccaggaggtaaaacaccaaattcctgccgcaacctgccagaagaaccaccatcatcagcgactgtgacaatagcagtaatattagcactataggtttttaagccccggagtaaagtagaaagtccagtaccgccaccaataactacaatttttggaccccggtataaacgacgatgtgccaatagaacatctatcagttcttcttcatcaccttgaggtcttaaaacctctgtaattgaacctacagtacgggattgtccccacaataacaacagcacacccagcagcaacaccaaaggtccgctgacatagttgggtaagatgttggtgaggaaacccaacaaacctttaagaaattccaatgtccaaaaaattggggttagcttaatccaaatagctaaccccaaacttgccaataagaaacctcctacactgactagaaaccagcgttttaccgatattccaggggataaccacttaaaccactggttaacgcggtgggaagtgcggctgtgtgactgaagttgtatggcgttgagggcttgtttaagaaaaccgattgacatacctaatagggaactgtggtaaaaacaatatttaaaagcaaatgtacactaacagggactggtgactggtgactggtgactggtgactggtgactggggagtggtgactggtgactggggactggtgactggggactggtgactggggactggtgactggggactggtgactggtgactggtgactggtgactggtgactggtgactggtgaaaaatatttacctcctgccttctgccttctgccttctgccttctgccttctgccttctgcctcctgcctcctgccttctgcctcctgccttctgccttctgccttctgactcctgactcctgactcctgcctcctgactcctgactcctgactcctgactcctgacttctgaaagtgcttatttcttcatgattggcgatcgctaaccggaaagtgcagattaagtatagtaggagtcgggtgttacaaatcgagaatcatagttaatttgatggaaatttagagaaaattagccaaaattttatggaaaaacgaattttaggattagatccaggtttagctattgtgggatttggtgcaattacgttacagcaaactcaaggtaaagtacaagacttttctgtaaagatgctagattttggtgtaattcgcacgtcttcagatatggaaatgagtcagcgactagctactttatttgatgatttaaacaccctaatggacgatttgcaaccggatttagtggcaattgaaaaattattcttctatcgtatggccaacactattttagtggcacaggctaggggtgtattaatgttggttttggggcagcgcaaacttccttatgtagagtttgcccctccgcaaattaagcaagcgttaacaaattatggtaaagcagataaggaagaagtccaggaagcggtgatgcgggagttagatttagaggaaatgcctaagcctgatgatgcagcagatgctttggcggtggctttgactgctgcgtttcagttgtaatcatttccgtttaattaattagcatatctgttaggacagggaatagggaacagggaacaggggaaggaaaaaaattcttttcagtaattagctgaagatgatatcaatagcgataaaatttacagtgattgataaatagtaataaccatagataaaaccacatgaattactggctatttcaaggaaaccctaaatattacaaagttatagaagctataaaagactttgagcaaatgccctggttagtgactcgctacgctaaagatatcgctatcggtgatggtgtgatcatttgggtatctggtacacaagcgggaatttatgccatagcagaaataactgaatctgccaaatttatcaccgaaataccagataaaaaatattggtctgattctacccgtgctttaggtaaacaacaagcaatagttcgcttcacaaataaactcatagaacgtcctttgttaaaaacaagtttacagcaagatcccatacttaaaaatctgctggtaattcgcgctcctaactccactaattttaaagtcacttccgaagaatggttaagagtgcaagaattaatttaataattcaggagtcaggagtcaggagtcagaatattggtatgaattatcaagtgaaaaacccaaaattacccacccaaacactagccgctaaaatcttccactctattaatatcatgagcttgtttttaatgattaccagtggattgcaaatttataatgctaaccccgtttttggtggccgtgcaggtttacatattccccctatcttcacattaggtgcttggttagcaggaggtagacactggcattttgcagctatgtggcttttttcactcaatcttttattttatggaatttacattttaattacccgacgttggcaacatagatttgtcggcagtaatgacatcaaagcattacaaaaaacgcaaaatcctaagcgtttaacttatgcttggcatcggattatttacacatctattattcctgtattgttgttagcaatattaacaggaatcggaatgtataaacctgcccaatttccctggatagttgatatgtttggagattggcaagcattaagaatcgtacattttgcttctgtgccattggtggtaatatttgtaattattcattggcgattaggacagaaagcgggaggtgataaattaattgagtctatgttttggtaattttggaattaataatttaacgcagataaacgcagataaacacgggagcatcccaattttgaaaaaatcaccctagcaacattaaaaaatctcttaaaatctcttacctttgtgtcctttgcgccctttgcggttcaatcatatcagaaccttggagcgttttatttcgttagttcaacataaatttacacatttgggatactcccgatgaacacagatagttttttaattaggggaagttattaaatcatgaatcatactcataaaaaacacctaattcatatagtgaaacctcgatttaaccgccgtaagtttttacaaatatctggaatttccagcataggtggtttacttagtggttgtggtacaccagcattagaagacttggtaggtaaactttcagaacccttaaatcaaaaagttgaagaattaatatttcaaccccagaaacttgtaccagaatttgcagctagtgaaattcaaccagcagctttaatcattaatagtttccggggtataccaattattgatgttgataaattccggttaattattgatggtgaagtaaataatcccctgagtttaagtatggcagaaattcaaaatttacctttaacttctatgattattcgtcatgtttgtgttgaaggttgggcagcaattgtacaatggggaggtattcgtttacgtgatttaatcgctttagctcaaccccaagaaaatgtgaagtatgcttattttaaatcagcagatggttattatgaaagttgggatttagcttctgctactcatccccaaactttgttagcatatcaaaaaaatggggaaaagttgcctgtggaaaatggtgcgcctttacgtttatcttctcctattaaattaggttataaacaaagtaaatgggtaacgagaattactttaactagccagttatcagcttttaaaggttattgggaagatcagggttatgaatggtttgcggggttgtgaacacatattaagttgagaaagattattaggtgtaaaagataatcctttacaccctgtaaaaatttaagatttttgaatttcttgttgtaaagtttgcacttcctcaacagataattctgtgacttcagcaatttgttctaaactcattattcccattcttaacaagtttaaagctaactttctggttgtttccgttttaccttcggctttaccttcggctttaccttcggctttaccttcttctaggatttcttgataaatgactgattcgcgcataatctcactcctgaatattttcctaattacatctttgtttaacactagaccagctaaaacgctactagcagcagctatatttctttgtaacctttgttctgtgattctttctactgcttgtgctacttgtgttaataccattgtaggatcatttgtctgactcagcgccgcgaaggggaataaaccgggaactgtcaaaaattgctctgtcggttgttcccataagcggataacctcaaattgatggtaggtgttttctaatttgaaattgttttcatagactaattctgaccctgtttttcgcaaatagatgactatttgacgcatttttttatgaggaaaccgacgatgtcccttaattcgataatctaacatccgaaaaggtatatctttatctgtgtcggtttgaaattcgatatgtagaactaattcatctgattgtaataaaattaatgaatcagcgcgaattggttcgtttgataattctgtggggctaagttctgttaatttaactggtgaacctagtaaccatgttgctaagtcgtctttgaagttttcggctaagaatttgcagatgttgtcatacatgagaatttaaaacaattcgattagcgatatttttcctatttactttgacaacccaggggaaacgcatctaaattttattgacaaaacaccatttttatgtataaacgaaggaatccttatttatcgtttgattgattttttcagagtcatcgtgatggtttaaattattgtcaataagtagacgttaatgcgaatttttaggtcattattgagattaaattgtccttattgataagatgcgtttcccctgtgtgacaacctaattctatgtcatcttgattaggtaatcttgggtttctttgtgtcaatctaacctacagatgctatactactataatacaatttcatttaaagacctgaatatgaaagaagctcaacatattgctactggaagaatggttaaagcgtctgaagtagattatccagaatactacggaaattttcagtgtccaaattgtcaaatgccattgtatctaagaaaatatactgatgccaaaggcacaacaatagctgcatttattattttccacttatctagaacgttgattcagtaatgctaggcaatctgtttttaccttgtaggggcgaagcattcgggtgataacctatcgctgaaaccagttcatattctgtccgaatgcttcgcccttacgattaatgaatcggtgttctagttgggtaaaactggattgataatcagataaaataaagaaataaacccctaaaaactttaacatgaactttttcgacaagttaaatacagcaatctcccaaaatcaaagtttactatttgtgggacttgatccaaatcctgagatgattccagttcgttatcaatcatctgatttgatcacgggtttggaaaattggttgcaatttatgattgcggaaacggctgattttgtttgtgcttataaaccaactttgggtttttatcaggttttgggtgtgccgggtttagagttattaatgagaactttaaaatctattcctagtcacattcctattattttagatgctaaacatagtgatttaaacactagcagtgttttcgcccattcaatatttacagaatggcaggtagacgcggttactcttagtccctatactggtcaggatcatgttgcaccttttttagtttatcctgataaatttgtatttattttatgttgtacttctaacccaggtgcagcaaatttacagcaatatcctaataataattctcctctttatttgcaagttgttcaggaatccaaaacctggggaactcctgaacaattaggtttagaagtaggaactacaaatgcagaagttttaaaatctattcgttctcttgctcccgaaagaattattatggcacggagtatttgggctggggaaggtaatattaaacaaattttggcagcaggtttaaatgctaacggtgatggtttgttaatacctgtttctcaagatatgttaggaagtgcaaatctatctgaagaaattcaatttttacgcagagagattaatgaatttagaggtgaatttatccatgatgcttctagttgtgaagtttggttttctgatgttgatgtgcaagataaacatcctcatcaagatttgattttacaactttttgatattggttgtattatgtttggggaatttgtgcaagcttcaggggcgacttttccttattacattgatttacggaaaataatttctaatccccaagtttttaatcaggtgcttagtgcttatgaggagattttaaaaaatctaacttttgataggttggctggtattccttatggttctttacctactgcaactggtttatctttaaggttggattgtccgatgatttttccccgtaaagaagtgaaagcacatggtacgcgcagagtaattgaaggtaacttccatcctggcgaaacggttgcagtggttgatgatattctcatcagtggcaaaagtgtgatggaaggagcagaaaagattcaatctgtgggattaaaggttaatgatattgtggtttttattgatcatgaaaagggtgtaaaagataggttaaaagcaaatggttattgtggtcattcggttttaactatttcggaaattgtgactactctacacgaagtaggcagaataaatgatgaacaattgttagcttttagggaaagttagttggtaaggagtcaggagtcaggagtcaggagtgatcatattccataaaagttggggatcttattctctactccctagctatatccttatatctgtgaaaagaagaacttatagattatttttgaagatttttggaaaaatagtagtgattgatacatacaatcaaaaaaacgatggttaacattaaaaaaatcttgtactggaagaaaacattttgagaacaacctttttgttctgtgtttgtcttctcatatcgcggaaaaccgcatataggagtctatcttcttcagaaatttacctgagtttaataatatcaaattcctctagtctaaccttttagactcataatttctctcacaaaaatgaggcaggtattaacacaatcctgtcttaatgcaacataagctaaacgcaaaggagtttaccatgcaacgacaaatgtgctggttatctaagtctggtgatgatggtgaaaaaatcttacatttgcagacttctcctggtcaaccttggcggccttatacggcgtttcctcaattttctgttcctgattatcaaatacccggtggttctaagggttgggcaacttatcaaaaactgctgaaagcgggctggagtttaattcctagcgcacgggcaaatgagtttagtaatgatttggcaaagtcaatagtcaataattaacataattagtaattactaattgataattcataattaaaagatgggtagaaattccatcaaaaatgcggcgtttttatagccaaatttagttatgccaaaaactaaaatataaaaacgcaattatgaattatcaattatgaattattaattagacatctccacaatagaatgtattaatttgtcataagttgtaggggcgaagcatttgggcgataatttaacggaaaaatcagacatctagatatcccaaatgcttcgccctgcccccataaataagttccataatttcttttctggagatgtctattgttaataacctttagctgcaccttctccacggggatctgcggctgcttctaaggtatcattttctgttacagaaattgcatttgcattaccccaaggtgcagtttctttgattttgtgtccccgacgacgtaagtcttgcaaggttaacgcatctaaaccccatgtttccactcgtaactcatcgggtagccactggtgatgtatgcgtggcacggatacgactgcacctacatccattttgtattccaaaacgttgagtattatttgcaatacttgggtgatgatggtgctacccccaggagaacccacaactaaacgcaagcggttgttttcggtgacgatggtgggtgtcatactagaaaggggtgttttccggggggcgatgctgttagcttcgttaccaactaacccaaaggcgtttggtactcctggtgcagctgcaaaatcatccatttcattatttaacactattcctgttcctggtgtgactattcctgcaccaaaacctaagttaatggtgaaggttaaactgacggcgtttctctctgcgtcaactacgtttaaatggctggtttctgttttttcaggaatttttgttgttttcagtccaggttttatttctgttgatggtgtcgctttattcatgttaatttgttggcgacgtttttgggcgtaatttttgctaattagttcagaaacggggacttgcacaaaatcaggatcgcctaaatatttggcgcgatcactataggcaattttcatactttctaccattaaatggatcgcgtctgggtgattccatcctaatgattttaagtctgtgtcaccaataatatttaacatttgtaataaatgtacaccacctgatgatggaggtggcatagaacaaactcttgcttttcggaagttgccacaaacaggatcgtgccaaattggttgatattgttttaaatcttccagagtaattaaaccgccattttttgccatatcatcaacgataagtttggcaatttttccagtgtaaaaactttgaggattttcagaaatttctgttaaagtttttgctaaatcactttgaattaatctttcccctggttgataatattcaccgttgcgactgaagattttactggctgctgggttgttgagaattttaggtttacggtcttgaaaacgggagagagaaagccaagaaactctattactgataataaaaccatttttagccagtgcaattgatggtttaacaacttcttgccaaggtaacttgccataacgacgatgtacttcatacatacccgctacagttccgggagttgctactgctaaataaccgttggtacttgcaccgggaattactttaccatcagcatctaaatacatattttttgttgctttgatgggtgcgcgttcccgaaaatctaaagctttaatttctccggttttttgagaatgaaatagtaaaaaaccaccgccaccaatacctgcggaaaatggttcaactacagaaattgcaaaggttgtcgctactgctgcatctaccgcatttccgcctttttttaatattgaaagtccaacttcacttgctaaggggttggcggatgtcaccattgcagttttgctttttacaggtacgttgatggtagctgatactgcttgggtggtgaggatagcagtcagggagatgaaagagatgatgaggttttgggttttggttatggtgggcatttttatgatgggttaagtagtgacaaaaacataaatttataaagatttattaaaaattcagcattattttgaacagagatgttttaagtatgatgtaattattacattgaaaaagaataaaaatcagtcaaatgctaaaataatattgatttatggttattggcaagagttaaattatgaactcatttgaacgtataactattgaaggataccgtcgcttatttaatgtacaactagatatgcgagatcgtcctcttacagtcatgattggtgctaatggtgcaggtaaaacttctttattagaaattttttcacttttagcagcatcagcaaatgctcaattagcaaataaaatttcagaattaggtggactacctgatattgttactcgtgatagagctaatagtataaccatttctttgtccatgagtgtaccagggtatgcaccacttaattaccaactggaagttgctctaaaaggtttcacttatgaaattgcaatagaaacactaactcaacaaaataaccctcatgctgtagagccattccaatatattgaatctcgtggattggatgtaaaatattttaatacggaagacagagcattattacgcccaaattgggatcataatcccttagaaacatctcttgctcaagttcccaaaatgtataaagcaccggaaacgctgcgtaaagaattagcatcatgcacattttacgatgcattgaatgttgctcctaaaagtcctgtgcgtttaccacagtcaatgcgtcctgcaactttgccgggtgctaatggtgaagatttagtttcctgtctgtactatttacgagaaactgacccagaacgatttgaaattattgaagatacccttgctgcggcttttccagattttgaaagattaggttttcctccagtagcagcaggaactattacaatgacttggaaagataaaaatttttctaagcctctttatatgcaccaactgtcagagggaactttgcggtttatttggttaatcacattgttgttaagtcctggtttaactgctgtcactctgatcgatgaaccagaagttagtttacacccagaattattaagattacttgctgatgtgatgcgagaagcttcacaaaaaactcagctaattgttgccactcattccgatagattaattagatttttgaaacctgaagaagtgttagtttgtgatgcagaagatggtttaactactatgacttggggtgatacttttaatttagaacattggttagaagattatagtttagatgaactttgggcgatgaatttaataggtggtcgtccatgaaaatagcgattttagttgagggtgcaacagaaacagcttttaagccagttttattagattttctcaaatcacgtttacagcaaatgcccaaactcaagtttattccccatgatggacgcattcctaaaggagataaactaagacgaattgttgaaaatttattgataggtaaagatgcttttaatgcggtaattgctttaactgatgtttatacaggaacaaatgattttcaagatggggaagatgctaaagcgaaaatgcaagaatgggtagggaataatgctaatttttatccccatgtagcacagcatgactttgaagcttggttattaccttattggtcaacaattcagaaattggcaaaatctaataagtcagcaccaacaggtttaccagaaaaggtaaatcatggaaatccaccatcttatagaattaaagaagtatttgaaactggtaaatgtcaacgcagttatagtaagattcgtgatggtgcgagaattttgaaagatcaagatttgatggtttctgtgaatcaatgtcctgaattaaaggcatttatcaatactattattgaattaagtaagggtgatgtacttccatgaattaggaaaatatgatattaattaagccttatctgttagcttccatatccgcccggaaattgatttccttgcaggacttttaaattttcccctatttcctggtataataccaactaagttggagctatacaaattatgccacaggacttatcacccctctggatatcgctgaaaacctcatttttagcgacttttatcaccttctttttcggtcttggtgctgcttactggatgttgggatatcggggtaaagggaaatctataattgaagggatattcgttgcaccgctaattttaccgcctacggttgtgggttttttgttgttactattttttggtaaaaatggtcctgctggtaaattattagaaccttttaatgtgactattgtatttacttggtatggtgcggcgatcgctgcaatggtagtttctttcccattaatgtataaaactgctttgggtgcttttgcacaaattgatactaatttattaagagtagcgagaactttaggcgctaaggaatttacaatattttggcgggtaagtttacctttagcttttcctggtattttagcaggtgcaactttagcttttgcccgtgctttgggtgagtttggtgcaactttgatgttagctggtaacattcctggacaaacgcagaatataccaatggcgatatattttgctgtggaagctggggatatgaatgaagcttggttttgggcaattattattgtttcaatttccttaacaggaattattttaactaacttttggcaagaacgcaagcagaaaattagacgcactaataaagctgaaattcaaataataaaatcagaaaatcaatccttttctttacctcctaattctttgacatctggtttattgatagatattgaaaaaaaactctcaagttttcatctgaaaattgcctttaatacggataaccaacctttaggtttattaggaagttctggcgcaggtaaaagtatgattctccggtgtttagctggaatagaaacaccaactaaaggcagaatcgtattaaatgatagagttttatttgattcagaaaaaggaattaatgttcctgttcgtcaacgcaaaatcggttttttatttcaaaattatgccttattccctcatctcacagtagcgcaaaatatcgcctttggtttacctaaagaattatcaaatgggaatattaaattagaggtagaaaagcaattaatagccatgcacttagagggtttaggtaatcgttatcctcaccaactttcaggaggacaacaacaacgggtagctttagcgagagcgttagcaagtcaaccagaagctttacttttagatgagccattttctgccctggatacacatttacgcagtcagttagaacaacaaatgacagaaactttagctgattattctggtgtgactttatttgttactcataacatggaagaagcctataggttgtgtcctaatttgttagttttagaagacggaaaagaagcacatcatggttctaaatatgaaattttccaacatcctgctactatgaatgtggcaaaaattacaggatgtaaaaatttttctggcgctgttgttttgtcatcccaaaaagtagaagccattgattggggttgtactttagaagttgtagaatctattcctgaaaatttatctcatattggtattcgcgcccatcaaattgtgtttaagaatgatgcaaatctggaaaatacttttccttgttggttggtgagaactagcgaaacaccccaccgcatgactttatttttaaagttgcattctccagcggaaaatgttcatgattatcatctacaagcagaagtttataaggaaaaatgggtgacaattaaagatcaaccttttccttggtatgtacatttagatcctgtaaggttgatgttaatggaatagtcaggaggcattctatttactgtcacctgtcacctgtcacctgtcacctgtcacctgtcacctgtcacctgtcacctatttcaacaacaaataaaatagttgtccattgctgactgtcacaccagcgcgatcgccagcaatatctcctgttcccaagtaataatctactctacctggtcctttaattgcaccacctgtatcttgatctaatacaaaacggctaactgtccgattttccaattctccgttattattaacaaaaggaaaaggtgcgcgaattaaagctaaagcaccaggaggcattaaagatttatcggtagctatagaacgttctggagtcagaggtacaccaacagaaccatgtgccgatctcccataggtttctctgaaaaagacaaagctattatttctgggtaaataaacatttaaatcttggggatttttttggaaatactcaaaaattgtgggcatggttacgccattttcaggtaattttccagcctctactaatgtccgccccaaacttttataattatgggctgtattcccagcatatcctatacttgtttctgttccatctgttaattttaaccgtgcagaaccttgaatttgaataatataaggttcaaatctatctctaaaccaaaataattctaaaccttttaatttactttgagaaccttgtaaaccatctgcaccttctaattctaatcgagtgggatgaggtctagtccaagattttaaatcaggtggtaagcggtaaacaggatatttaaattctttggttggtttgcgactagctaaatataatggttcataataggcagtaaataatacagtaccttgactatctctgcctatagattgataataaacaaactctttttcaatagctgtttgtaattcttgaggcgaattagttgataatactaattctctgaatctttgcaaactacgataaacacgatttctggtaattccagaaattttatatctttgataagtagccgcagcccgccgagttcttaaatattttaaactctgatcaatagattttattaatgcttttttatccgctatttcttcttgtttaccaccataaatccttgcatctaaacaagaatcatcattttcacaacaaccaaccggtaatctttgtacaagtacaggtaaatttttagtattttcagtttttaaagctgttggtttcaactctgtgggtaaattccacttagttacttgacattcgggaggaattgtgtatcgatttttaatcgctggcatttccaggaaaaaaatcgtgaaaaaaaacggtaagctaaaagttgtattaaatatctttttcatggaattaatttattctcttttattctgattggaagattttcacaattattctgactcctgtacgggcgaagtaggggcgaagtaggggcgaagcattcggaaaatagcctggtcataaaattgataatttgttgcccgaatgcttcgcccttacaggaaaatagcctggtcataaaattgataatttgttgcccgaatgcttcgcccctacaactcctgactcctgaaatttactcattcatattatggtaagtagcaacagcggaaggagaaatgcgattcaaataacggaaaatccaatatttgaaaattgtatctaaaatcacgggaaatgtcgcaatgaataagaaaataaaatccctatttgctggtaaaccccagtgtcgcgataaaccttccagaattacttcccaaccgtggggagagtggaagccgacaaagacatcagtaaataatataataataaatgctttggcgctatcactcaagccatatactacatgatcaaagaaatctttgagaactgaaatagaagattggctgatcagcaacaaccagacaaaagcaactacagaaaaaacatctgcaaacacatttttaatcgcattagcactttcacgccgaaattcctctgctacctcctgtgctttttcttgcattttaatttctagcacttccgatgatagcggtggtgcatcactaatcaaattttcaaacttgattctttcttcaaatctttgcagttctattagtgcttcttcttccatttcttcattgagaaaaatctgttctgtttctgaacctctaaaacgatcaactacaggacctactaccacagccttagctatttgatgggtgagaagtggcacaataattaatagtaaaataaatctcacagagataattgtgattttttgcgtctgccgaaaattctgcactacttcttgttctgaactgggatctaattccgcttgcaaacgagtaatagttgttagaattgaacgcggtaaaactcctgtagaatcagcttttcttttgggtttattattgttgtttttaattacggattttggtgtgattggttgattacttactttattttctgctacaattatagatgaatttactaaattttctgaattgttttctagaacatcatttacagcgtcatttgtatatttaccaatgacttgatcaatgaattctaacttttttaaaactaaagccgcattggaatattctatacctgctttggctgctgctttttgcttagattcattggaaaaccaacgactggctttaaactctgtcagccgcatccgtacattttttaataatttttgtaaatctgcttgaaaataatccatgacactactactgtacatagcagcatcactgctaattttattaccattaaaatgatgatcttctatttctttaatttttaaagctgattgataagcttcctctaaggagcgttctggtgtcagtaaataccatctgtaagcagccaggaaaaaagagtatattttttcactaaacacagggtttttcatcctcaatgctcatttaaaactgtttggtgattcctaaatttaagttaacgcagaagttataatcaggagtagattagtggtttcaaattctttttggattgttggtactagccgcagcggaaaaactactcgtttagcccaacagttttgtgattgggtgcaacaaaatgacaatcaagatataggatcattttatcagaaaaatcaaaatcggaaacaagctaaaagtgcaattaaaaccgcaaatcttttgcaaacagaacccggtgctttagttttagcatctaatgatgataatcgccgattattaactgataaaattgtcactttaacttcaggaaaataccctattcgagcaaaaacaaccttgggttttattcaagatgaagtgattttattttggccgttattggtggaatctttacaaataaaagcacaatttccggtaagattgcgcccagaaacagagcaagaattagcaacaaagcgttggaattatcaattagatgcagaaactttgcgacgtgcaggagtgaatgaatatcgcttagtgaggcggatattagacttatggcaactagcagcttatagtggtacagcttgtgaagatattgctaaagttttacaaacaggtttacaagaaaatactaataatctagaaccagaatttttcacatctttgctgttagattggcggaattggtgtttaaaaagaggattattaacttatggtttaattaccgaactttatcaccaacatttattaactaatagcgattatcaacaacatttaaaaaaacgttatcagatgataatagctgatgatgtagatgattatccagccatagcttatcacttatttgagtttttattagatgcgggtgcggtgggagcatttagttatagtcttaatgggggagtgcgttggggtttaggtgcggatcctgaatatttaaacaggttagcaaaacgttgtcgggtagaaaagttagtgagttttcctgaagctaatttagctgaaaccttggttcaaccgatgatagaattagtcactgaaccgatgacaattttaagtttaccaaagtcggtaaaatgtattcaaactgcttctcgcgctcaacttttgcgacaaataacagatgtgataattaatggaattaaaacgggaaaagtagaaccggaagaaatagcaattatcgctcctgggttagatgcgatcgctcgttatagtctcatagaaatattaaccaagcaaaatattcaggtagaagctctcaatgaacaacgtcctttaattagttcacccgctgtcagagcattactcaccttacttactttagtttatcccaatttaggaagattagtagatcgggatgaagtggcagaaatgttagttgttttaagtcacagtcacaccaatgatgggaaagatggagaaaaaaaagaatttccacaaccaaaaattgatccagtgcgtgctggtttaatagcagatcattgttttgtaccccatccagaaaatccccatttattaaatattaaaacctttgaacgttgggatagaatcggctatactgcaaccacagcttataatgaaatattgggatggattgaaaaacagaaaacaaaagttcaagaaaatgtaatttacacaccagttaatcttttatatcaagcaatgcaagactttttgtgtaaagataattatacaccatttccaacattagcagcattacgagaattattagaaactgctcaacattattgggaaatagacaccaggttaaaacaaacaattaccaattcaataatacaaaataataccattgccgaatttattcaactattgcgacgtggtacaattactgctaatccctaccccattcgtcctataggaaaagccaaaaaagccattaccttagctaccattttccaatatcgtgctagtcatagagatcacaaatggcatttttggctagatgcgggttcacctctttgggctaaaggtggtgcagctactttatttggtgctactttatttttacaagataggttaggaaaaccttggacagcagcagatgaacaagcagcagaaacgcaaagattacgtcgcattattgcagatttactagcgcgtgtttcccaaagagtttatttatgtcacagtgatttagctgtcaatggacaagaacaaatgggtccattattacctttagttcatgcttgtgatgtaatagaaaatgaacgcagatgaaattagatgaatgaatggatttgatgattttgtgtaacttcgcaacaagttggttttagaggtttaatcataattattatctatatttccagcaatcaccaaaatccttacaatataaaggtaaagccatcatacataaaatacatcaaaaacaatgggattattcggatttggtaaaaaagtggcaatgcccacacctacacaagcactgccaggacgcacagaaaaaatgcccgtacctgcaacacactttgtcaacaaaaaccccttaaaacctccgtttcctgaaggtatggaaactgcgatgtttggtttagggtgtttttggggtgcagaacgcaagttttggcaacaaaacggagtttatactactgcggtaggttatgctgctggttacacacccaaccccacctacagggaagtttgcactggtatgaccggtcacaatgaagtggtgtttgtggtgtttgatcccaaagttattagttattcccaactgttaaaagtcttttgggaaagtcatgatcccacccaagggatgcgtcaaggtaatgatgtcggtactcaataccgttctggtatttatgtctattccccagaacaaaaacaactagcggaagcttccaaggatgcttatgaacaagcgttagtaaaagcaggttatggcaaaattaccacagaaattttagatgcacctgagttttattatgctgaagattaccatcaacagtatttagctaaaaatcccggtggttattgcggtttaggtggtactaatgttgcttgtcctgtgggtgtgtttgaaacttcagtgagttagaagcttaggtgacaggtgacaggtgacaggtgacagtaagaaggcaagaggcaggagacaaaaggcaagagaaagaagaatgaaagaatcaagaagtaatttttcttctcctgcttctcctgcttgccctgttcccactgcttcttgctccttgcccctcacaggggtaggtttttaatatacagcagttttcatgtctttagaccacagtaagggcgaagcattcggatgatagtcttaggtaaaaaccgataattaattgtccgaatgcttcgcccctacattgttgacgcgaaacctagcctacttacttaaccaattacccattatcaattaccaattatcaattatcctgttcttcccgctaaattagcaaccaccgctgctaattctccaggattcactggtttaggaatatgtaattgaaaacctgctaataaagcttgagtccggtcttctgatctagcataagctgttaatgctactgcgggaattttacctccttcattactaggaagacttctgactttacgaattaatgtatagccatcttcttcgggcattccaatatcactaattaatatatctggatggaattgtgataaagctgtcattgcttcttgagtagaggcaacagcagtcacttgagcgccatattgtcctaaaattgtagttagtaaattccttgtatctgcttcatcatccactaccaaaactcgcacattttccaagattgataattggtaattcacagattcgctatttgtgagaaatggttgtgatttgggtgtatcatcttcattaatcacggctttcattggtaaattgacaatgaaagttgcaccttgttctagtcctggactggtagcgaaaactgtacctccgtgcagttctactaaatgccggactatagctaatcctaatcctaatccaccatgcgatcgcgtagttgaactatcagcttgacaaaaacgctcaaatacatgaggtagaaattcggtagcaattcccgcaccattatcactgacttgaatctgcacacgggacttaatgcgctgtatttttacctccacttttccccccttgggtgtaaattttacagcattggaaagcaaattccaaactatttgttgcaagcggttagcatcacctatcaccactcctacggctggatcaaattccgactcaatgcaaatatgtttagcatccgcagcaggacgcactgtgtctattgctgcttctattactggtacgatttccactgaggacatatttagacgcagtttaccacgaataatccgagaaacatctaatacatcttcaattaactgagctaaagaccgactattgcgatcaattgtttccaatgctctagcagtggtagcttcatcaaatttacggcttctgagcaactgtgtccatcctaacatggcattgaggggggtgcggagttcgtgggatagtgtggctaaaaattcatctttgatgcggttagctgcttctgcttcagttcttgctgctttttctcgcgctagtatttgttctcgttcttgttctgcttgcttacgttctgtaatatcaatcataaacccatgtatctgttttgctccatctttactccgcaccacattcacaatgtcatataaccaaaccactctgccatctgcggctaacattctatattcaaattcgtaattttcctcggtttgtgaactcatcaggcaatacttaactgcccactctttgtcttcaggatggatatgttcttcccaaaaattatcactgtaacaatcagttaatgaataaccgagtatttcttctgtttgcagaccaatgtatgtaaaatttccagttttaggatctgcttcccaaggaatgacgcgcactttttctgttaatttgcggaatttttcttcgctttgtttgagagcattttcagcttgcttttgttctgtaatatctctaatgagggcaacaaatccttctacttttccttgctgattgaattggggaatataagtaacgctggtatcatgaattttaccattttgatgcaagagtttcgtttcataagtgacttgatttccagataatactgtttttacataaggaacaattttttgataaactgactctcctaagatttcttttatgtgttttccataaatttcagcaataggtataccaaaccattcttcatatctttgattattaaagcgataacgctgttgagcatctacataggaaatctgtactggtaaagaatcggtaatcaagcgcagtttttcttcctgttttctcagggaatcttctgcttttttgcgcttgctcacatcgacaacaaaaccaattacttgatctgaattatcttctaataaagctaaaccaagtaaaacattaaccagactaccatctttgcggatatattgtttttcaaaaggttgacaaactccttggtctatcagttccactattgagcgatcgcttttttccagatattctggaggtgtcatttttcggcagtttattcttcctgctagtagttcttctcgtgtataacctaccatgtttaaaaaagcatcattcgcttctaaaatgccgccttttatatcagttatgatcactccaatgatgttggcatcttttaacctgcgaaatctcgcttcacttgctgctaggtgtttaaaacttatttctaatttctgcttagaagtacgtaattctgagtttagccaactgataaacattgtcactagcgtaaacaatcctaacttaatgatactgtctggactctcaacagaaaatgaaaattggggattgataaaaaagtatttaacaagtagagccgacaaaacagtagctaataatccaggcttaatgccaccataccaggtactcactgctatagccgcaaaaaatatcagaaagatagagcgatctaaaaatggctctaacagtaatgttagtactaaggcgataccaacacataaaatggacacagaatagtttgatagaagagaaatttttcctttcaatttagcatctcctctggtgctgcaagctacttgcagtcatgaaatttgtgagcgaaaaaaatatagatccagacctattatgcaacaggacaatacaaagcttacatttctggaataggaatctacctaaagtagtaaaaatcaatgcaaacaaaccttttctagtatagtatactttctctgatttaaattatattgttagcggtgctgatagcaacagaaattattgatttaggacttacgtaagatgtgactgaaaaccttattcttgcgtaggggtaattcatgaattacccctactttcgttcccttttgcgtaagtcctgtgatgattaaattttgctcccagacggatacgaaatgattgattttgttcttcgttaaacttagctacagcctgttgcatatctaaagccatatttgctatggacataggatgatcactgcgataattaggtaatccagcaactgtcatgtaagcatcaccaatagttttgatttttttgactccatgcagttcagctaattcatcaaataagcagaatatttcgttaataaataaatgctattttctacatacaaatataaaggatgcttaaatttaaatttattcagcaagccctacttaaagaaaaaattgttcctatccaactcttgaaactgtcaccgtggcgtagcacctgtcacctgtcactggtccttcacagataactttttcagcaaaccctatttgcaagtccgatatttcggaagttaacagcgcctctagttggtttataccaaaatttcttttgggaatcatgcactttttgggttatgagtaattaaagatgaatgagttgggagaaaacctaacatgggtcgcaaccccactttaacttttgatcgtggtacgttaattttacatcctcctccacgctgcaaagcttggatagattttgctacctgggatgatagaattgaaaaattccgcattcccgcgattagataccgttgtttagtcgaagcactgcaagcagaagatactttttttattgatgaggctaaggaattttctgctttggagttagtccctagtttagaaatgactccctatccccaccaaaatgaggctttagcggcttggaagttggcaggtagacagggtgtggtggtgctacccacggcagcgggtaagacttatttggcacaaatggccatggaagcaacaccccgcactactttaattgttgttccaactttggatttaatgcaccagtggtatgcacacctaaaagcggcttttcctgatatggagttaggtttgttgggtggtggttcacgggataaaacacctattttagtggcaacttatgatagtgcggctattcatgcggaaagtttgggtaataaatatgcgctgattatttttgatgaatgtcatcatttacccacagattttaatcgagtgattgcggaatatgcgatcgcaccttatcgtttaggactttctgctacaccagaacgcaccgatggcaaacacgctgatttaaatattctcatcggtagagaagtttatcggcaacgtgctgaagatttggcaggtaaggctttagcagaacatcaagttatacagataaaagtcaaattatctcaacttgaaagagaaaaatataatcagttaattcaaactcggaatgattttttaaagcaatctcgcatttctttgggcagtttgcaaggttggcaaacttttgtccaaatgagtgcgcgatcgcaaaatggacgcagagcaatgttagcacatcgtcaagctaaagaaatcgctctggggactgatgggaagttgagaattcttgctgatttattagctgaacattacccctctagagtgttgatttttacggctgataatgctacggtttaccgtatttctggtgagttgttaattcctgctattactcatcaaactcctgtgaaagaacggcatgaaattttaactaagtttaaggaaggtatttataatactttggtggcttctcatgttttaaatgagggtgttgatgttccttctgcttctatagcaattattctttctgggactggttctgcaagggaatatatccagcgtttgggtcgggttttacgtaagggaaatgtggaaaataaacaggcgattttatatgaagttgtggcggaagatacgagtgaggagggtacttcggctagaagacgaggtttaaaaagtattgaaccacgaagacacgaaggacacgaagagaagagggaagagaagaatgagaagaaagaagataagaagaaggagagaaggggtaatttaagggttgtttatgggggtggtaaggaaagagaaaatcaaagggatttgcgggcggctgaacagttggaaattaattattctcttaataagaaagatgttgacaacggagttattgattcatcgtcaaaacggggaggaaattatcccgaagagactgaaacttgatgataaacatttgggtttagctagtgatttaattcagttttttcaggatgctgtgaggaagtctcaaggggttcttgaacgtcaattggctgattttgaaggtgatactactgattatcgaatgaagcgcggtttggcttatattctgaaaagtagtttctgcacttttgaggttgttagtcctctcgaacctgctatgttaagagaacgggtgttttctctggctgcaaaatctgtttctagtcgggaaaatacagaggcaattttaactaaaattgctgatgatttaagtcgggaattacaacgggaagttttacctgttcatgttcatgaaggtctttatgctgatttatcggaaaataaaattttaacctcttttgatgctcctaaacctgaagatttattacatcgttataatttgtctcaggtacaaggtgtgttttataaagctactcatttggtgttaaatgctcatcgcaatgtaccaggagaatataagttattgttccgttatttgaagttgtttcaattaatggcttatattgaaggtgatgcggatcatggttttactattagtattgatggtccgacaagtttgtttagtcctagtacccgttatggtttggcgatcgctaaattaattcctgctttacttcatgtgacaaaatggagtttatccgcaactttacaaacacgagatttttatactaatgaatggaaaactggcaggtttacactcaattctgaatgtggtttagtctctcactatcctcaaggtaagccttatgatagtatgttagaacaatcttttgctgataaatgggataatttaaaaagtggttggattttagaacgggaagttgatttaattcctattcctggaagtgtgatgattcccgattttcggctggtacatcctgatggtagaacttttttattagaaattgtcggttattggcgaccagaatatttacaaaagaaattttctcaagtacgccgtgctaattgtgataatttaatattagctatttcggaaagattgaatttagaaaaagcaggtgtaaaattagataatgtccctgctagaattgtttggtttaaagaaaaattattacccaaagcagttttagcggtaatgggtgatgggtaattggtaattgctaattggtaattggtaataacacccagatccccgacttctgcgttcaagtcacaatttattgacaggataataaaaggaaattggggatctgattactcttaattattactgctcaaattctcattaattaactgttgaaattcctctaaagaactgacgctaatactaggtaaaagtaaggtttctaacacagatatatcatcaatttgattgatagatgtgacgagatcatctggtaaagtatcaaagcgattttgcagaattttgataatatcttgtttgcgtgtttcttttgctcctatttgctgcccaatttgctgcccaatttgttgacctctttctagtgccatttcttctattgtgcttaaaaaaggcatattgcgctccttttcgtattgattaagtttatttttaaattccagttctagttgtgttggtaaagtcatcattttatcaaggaacttacctaaattaatgatatcaaatttagttaagcccctttcatacaaacttctgactaaattccatttccattgttctctttgggttaaattgctagtagtagctttggtttttaaatgcgccatgactactgtagcaaaaatattatcactagcttctaattgctcccactgataatctaagagtttcacgttactgaaagtcattttaacttggctttctcccatgccgtattcataagaattgggtcgccaagttttactctcatctcctagtatagctaaactgatgacgggtttatgatataaatcaaaggcgcgatagttatagataaacattcgctgaggaaatgctttatcatattggctttgaacttcaatatgaatcaaaatccagacttcttgttcatccagtaaccaaaccttatacaatttatcagcatagcgtttttctgtttgggaagatgctgtaatttgctctaattctttatcgagggaaatgggggttttttgccaattaatttgttgatgaagatgggggtaaaagaaagatacaaaagattcaaagtattctgatattgcttctttccatgtttcgtcataattagcggtagtttcattcattcaagcacctgggaaaaatctattacttactaagtatttactaaatattaggatctataccatgagaacgtaatatttcttctaaacgttgcgatcgcaatttttcagattcagcttttttcctttcaaattcagccctttgtctttcaaattctgcccgttccctttcctgttgcagtagttcttctgctgttaaatatctctttcgttgttcatcataccaatataaccattctctggtaattccttgatattttccttcttctctacctattcctaaattcaattctgataaccatactgcttcacctggcaataattgatatttgccattttctaatttataaacctctaacctttgtttcctttttcttaatgggttataaatcacataatataaaattcctaattctgcatattcttgtttcttttgggtatattctccccttctagtttgagatactacttctaacaccatgattggtagtttttgttcttcccataacacataggataaacgtaaatctgagtcaataattctcggtacaccaatacttagaaatccatctggtactattgctggtttatctggatcataatatattcccatatctacgccaaaaaaccaatccattctttctgaccaaattaaggcgagtatggtttttagtaaccctggtattaagtcttgtaattccttatccactggtgtatcgtctgaatctggtaagtcttcagcagaaggtaaacattgccgagtatcatattttaataacatatcttctcaaaccaatcaatgtttcttttttacaatataacatatataatacatcaagaatcattgaatgcagataaacacagataaagatgaataattaattcaatgtccaaaatataaaattttccttaattttaaattatatgtaattagcattacaaatctatctggggcatgatttatgattacccccagttagaatatttttatgaaaaaactcaaaatcatgaaaactaaaatttctgtcattttaacaattgtagcggctgtttttggtgtgaatagtgccgtttatgcacaatcaactgagcaagttaatcaaggaaactttactttaaaaagtgattctttagttgatgttaatgatcgtcgtgcagaaaatgattttagcagattttttaatcaacaaaataatcaaggtacggaaaataatacttctgaagaattgcccttgagtgaatcaatcacaattcctgctactcttatttttctgcaaccagcaaatcaaaatctgaatgaaaatgatggtctgcaactacagttagatttaagtgataaccaataggaataattggtaattggtaattggtaattggtaaaaactatcaactgtcacctgtcacctgttacctgtcacctaatttctgactcccaaaagataatttggcaacattttgcagtaaaattaatcctttggagagaagaggtttttttaatgactcgtgtcatcattgtgcgtcatggtcaaagtacctataatattgaaagacgtatccaaggacgtactgatgcgtcaactttaacgaaaaaaggtcaagacgatgctaggaaaacgggtaaagctctgagtaatatagcatttaaggctatttacaccagtcccctgaaccgcgctaaaacaacagcagaaattatttgcagtgagttagtggaaaagtttggggaaatacaagtttgtgaaaatttagtagaagtagacttaccgttatgggcgggaatgttatctgttgatgtcaaagagaaattccctgatgattatagtatatggaaaaaacgtccccatgaattgcggatgatgattaatgacgcagatgggacaagagaacattttccagttttagctttatacgcacaagcacagcagttttggcaagaaattttaccccgtcatcaaggggaaactattcttatagttggacataatggtattaaccgagctttaattagtacggctttgggtattcctcctagtggttatcatggactacaacagtctaactgtaacattagtgtattaaattttgctggtggtttgggtgaacctgtgcagttagaatcaatgaatcaaacgcaacacctgggagatactttaccgagtttacgccccaatcatcaaggatttagattattattagtacgtcacggcgaaaccgaatggaatcgtcaaggtaagtttcaagggcaaattgatgtacctttgaatgataatggcagatcccaagcgggaaaagctggggagtttctcaaagatgtgacatttgattttgcttttagtagcactatggcacgtcccaaagaaaccgccgaaattattcttaaacaccatgaggatattcagttgcagttattggacggtttaagagaaattagtcacggaacctgggaaggtaaatttgaatcagaaatagaacagcaatttcccggagagttggaacgttggcgcactgttccggctgaagtgcaaatgccagaaggggaaaatttacaacaggtacatgaacgcagtgtagccgcttggcagtcaatattagcaactgctgagaaaaatcagttacaaacgggcttagtggttgcccacgatgcgactaataaaactttgctttgtcatattctaggattatcactggaaaatttctggaatttccgtcaaggtaatggggctgtaagtgtcattgattaccctaatggtgctggtggtttacccgtattgcaagcaatgaatattactggtcatttaagtggtggtgtgttagataagacagccgcaggagcattataattgcgctgattagcatatctggggcgggcaagatgcccaccccacattatattcttccctaatcaccaactaccaattagaacagatattttaagtattaaaacagacatgataaatgaacttctacaacaagtaagggtaattgatccggtttcggaaactgaccaaatagccgatgtattaattgttgagggtgaaattaaagcgatcgctccccaaatttccgatattagcgccgatactgttattaaagattgtcggggtttagttgtaggtactggtttagttgatttatatagtcattccagcgaaccagggtttgaagaaagagaaactttggtttctttgctgcaagctgcatctgctggtggttttacgagggtaacagtattaccagacacaaatccagctattgataatcccgctttagtgacacagttacagcaaaaaagagtagagaaaggttcaccccatcttcaggtttgggggggaatgactttagatttagctggtaaacagttaactgagtttgcagatttagttactgctagagttgtgggttttacggatgggaaaccttgggaaaatttgggtatagtcagacgggttttagaatatctgcaaccttttggtaaagttgtggcgttttctccctgcgatcgctctttgtctttaaatggtacaatccgagaaggtgcggaggcgttacgtatcggtttaccccctgttcctgctattgcggaaacaagtgcgattgctgctttattggaattagtcgcggaaattaggacacctgtacatattatgcgggtttctacttcccggagtgtggaattaattgctactgcaaaatttcagggtttaccagtgacagctagtaccacttggatgcacctgttattaaacaccgcagatattaagagttatcatactagcttgcatctagaaccacctttaggtaatgctactgatgttaaagctttgcgtgctggtgtgcgtggaggtgtaatagatgcgatcgccattgatcatgcagcttatacttacgaagagaaagtacaagcttttagtgaatcaccaccaggagcaataggattagaattagcattacccttactatgggaaaatctcgtagaaactggagaatttacagctttagaattatggcaagttttgagtaataaaccagcagcttgtttacaacaagaaatcaaaccgattaaaccaggggaaaaagcagagttaacattatttgatcctgaaaaaatctggagagttagtcgagaaagtctttattcacaagctgataatacaccttggtttggcaaagatattaaaggtagagttttacaaacttggtgttaatagggaactaccagattatttacttttgtaaagtttgatatttcgacttatgggggtatgaagagggttgaaatacccttatcttatggttttggggatttgtaacgtttttcataaccaattccccgcaaggggatggaaacaacttgtttatctcgctccaaggggagcgatttttttagggtttttcataaccaattccccgcaaggggatggaaaccagcagacagttccagacaggtgtctgtaagagtcatcagtttttcataaccaattcccagcaaagggatggaaaccagcagacagttccagacaggtgtctgtaagggtcatcagtttttcataaccaattcccagcaaagggatggaaacttggcaaagtcttgattctgctcagaagtttttcacaaccaattacccagaagagcatgaaaacaaacccccgatcgcaacaattaaaacaaatgcgatcgcgctattttccataattcccagcaaggggctaaatatattacaaatacgggatttcttaaagaaaccccatatctatcagtagttataaacttgcaaatttaagttaattctaaccatccttgataaccggtcacaatgcgatcgccatctttgagaatatgaacttctatttgatcactcgcccaactaatttgatctttaaattctgggttaaaaacatgaactttttgatttctggaagaaaccggagacaaaggagaattaatagctaaagacttgacaaaaggaccatctattaaaatatctaattccgctaataattcctgagaaccaggaggtgcagattcagattgtaattcttttaaagtaaaaccagtaaaagccatcacatttaaaccagcagctttaactttatgtgctaaactagctaatgcggaagcttgccaaaatggttctccaccagaaaaagttacacctgtattatgggggtttttaataatatcttccgctagtttatcaatcgcaactaattgatttatttcaaattcccaagatgcgggattaaaacaaccttcacactcacgcggacaaccttgcacccaaaccacagcgcgacaaccaggaccattcacttctgatttatcaacataacccatgatgttaagataaccatccggaatttgtttcagtgctgataagatttctgttgttgtttttgttgttgccatatttatttaactcgtgaaaaatacaactgtaagcaagtaggtaataggtaataggtaataggtaataggtaataggtaataggtaataggtaataggaaaaaataaaattgattacccagtccccagtccccagtcaccagtccccagtcaccagtcaccagtccccccccagtcaccagtcaccagtcaccgtttgtattgccatccttccctgatattcttgtctaaattgtgtaattccttcaataatatttggtaaatcaattgtctctagaggacgattaatttgctgtagtttatttgacgaaacagcatccaatacttttcggttaagcccaaaacaacgaaataacgtaggttgggttgaggaacgaaacccaacatttacaagggtttgttgggtttcacttcgttcaacccaacctacaaaaatccttaaccgaacagtattgaaacagcatccagtttaacggcaacaatatccgctattgatatagcaggcgacagtttacaagtcaaattacaagtcaaaattcatgcgttcaaaagtcaaaagttttatctattgataaatcaagaggattgaacgatatctcatggtttacgcttcacaaacagactgttttaactaatcttattgagaatttatcattaatttgtgaggaagttgtgaggtaaattttcttatctcttggtagtgaatacagttgtaaacatcatcaccataccacctacaagaatagcgatcgctaatcctcctgtgagcaaatctaacgtactattatctatgttcattgtttaatcactcccaaatttactaaaaatttactaaaaatttactgtaattttctgagtaaattactaacatccttccctgcaagtgaaggtgagaaaattaaagcctctctcctacgatgagagaggtttggaaagaggtcttaatttttccctaattccttaccaaacaaagtccgatacatcaaccgataaatatctgtattatccaccgttccatttaacaacccagcattaaaaccatgcgctttcgctattattcctccagcattatcaccaaaaccagaccatgatatagcaaagggaaaacgtctaccctgtttatcaggtgcagaaataaaaggtaacgtacttgttccttctttcccatcccaaggtgcgccattttcacctttttgtggtaatggtttatcaaaaggaaaatctttccctgttgctcccaccaattctaacccaccagcatcactatcagccgtagttactaataaagtattcgggtttttctcaataaatttcattgccacaccaacagcatcatcagcacgttttaaggcagtgagacaaccaatggcattattataattaccgaaattatcgctgccttcttcctctaaaacaatcaagaaatttttacccttttgcgataaaatctttaacgttacatccaactgttcccctaccgtcggtgcagtggccacatataacggtaaattacgttgtttcaagttttcttctgtttcatcattgtaggtatcatcagccgcaaaaattcccaacacctttttagtatttgttggtaacttcaataattcatcacgagtgtaaacaacggtgtaacctttctttttcgctatttctactaaatttaacccatcagttctttgactttgagatgcggtagaatgtcttcccgctactcctttgggaagataccacatttccccaccacctaaaattacatctgcaccagattctactatttgtttagtaatatctgcaaaattgcgacgactgggagattttgctaaaaatgcacctgttcccggttcatgaatcatcccagaattaataatagccgttcctttgcccgcttttatggcttcttccataattgtttgtggttttccagaaagcgccaccactggtttaccgttttcatccaacccaaaagagtcagcatttacctttaccccagtagcatgagttaccgccccaccattggaagttccagataattgatttttcatgtgtcccaggtaaacagccaaatttgacatttgatcccaatttaatctgccatctggtccagtgtagagtattctagttgcgccccagtgcgctgcactcgtaccatctggatggataaagatcacattaccttggacagaggtattattggctaagatatgtggtgtatgactgaggacagatatcacagccaaaagtaagaaaccaataactttttgattcaatcgtcgtaacattgctttacatttaaactataggtacaatcaaacgtaagaagtcagaaatcgtaagggcgaagcattcgggcaagaaattatcaattttctgaccaggctattttcctgtaagggcgaagcattcgggcaagaaattatcaattttctgaccaggctattttcctgtaagggcgaagcattcgggcaagaaattatcaattttctgaccaggctattttcctttaagggcgaagcattcgggcaacaaattatcaattttctgaccaggctattttccgaatgcttcgcccctacttcgcccctacgtcgcccgtacaggtcttttgataatacatactttaatcggtaattgttaagaaatggtaattaagctgttggacatttaacttacatactatctaaaattaaaatgcagacaattgaaaaaaagtcaagtaaaaaaacctgggcaaaagccatatcccaaccggcaaaagaatttccccccactcaattaccaataattgcgggtaaaattcctgaagggttgcgtggtacactttaccgcaatggtgcagcaagattacaacgggggggtgtatccgtaggacattggtttgatggagatggggctattttagcagttcattttaccgatgcaggtgctacgggaatttatcggtatgtgcagactgctggttatcaagaagaaaccactgcgggtaaatacctatatggtaattatggcatgactgcaccgggtccgatttggaatcaatggcaaaaaccagtgaaaaacgctgcaaatacttcggttttggcattaccggagcaacttttagcactttgggaaggtgataacccctatgctttagatttagaaactttagaaaccaaaggtttaaataatttaggtggtttaactaaaggacaaccttattctgctcatcctaaagttgactatcaaacgggagaaatatttaattttggcatgactcctggacttaatgccatattgcatatttataaaagtgattttactggtagaattattcaacaagcaaagtttacgttagcaggttttccgattatccatgattttgttttagcaggacaatatttaatattttttgctccggcggtacggttaaatatttggcctgttttatttgggttgagtagctacagtgattctttaacgtggcaaccagaaaagggaaatcagattatagttattgatagagaaaatttatctttagtcagtcggggagaaacagaaccttggtttcagtggcattttagtaatggatatgttgatgatagtggtactgtaattgttgattttgctaaatatgatgattttcaaactaacgaatatttgcgagaagtagcgacaggagaaactcacacctttgctaaaacttccttgacacgggtaaaactaaatccgcaaactggcaaagtacaagaaattgcaactttattaaatagaacttgtgaatttcctcatgttccagttaaaaatgtcggtaatttctctcgttatagctatatgtctatttttcgggaaggaacagatacagaaggtgagatattaaatagtattgctcgttttgatcatgaaaatggaaatttaacagaagcaaacttaggtgaaaatttttatccttgtgaacctctttatattgaagatactcaaaactctcagcaaagttgggtgttgacagtggtttatgatggtaatagtgatagtagcgaagtttggatatttgatggcgatcgcctcaatgaagaacctgtttgtcaacttggtttacccagcgttatcccccatagtttccacggtacttggaaacctggtgactggtgactggtgactggtgactggggaagaaatatttacctcctgccttctgcctcctgccctctgcctcctgcctccttgaactcctgaaaattcaatgtttcaactacaacacacccaaaacagaaaaccaggatggtctttggatgaacgagatccaaagttcatcgaaaatatcatgcctatattgggcattttatacaactactattttcgcgtccaaaccagtggctgggacaatattccagagggaaaagttctgtttgtcggttctcacaatggcggtttggcatccccggatacatccatgatgctgtacgactggttacgtcgctttggtacacaaagacctatttacggtttgatgcaccccaaagtttgggaagtttttcccccagcagcggaaatggcgatgaaaggtggtgctattatggcacatccaaaaatggcttatgcggcttttaaggctggtgcgagtgtgttagtttatcctggtggtgcggaagatgtgtttcgaccccatcaaatgcgggataaaatctattttgcagaacgtcgcggttttattaagttagcactgcgggaaaatgtgcctattgttcccgctatttcctggggggcgcatgataccctgatagttttggctgatttgtataaaattatgcagcaattccatcaatggggaatgccttggttgtttgatgttgatccgttggtatttcctgtttatttaggtttaccttggggtttagcagtaggaccattgccgaatattcctttgccagcgcgtattcataccagagtttgtccacctattgtatttgaacgctatggaaaagaagcagcaagcgatcgcaaatatgtgaatgaatgctatgaattagtcagaagcaaaatgcaggaagaactagataatttaatcaaagaagcaaataaataaggagtcaggagtcagaagataaatatttcttccccagtcaccagtcaccagtcaccctataggataatttccagggttaacagcatgaataaactcactaccagaatgtggtctacctcttttataggctgcttcttctggttttccccaacccatctgtaaaattaattccaaaaaattcgcattttcccactttaaaaaacttgcccattctgtcctttgggctattctttctacatctaaagtattaattttttcgtgttgtctaccattactcaaacttaaatataaatccatatctgttgtaacttgatcccaaaattccaacatagaatttttcgcagctttcaatatttccaaatcagtatttaacgctattaactgcgcgtcaacctctggataatggaaagttttacccttcacagtcaaatctttccaaacaattccagaaacttgattttcgcgttgatattcatgaatagaagctttaaaatcttgataggcagtgaatttttgtagcccttccgttgggataaactggtctataactggattacctgaaaccgtcacatccaactttaggcgttctcctttcaagcaagcttgccgttctgctgctaaaatttgaatgagttccagcgtagtataaactttgttcattagttattggttattagttattggttattagttattggtcattaattattagtcattagtaatttaactattatgtcttggtaaaaataaaaatgcagtatcagaaccaactaaaaattcaaatctgaatataaaacaagtatatcgaaatttttacagagtagtcttgagacaacttttgatattagcctgagaattaattctcagaccgtggtacaattacaaaatgtctagagtttactggctcaactcactgctatactcattaaatgaacgctgtttgaactcaatagactgatcacgaggtaacaaattaaatacctccctaaatttatcatctatttcttcaaaaggtacttgaccttttttattcaaaacaacttttcccgactgatcaaaaagaacaacctgcggtacaacaccagaataataatatcctggttctgtgggttcataactgtctttcacaggaatagtatcaacacttacaggaataatttccgcagcacgtccataaaatgcttgagtctgggaaatatacaccgcatactgtttacaatcgctgctatcatctacataaaaagccagcattgcgggtttatgttctgctaaagtctgtcctaaggttagtttggaaggaacgagagaaccattacccgcaaaaaccacgaaaatattaccttcgtatctgtcatccttcatacctgcaaaagctggttgtatacctacaataaataggcaaagcagcaataataggcattttgacagcaaccgtcgccagttagcagttatgttagtttgtaaaaaaagccaatttatgctactcatcaacaaaaaccttacttaacacttttgcctagatttatcctagatatataattacatctgagtgctattttttcaccataacttttagtggtattctctttagcaacaattgaaaattctaaactacacaaaaaaatcactcttaaaccctcttaactttgcgttctttgcgtactttgcggttcgttataaagctgaatactgataagtaactactgatagctataaatgactggtattttttaccaatattagctaaactgacaaaattaattttgtaaataaagacattacttaacaactgctgtgggaaagaaaatacaacttatagatagagtcaaactgggtttagcagtatccattgctaaaagtgtgacatttttagtacgttctttgcgtcttggtgctgctagtgtattaccaggttctattgcgcgacgcatcgaacccagacttttacaattattgagtcaacaagttaaaaacggtgtaattttaattgcgggtacaaatggaaaaaccacaaccgcgctgttattatgtacgattttagaacgcacaggttacaaaattgcccataattctactggtgcaaatttagagaatggtttagcgactgctttaatagaaaattccagtttattaggtgctttaaatgttgactatgcaattttagaagttgatgaaaatatcgttcccaaggttttaaaacctttacaaccaaaaattattatctgtttaaatttattccgggatcaacttgatagatatggagaagttgacactatcagtaaaaaatggactaaggtaatttccaccttaccagaagaaactgtagttattcccaatgctgatgatccaactttatcatatttaggtcaacagttaaatcaaaaagtgctattttttggattaaatgaaccagagaattatttagaatcaattcctcatgcagtagattctatttattgtcccaaatgtggacattctttagagtatcaaggggtttatttatcccatttaggagatttctcctgtcctagttgtgggtttagtaagagtcaacccagtttagaaagtagtgaatggtcacaaattcttgtaggtttatacaataaatataataccttagctgctgctactgctgcaaaagaattaggagttgaagaagggaaaattagagaagcaattaataattttcaagcagcttttggacgtgcagaagatttggtaatagatggtaaaaaagtgaggattttgttatctaaaaaccctgtaggaacaaatgaaactattagggtagttactcaaagtacagataaaactacattaatggttttgaacgatcgcacacctgacggaacagatgtatcttggatctgggatgtggatacagaaaaattagtagaaagaggtggaacattggtagtgagtggcgatcgcgtgtatgatatggcgttaagattacgttatagcgagaaatctattgacagtaaaattaacttaattgttgaatcagatttaaagaaagctatcaccattgctttagaacatacaccgaaaaatgaaactttgcacattcttcctacctattcagcaatgttagaagtgcgggaagttttgactgggaggaaaattctttaacaattgataattgacaattgacaattgaaggtttacatcaaataaaatagatccccaacttattgaataaagtcggggttctaaataaatttacactaaataactggtatttggcacaatttgaaagaaagcatattcataccaagcagtccaaataaaacttctaatccaacgttgatatttttcaggagataattcataattaaactctccctcagaaatatcaatagaagataaatgagaattacaaccgcaaccgtgatgataggtaaaaccgtattttgaagcaatactttgtaccttcatttgcactgcaaaaactttacctgaatgtaaaattgcatcccaagaacgtttatgttcaatatctcgtttgtcaaatcttaaagcgcgttcttcaaatacatgatctctgtaaattggtgctaaatgcacatgataaaaacttgcaggtaagtcatatccaaactcgttaaaaaggtcaattccaattaaagcaactttcacttcatgagataaaccttgagatttcacatcttttaaaatttgttgaaaatctggatattgatcctttaaaaaatcatttccgtaaaattccaaagtttcataagctaactttccaaacaactgagaaaacgctgatttaaaaccagctaactctggacgttcatcaaataaatctacatcaccttgcgcgagtttatattgaaataactgcgccatttttacataaacatcgggatttttaaaccctacatttgcttttccgtcagcgatattttgccaaataaagggtagttgagaaatagaaaccgcattttcaccagaaattactgttaaattgggagtttcaattagtttcatagatgatttacctttgaggagaattatcaagataacttgtgattatggtgacaaaatgctcaaaaaaactgttacgtaaaatactaaataaacccaaataaaaattatgacagggtgtaaaacaatgaaaaagcaagattgtaaattcaagtaactaccgaataggaatttttacccaatcgtgtaatatttatgttataatcatttagacttagaactataatattattaatcacaatagaagctacataaaaaagcaaaggagtaaaaaatgaccactaaactcattgccaaagtcacctcagaaggaaaactagaaattcccccagaaatattacagcagttgcaacctgaatcagagtatgaaataactgtaacagaaaggtctattattctagaaaaaaaatctaactcaacagttgatttagataaatttctggaagaactagaccaattagaacaagatccagaacaaccgactttagaagaaattagtgaaattgtaaaagaggttagacaagaattatggggtaagaaatgagagttgttcttgatgttaatgtttggatatcagctttactgtggggaggtgtaccatctggtattttacatctttctcgacagaaacagttaactatttttgtctctcaatccttattagaagaattagagaatactgtaaaacgtcctaaattccaaggtcaaataaaaagcaaaatcgtacaattgaatatttaatgtcaataactcaagggttttgtgaaaaatgtcctaatatttccctagatatagatatatcccaactaagagatatgaaagactatcatatcttagctgctgctgtatctgctcaagctgaagttttaattacaggtgatcaagacttattagtattgaataaatttgcagaaatattaattatgacacctgcggattttctaaatacttatttcacatcttcatgaataagaaaaatcaaacttaattcctctgcgtcctctgcgtctggatcggttcgttcctatcataccctataaacaccaaacaaattatctaaaaaatattgaaaactcccaaaaatgagttaacataaaacgcaaaataaacataactgtaaaacaatggaaataataattggttggttatatcccaaattaatgagtacctacggagacagaggaaacgtcattaccatagaaaaacgcgctcagtggcggggatatgatgttaaagtattaccattagatcaaaatgccaccgcagatgatataaaatcagtagatataattgttggtggaggagcgcaagatcgtcaacaagaaatagtcatgcgtgacttacaaggtgcaaaagctgacgcaatgcgagatcaaattgaaaacggtacaccaggagttttcacctgtggttctccccaacttttaggacattattacgaacctggttttggacaaagaatagaaggtttaggaatattagacttagtttccattcatccaggagaaaatactaaacgttgtataggtaacttagttatagaagttaccgcttcccgactcgcgcaagaactagaagcaatgatagggacaaaaccttatttagtcgggtttgaaaaccacggaggaagaacaaaattagggaaagtagaagctttaggaaaagtagtttatggtttaggtaataatggagaagatggtacagaaggagcgttttataaaaatgcgatcgctacctattcacatggtcctttattaccaaaaaatccctttgttgcagactggttaattcaaacagcgttaaaattaaaatatcaacaagaaattaaactgacacctttaaatgataccttagcaatccaaggtagagaagcaatgtttcaccgtttaaaagtgaacttaccaagtgttactaagattcaagtttaatatcatttccgttagatcacaaatgactcctgactcctgtacgggcgaagcattcgggcgataaattatcaattttatgaaaaggttattttccgaatgcttcgcccctacgactcctgactactgattactattttgactttgaatttgtaaaaaaggacgtacaatcaaataacccgcactaaacccaccaatcataataaacacaatagtaaaaaataaccaccaaccattcaaccccctagactcagactctaggggtaaataataatgtacttcttgttcttctatatacatgggttctgataccggaaaattcatatccatcacaggtacagaaacaacctcacgacggacttttttcggtggtttaggagttggttgacgtggggaaggtgctgttttcaccatcttctttttaggtaattttccctcaatttttttacggcctttgggttgaggtttagaagtattttttacatttgcattagctataggtatagtttgattatttggtttattgttttgtgcattattttgtgtattgtttacataagcatgattttgaggagtagagtgagaaattggtgtactaggttgagtttgagaacttggtgcatgagaacttggtgcagaagagtcaattaacttttgcagttctaaacaagactgaacaagtttgttaatttcttgacgcagttgttgattttcctgggataatttttgattgtggttagtgactacatctaacttagcttgtactgcttgtaactctgcaactaattcccggtataccgaaacaggtacagacggggaatatctgggagtcggtggtttagtatgaacattaggggtagttgctctcatctgcatattggtataaaaattaggtttttagattaacaaaatatactatcagagtaaagttatcccggagaggaagtttcaaccaatttttaacgtttttccaacaacgggaaaaaatgtcccacaggtccacttcccttcccaatatccaaagaataagtaagtgcagttgtcacatattccttagcttcttgtaccgcattccataaatctttacccaaagctaaattagcagtaatcgcagcagataaagtacaaccagtaccatgagtatttttcgtttctacctgtttcgtcctcaaaacttccaacctttccccatcaaaccaaacatccacccctctcaactctccagacattcccccacccttgactaaaaccgcttttgtacctaaatttttatgtataatttcggcagcaatttgcatatcctccaaagaaacaatttccaacccgcttaaaatctgcgcttcataacgatttggtgtaataatagccgcttggggaatcaattcatcacgtaaagttttcaccgcatcatcatcaatcaactgcgctcctgtccgtgataccatgacaggatctaccaccaaattattaatttgtaaagttctgacttcctgcgctacagttgaaataatttcttgatttagcaacattcctgtttttgcagcttgcacaccaatatcttcaactaccgcccgaatttgtgctataacagcctctgaaggcatggcatcaacccggatcacatctagagtattttgggctgtaatacaagtaatagcacttgtaccatgaacacagtgaaaagcaaaagttcttaaatctgtttgaatacccgcaccaccaccactatccgaaccagctatagttaaagctacaggtataaatttttgatttgtttttttattggtagtcattaacattaactctcaattttaacaacattagacatctccggaaattaaatatacataacctgaaacccattcgtagggacaactcatgaattgtccctacatctttttcggacaagtctattaacaatataaaaatttactcatttgcagaatgtaaatttcccagaaatccctgcaaaaatttagcccattctgctgctaaaggaatttctgtaaagggaactcgtactgatttagcagattcagaaaatacaaattctaactcaatcacacgaccttttaagggaggattttccatttccacttgtttatcatttaccaacaagctgattttttcaacatctaataaactaaaagtttgcagttgaataggtcctttagtagtaggttttccccaagtgatatcattacctttttgagcgagtacagcataaatatcatacttagcccgttcaaactgttctgcccaaattttataagcttctagtttctgatattcctgggaaccttgccaggctaaccagaaaaatgcgcctaacaaaggcaaccataaaagaccacgttccataattcgtaattggtaattagtaattcgtaattttttctagattttttctagtctccactgtcccaaaaataccactatatgagttatcgtagtgtgcaaactgacaaaaagcgatgagttgatatgagaagacttatattattgtgcttgtttgtcatcggcttggttgctgccgtattcggatacctgaattttcagggattggcaaccaaaggtgaatttgagacaatattactggattttcgggaagatttaccagcaacagtcataaagcaagacttacaagcgatcgctcaacaatataacgttacaccccaactggataaccaattttcagaggctgataatgtgtatattatcaaaggcgatcgccaacggttaaaagacctgagaaaatcagcttatgcccaaaacacagaatttatcgagcctaactatatttatcaagcagttcccattggtgaaacagcctggttaggagactttctccgtcctcaagatggcgatgaagaaccaagcacctccttaacaggtcccaacgaccaatattacagcaaacaatggaatttgcacaaaattggcgtagaaggtgcatggacacgcaccaaaggcagcggtgtaacagttgcagtcattgacacaggtatcaccaaagtccgggacttgtatgaaaccaaaatagtcaaaggttacgactttgtaaacgacaccgaaaccgcccaagacgacaacggacatggaactcatgtagccggtacagtcgcccaagccaccaacaataaatatggtgtagctggagttgcctacgaagcaagtctcatgcccttaaaagtattaggtgctgatggtggtggaacagtagccgacattgccgaagccatcaaatttgccgccaacaacggcgcagatgtcattaacatgagcttaggtggtggtggcgaaagccagttaatgaaagaagccatcgaatacgcccacagaaaaggtgtggtaatcgttgccgccgcaggtaacgaaagcaccgacggttctagttatcccgcccgttatcctcacgtcattggtgtttccgcctttggacccgacggggaaaaagcagactattctaactttggtgcaggagtagacatttccgcccctggtggcagtgatgcaggtgcaatactccaagaaaccatcaacgaaaacggcgaaggcgtatttttaggactgcaaggtacaagtatggccgccccccacgtcgcaggggtagcagcattagtcaaagcagccggagttacagacccagaggaaattttaaaagtcctcaaacagtcagctagagtcataccagaggacgcattaaactattatggcgctggacaacttaacgccgaagccgcagttaaacttgctagtgaaggacaaattagctttaacgactttttccggtggttaagggataacggctacatcaaccccggcttttggatagatggtggcgttgttgccctagtaccgaaaattttaatggtagtaggttcttatctcctcgcttggtttttacgggtttacttccccttctcctggagttggtctttatccagtggtttaatatttggtagttctggtttattcttcctcaaaggaatttatatctttgaccttccccagtggccattccgggttttgggtagttccatacccgaactaggcaacagtatacaaggaacaggtgctttaaatcccctctttgccagtgtattaattcccatgcttttaatagcattgctattaggacatcccaactggaaatggtttgccataggttctagccttggtgtagcagcctgtttaatagtcagtgccatttatgaccccgcagtttggggtctaggagatggtacattagcccgcattttcttacttgtcaatgccctactgtgctacggactagcccgtttagcattgaaaaacgacgaacaaccagcttaggaagaggtgacaggtgacaggtgacaggtgacagtgaagaaaaactttctatgatttctgactcctgactccttgaactcctgactccttgaactcctgactccttgaactcctgactccttgatatcctgactccttgaactcctgactccttgaactcctgactccttggtttcctgactccttgaactcctgactccttgaactcctgactccttggtttcctgactccttggtttcctgactccttgaactcctgactccttggtttcctgactccttggtttcctgactccttggtttcctgactccttgaactcctgactccttgaactcctgactccttgaactcctgactcctatgatcacaattacaggcaaaatagaacgccgaaatattggtctcggcgcttgggcttttgttacagatgatggtgttacttacgaaattcctaaaagtgctgacaaaaatttgctcaagtccggtcaaaaagtttcaattacaggaaaaatacgcgatgacatcatgaccaccgctatgattggttctgttttacaggtagaatcttttgaaataattaattctgactagctgctgtgtccaaaaccgcctgaagacgacttctaaactcgcctttgggatgtccacctttgacttcaccaactatttgaaattcaccttcgggagaattgcatataatataggtaggccatcccatctccgatttatcaggatactgggtgagcagaattttccgatatttacgataagttgccgtatcctgcattttcacatcaataaattgcaaacctagttcctctgacacctttttgtcataaaaagacattttgtggcagatgccgcaatcttcagaagagaacttaatcactgctaaactcattggtctctgggattttcttaatgttatagccgtggacagagtggttaggacatcaatttatcatgaaagagggcaaccacagggggtttgcccctactgaatcttgctacaagtacaacttaatgagtttttagaatacagtatgaatcaggtttttcgtaaagcttggttattttgggcaaaacttgtcccatttgatgtttgaagaaaatcattacaactgttcccttttccctgttccctgttcgctgttcactgcctctaccgataatgttgggaatcaaaccggattcctcttatgtcataaaatgttaacagatatctagaaaatcacacaggcatgaattatataaaaattattaagattcctattatatatcgctataatcattctgaacttgggctgaagctgaaaataaaatcacaggaattacaaaattaggcttggcatttggcagcaaacaggagtaaactggaagccaacactgagtagacaaaagaagagaaaagcacttgtggcggacaactcgcttttgtctacaaaaaacccccaatcggtgttaaccaactaggggcgattagttatcagggtgcatctaccaatttaatgttcccaggtacagaaccatcgtccggataaatttgttcctggaagtttgtttttatttttgaataaaaaacccccagtggtgttagccaactaggggagattatttatcagggtgcatctactaatttggttcttcttggttttcacaccatcctccggaacaattgaagtgcatcattattattgtttataaattctggtttgatgggttctgaaaccaataaaaaacccccaattgatgttagccaaccaggggaaattagttatcagggtgcatctactaatttgtatcttcttggttttcatgtcagactccggaaaatttggttggtttttcatgattgatatttggtaattaaataaaaaacccctagcggtgttagccaaccaggggtgattagttatcagggtgcatctactggttaaatgttcattggttttaatattatttccggaaaattgggttgtatttacatgattgatccttgtcaaccaaataaaaaacccccattggtgtgaaccaaataggggagattaattatcagggtgcatctaccatctaaacgttctcatttaatgcactatgctccggataaatttcaacaaatgtaggtgcttgtcacttaccgaaaaaatccataaggctagtagctgggtaggggagttagttatcaggatttgattttctatacagttgagcagaaattcttgggtcaaacattgctttttttgccaaaattgaaaagaaaacccccagtaggtgttaacctaccaggggagttgaagatcaaggtgcatctaccaataaagtgttctagttggaagtaatccaatccggataaagttgtaccagcactttaaggcgaaacaacccgaaaacagaaacattcctcggcaagatgcttctaaagtatcagttagagagaaaacactagaaacttttacggtgaaaaccggattttaggaggcaaacaggagaagttgtgacccaggaatttcatatttccgtgactccagtagggcaaaatgactacttggtgcggacggaacaagtcgcacctggggtgccattggcagaagaactggtgagttggcctgtggctgagtggttagcggccgcaggacatttaatgaatgaccctttacagtcagtgctacagggggatgctatagccagaaactctgtaaacttggtggcactgggtcaacaattatataatgcactgtttcaaggcactctcagagatagttggattactgcccaaggcattgcccagaaccaacaacaggtactgcgcttgcgtttgggattaaaagatacacggttagcgcggttgccgtgggaagtgatgcacgcaggcgatcgccccttagccaccggtccttatatcgctttttcccgttatcaaagtggaattccttccacatcaagattaccaacacgcaacctacccacaccacaggacgaaagcggaataagagtgttaatggtgatttcttctcctacagatcaagtccgtctggatttgctcaaacaagaagcaatcaaactacaagaagaaatgcatcgccaagtcccccgctctgtggaaaatggtatttatctgccagaaattgaattgactgtcttggatcaaccaggaagagaagagttaacccaagctttagaacagggaagatatcatgttcttcactactctggtcatagtaatgtgggtgctaatgggggggaaatatatttagttagtcgcagaactgggttaacagaaactctcagtggtgatgatttagccgggttgctggtgaataataatatccaaatggcagtgtttaactcttgtttgggagcatatagagcaaagtctgatggttctggggatacaggagaacgtaacttaacggaaagtttggtgaaaagagggattagtagcgttttggcaatgtcagaacggattcccgatgaagtggcgctgacgctgacacagttgttttaccgcaacttaagccaaggctatcctttggatctgtgtgtgagtcgggtgcgtcagggcttaatttctgcctatggttctcaccagatgtactgggtattaccgatgttgtatttgcatcgggaatttgagggttttctgagaccgcaactaggtttatctgctagttcggagttcctcaacgactatcagcctcctgtgggagcatctactaatgccatgtatgcggcggcgatagatgatttggaaatacctttaactctggaagagatgatgtcctctgagttggcaagagagccttctgagttagattggctggaggatgatacttggggggatctcatggatgaaatagattatgatcaccccggttatgatgaggattcaacgattgttgcggatttatttcgccagttggggaatcaacaagcgccaactgacgaaacgcccatgaaggcggaactagagaccccagtctccgaaaatcatcttcatgaacagcaacctgcaaaagaggaagaggaatttgatttttggggagataaaccaactccaacaacgcccaataatgcgcccaataatgcgtccaataatgttgaaggtaatcaggtaaattatcaacagatacctttaccatcttttcggcaaccacgtcgccgtcggccatggccaattttaggcattttgggcgcaagtgctttggctgtgatcattggtttaagttggtggtggaatcagcgccagtctgtagttcctgaaattccagttattcctattccgactgttcctgagccaaaaacaacaccctttgatttaaaaaaatcatcaacaggtattgttactgctaaagctacagcagaattgagccaaggtaatttacaggctgggctagacgctgtggcagaattactcaatcgtggggctttagaatcagcagatacggctttagcactgattcctgctaaacaaagcgaagatccgtctgtgaattttttccgtggacgattggcttggcaatttgcccaaacgagaaatacaaaatacagtattgatgatgcccgtcgttattgggaaattgctgtgcgggatcgccctgattcggttctgtataacaatgctttgggatttgcttactatgcagagggaaatttgaatcgggctaatgatgcgtggtttaagtctgtgaatttagcacttaaagatcagaatacaaccttgattgcaactccagacgctaatactatcatgccttcagaggctttaacagcttatgcaggattagctttgggtttatataaatctgcaaataatcaatctgctaataaacaaggacaatatattaaagaagcaattaaactgcgtcaaatggtaattcagaatgaacctgttaagtttacagtggataaattagcgcaaaattggctgtggacagatcaggcgatcgcagattggcgatcactgctgcaagaacaggaaaagaggtgattggtgattggtgattggtaataggacagaaggctttttggtgtctaagtttgataagtagcttacgtcaagctgccctaacagttagtgaactaccgtcttgtccgttgctataaaatacataacactcatgggaaataagtagagcttgatttacagctttagacaacgaatctggttagatatataaacaacgctctgagaagttaggaattgaaaaaaatgaaaaaagtagaagccattattcgtccatttaagctggatgaggtcaaaattgccttggttaatgcgggaattgtgggaatgacaatttcggaagtccgtggttttggacggcaaaaaggtcaaactgaacgctatcggggttcagaatataccgttgagttcttacaaaaactgaagttggaaattgttgtagaagataaccaagtcgatatggtggttgataaaattatctccgccgcccgtactggtgaaatcggtgatggtaaaattttcatttcccctgttgaacaggttatacggattcggactggggaaaagaacaccgaagctgtgtaagttttgaaggtgtataaattgggcgttgttgaattttcttgttcagcagcgccttttatgctttggttgtgctatgtagggtttgctgagaaagtctttccgtgagggcataggagtcaggagtcaggagtcaggagtcaggaggagatttgaaaatttctttgccatctcttgaaatcccaaaaaatgcacactttttccggtatacccttcaaaacccttgcactaatttctgtgtttatcagcctctaacctttgatatatcaaggttttaggtttattcagcaaaccctatgtagtaggagtcaggagtcaggagtcgtaagggcgaagcattcgggcaacaaattatcaattttatcaacaggctattttccgaatgcttcgcccctacttcgcccctacttcgcccgtacaggagtcaggagtcaggagtaaaaccctgtggtagtcagagtttcataattaattgatgtcctaaatactctgtgtacggctatactaaaggagttatttacaatatgtctccattgatcactgaaggataattatatggcacgtccacccattcatcctggagaaattttagctgatgaactgcatcaattaggaataagtttaggaataagtgcaagtgaattagctcgtttacttcatgtacccaaaaatcgcattaccgaaataattaatggtaaaagatcaattactgctgataccgctttacgcttaggacaattttttggtatgagtgctgaattttggatgaatttgcagaaaaattatgaactcaaactagctgaacaaaaaattggtcaagaaattaaagcaactatttctccttggatatccactgggaatatgcaagttacaatctaaaatgtagcaagttttcaactcttgccggatagtttttttcagacaatattacagtaaattactaagcaaagcattaataaatctcaaatttcaaatatgtacaaagcacgttatataagcactggtactcatgtttttgcatctgaaatgaaacctatagactataatggtattttccagtgtccacattgtaaaactgatttgatcttagtaaaagaacataaaagatatggtaaaattgtatctgctttttttaagcaccgtgaggcagaaaatgattttcaagaaaaatgcccttttagagtaaaaactaatcctaataaaaaaaatcaaaaaataaagaatacagaatctaaagaacaaaacttaaaacttttaaaacaaaatcttatcttgagacttaaaaaatacaatgatgcccgtttgacagatttttgtaaatacaatacagttttaattaagtatgtaaattcatttatggatttaagttataaattaattactgctgcctctataaacggaaaacctttaaatgctagttttatatatataaaatctgaagaaatcaaaaaatattgtcaattcagaatcaaggaattaactgaagagataaatttatacaaaagacaacttaaacatttgtttaattcagaccctcaactagaaactgctgtatctatttatgactacggcttgaggatgtacaataaaaagaaaataacgaaaaaacctccttttgatcctttactggaattttgtagaaaaaagcaacaaacaatagataaacttgaatatggggaatatggggtacaagtttttaaagcttatcaacattcagtaggatggctattagattttttatctgttcaaacagatattgattttataaaagaatttttagattatattttgggtagttatgttaataaacacgaaattcaagttaatgatatatgtgcaaaagtttttgggtttcatctatcttttataaaagaacttaaccaactaaatcaaatattttcagaacacaaagcaataaagactttttttgaacagaagcatcaacaaaaattctcaggcgaacatcaaatcctttttataatatgtagcgttatacacaagaggatgtttgaacatattataaattatttcttacctgaagggtgggataaaaagtctgaaaatgaaattgggtaaagaagatgaaacaattagcccccaaaaaccctcttaaccctgcaacttcaccaactgaggaactaaatttttcaaagcattaccgcgatgactaattgactttttcaattctggtgacatttcggcaaaagtcaactgtttttctgggacataaaaaatcggatcataaccaaaaccaccttctccacgaatttcatagagaatttcacctttacaaataccctcagattgtaaaactatttctccttgaggattcgcaactgctattgcacagataaactgagcttgacgatttttggtatctcctaattcccgtaataatcgcccaattctttctgcgtcactattaccataacgggcagaatatacaccaggtgcgccattgagggcatctacagctaaaccagaatcatcagcgatcgcccattttcctgtagctttggcaatttctgaagcttttaaacaagcattttctgcaaaagtttctccagtttcatcaacatctaaatctgctggttttaaggttaattcccaaccagaatcagctaaataagcttgcatttcccgcaatttaccggggtttcctgtagctactacgagtgttttagtcattggttattagggaatagggaatggggaatagggaatggggaatagggaatagggaatagggaacagagtttttgacttttgacttttgacttgattcttcccagtcaccagtccccagtccccagtcc

SEQ ID NO: 30 - DNA, 56781 bp, Sphaerospermopsis sp. LEGE 00249
  LEGE00249_45
ttttgaagggtataccggaaaaagtgtgcatttttggggatttcaagagatggcaaagaaattttcaaatctcctcctgactcctgactcctgactcctgactcctgactcctgactcctgactcctgactcctgactcctatgccctcacggaaagactttctcagcaacccctatttaatttaacaaaaaaatatagaaaaatccgtaggagagaggattgatttttttctaggggcgtggtaggctatataacatatttgatataatgggatgtaaggttttttaaaaatttcagcaacactctattataatagaatagtaccgcgccccagagaaaaagtcaacgacccaaagataaaaagttgcgcgactctaattaaaaataaaaaataaaaattgatagattgataatcagtaatttgatgaaaacagaaaatgcaaaaatggtattaacatcaactgatagtaaattattaagactttcgcaaggacacctcaacttactagaaacctgtccgcgtaaattccagtataattatttagaaaaactgacgacacccacagatcccaaacaagaaaaacatcagattgcaggtagtcgttttcacctattaatgcagcagagagaaataggtttaccaattaatagttttctggaaggagatcaagaagataaagaattgaaaacattgaaaacttggatgacagattttaacgaaactgcaccagaaatattaacacctgatattaataatcaaaccttccgagaaagtgaacattatcgaactttgcaaatacaaaattacctagtgacagtagtttatgatttattaattgcagatcaagaaaaagcacatatctttgattggaaaacatatcaaaaaccacaaaaaagaaatgatttagctaaaaattggcaaaccaaactttatctgtatgttttagcagaaactagcacctatttgctggaaaatatatctatgacttactggtttgttcaggctaaatcccgatctaacaatattccttttcactatgaaacccaaaaacacaaacagacagaaaaacaacttcatcaattattaaataaattaacaaattggttagatgattatgaaaagggtaaaccatttccgcaggtagaagaatctaaaacttgtaatttttgtcaatttgctaaacagtgcgatcgctttgctgatcggaggtatgactcaaaaactttagtagcacccgcaattaataatctacctaatcttgatattattgaagaagtagcactatagcagggaactcttaacagagaacaggaaatatagcaaaaattaaccaaataaatccaataaatccaataaatcaaataaatcaaataaatcaaataaatcaaataaatctaaatcaaataaatcaaataaatcaaataaatcaaaaaattaacaaaattatgaaaacctttgatgaaaacgatacaatttatgttcgggaattaggaattgatgacatagcacctgtttaccacttaggtgaagaactatttaccagtgatttatatccttatttataccgtacctgggatgaatgggaagtaataggactttataatacagatccagaatattgcttagttgcggaaacagaaagtgaacttgcaggatttattttagggacaataattagtaaagcatcatggacctatggttacattttgtggttaggagtaaatcctaaatttcaacgtcagggagttgcagataaattagttgataaaattgtagcgcgaatgattgaagatggggcgcggtttatgttagtagatactgatcctacaaatactccagcagtgaaattttttaatagaaaaggttttggtaacattcgccaacatattttcttatcaatgaatttgagtaaacatccatattatggcagactaatagattatgaacatcaaaaagcagaaagggcgggttataggcgcacacgaactacaattcgttctcgaaaatccgaaggtattcctggggaaatagcgatgaatcccttagtgaatgaatcatcaatagatttaattattaatgaggaataaagagaggagtcaggagtcaggagtcaggagtcaggagaattttagattttagattggattcatgaaatacaatccaaaatccaaaatccaaaatataatcaccaatcaccaatctctattttaaattaattcaatgcagtggattttattagaaacagaacaaattcctgagtgcttcatccaagcagttaaacagtacacacctttatcaagtggtatttttgctgcacaattattatggcaaagaggaataaaaacagaattagaattagccagttttgtgaatttccaaagttatcaagctgcaagtccttttgaatttggacaagagatgcacttggcggttaaccgtttaaaaaaagcggctatatctggtgaaaaaatagcgatttggggagactttgacgcagatggtattacctcaactgcggttttatgggatggtttaggacaattttttattcaacatgaacaattaacttattatatccctaatcggttaacagaatctcatggtttaaatttagcaggaattgataatttagcccaacaagattgtacattaatcgttacttgtgacacgggaagtacaaatattgatgaaattatttatgcccaaaaattaggaattgatattattgtcacagatcatcatactttacctgctgaacgtcctccggtaactgcaattattaatcctcgttacttaccaaaagaacatccattatttcatctttctggagttgcagttgcttataaattagtggaagcattatatgaaactttgccagatgtaccccaacgtcccctagaagatttattagatttagtagcggtaggattaattgctgatttggtgcaattaagtggagattgccgttatttagcacaagtaggaattgaaaaattacaagcagattataaaaaacctgttgttgaaagaagacgaccaggggtaggtagattattagaattatgccagaaaagtggcgatcgccctacagatatttcctttggtttaggtcctagaattaacgcagttagtaggattcaaggtgatgctagtttctgcgtggaactattaaccagtcgtgatatacaacgttgtcaagaactagcagaagaaacagaattagcgaatacccgacgcaaatctttacagaaagatgtacaaaatcaagtattaaaaaaaatctcccaattagatttatcaactaccaatgtcatagttttagaagatccacaatgggctaacggtgtgttaggtttagtagcaggtcaaattgcccaagaaacaggaaaaccgacgattttattaagtacagaaagcggagaagatgaaccaaacaaaccacaattggcgcggggttctgccagatcaattaatggtgtagatttatatcaattagttaacgaacaatcccatttattacatcgttttggtggacatccatttgcggctggtttaagtttacctgtagaaaatatccccttatttacagatgcaattaatcaaaaattacggcaatctttagggggaataaatctcacacccactgtccaagctgatgtggtggtgacagttgcagatttagggaaagatttatttttagaactgaaacttttagaaccttgtggaatgggaaaccctgtaccaaaattactgattaaaaattgttggtttgaaaatgcttggcatagaaatcaacaagatataaaaggtaagaaaatacaatatattaaaaccgagtttgacattagagatgattctagtaaaaatccttttcctggtatttggtggggacattataaagaagaattgcctacaggtaaatgtgattgtattgcggaaatagattttaatagctttaaaaaacgttatgaaatcagattaattgctgtgcgtcctagtgctgatttagaagtgcaaactgagaaatcagcaatgattttagattggcgaaatcaggatgtttcggaatttactgtagatgattcaatattaattattaaagattgtcccacaacttgggaggatgtaagagcttggttgagaaaatcggtttataaacaacaaaaactagctttagcttgggcaaaaccagaaaaccaaactccccaggaaatttggttaacgttggtaggagttgctaaatttatcagtcgcaaaaatcagctagttacccgtgtacaaatattagaaaaactgggtattagtgatcctagtttatatttaggatttcaggctttgaaatatttaggttttactattgaacgtcaagatcgttatctacaaattacgtggaatgaatttatcaatgatacaactaaggctgaaaatgcagttaatcaatttttagccgcattacaagaagaacaatttcaaaaaaaatattttgccacagttcctatatctactattcaggcgatcgcttttaatggtttactttgataacagtaagatataatcaatttacctacccataatattatttgcagttatggttaacacttctgtaaaaactgcccataattatcctgattatattccgcctttggaaagtggcgatcgcctgactcgtccagaatttgagcgccgttatagtgctatgccaaatctcaaaaaagctgaattaattgaaggagtagtttacgtggcttcccctctgcgttttgaacctcacgccgaacctcatgctaatttaatgggttggttgtggtcttataaaatagttacacctggtgtcagactgggtgacaatgcaacagtaagactagatttagacaacgaacctcaacccgatgctgtactattaatagatacagcctgtggtggcaagtcttatataggcgcagatggttatatagaaggcgcaccagaattaatcgcagaagtagcagccagcagtgctaccaaagatttatatgataaaaaaagagcctaccgtcgcaatgaaattgaagaatatatagtttggcaggtttttgaaggtactgtaagttggttcagtttaaagaatggtgaatatatagaactggtagcaaatgaacaaggaataattaaaagtcaagtatttccaggtttatggctgaatgtttccgcattagtaacaagaaatatgtcacaagtaatggctactttacagacaggtttaagttcaggagaacatcaagattttgtagaaaaattagctggaaatagttatatatcctgaaatatccgttgtttcacccgttctaaaacggctttctcctcaacagatagccctgcaaataacatttcatatattaatggtacacctaattctaactcctctaaaagatgatactgactaaatacatcctctggtgttccttctaagatcaatcttcctttatccataacaaaaacccaatctgcccaacgataaactaaatctaaatcatgggtagccattaataaagttgtgccattaccatgaatttttttgagcgtattcatcaggttacgagtgtgttttatatctaaatatgctgtaggttcatctaatattaaaagttgaggttctaacaccatgacatcagctatagaaactcgttttttctgtcctaaactgagatgatgtacaggtttttctgctaaactatctagcccaaattcacctaatattttctcgactctgatttgaatttccgctggagataaacccaaattacataacccataggagatatcttcttcaacagtagatgcgactaattgctgttctggatcttgaaatactaaaccaattttttgccgtaattttgtcagatagtttctatgataccttaacggttcattcaaccatttaataattccccgatcaggttcatataaaccattagctaataaaaatagcgtggttttaccacaaccattttgaccaattaaggcacacttttttccagagggaatttttatatttaacccatttaaaactgattgttgtgtacctggataggtgtaatatacctgttcaaattctagtaaatattcctgcattccatcctaattctattgctattaagactacacagccactaattgcttcaataatatatcgtttagataaatgataacgttggggatgccagactctaaattcttctgtcattccccttgctgctaatcccaaagaaaaacgatgatattgttgtaaagtacgctgtaacaattgtcctattaatattgctaaacttctcattcctattttccagttgcggtagccacaacgagaattttgtgctatccataattcattggctgtgtttagaagtatgaaaataaaccgatacattaataataataaatcggttaaaattgctggaaattttaagtatcgtagcgtttgtaataattctgtaaatggcacagttaacatgagaaaatataaacaagaaatggctgcaaaggcacgaaaaaaaattgccaaagcttgtatactgccactgtgactaatgtaaatataaacagcaccaaactttaaaccataaaataaatctctttgaatttgtgaaaagttagcgaagttgaccatattaattattaatgccggtaaacttgtcaaccagaaaaaactagcaaaaattaacaaccgcaaatagattttcagaggaattttagcatatactaccgtccaaatacccatccataatgatagtaaaatttgtacaaatggatgggttaaaagtgcaagtaacagcgtagtaaaggcaaagatgattttatgtgttgggggaatttgtcgcagttgattagtataagctaaagtatctaattttaggctcattttgtagacttattcttcatgtttttgttgttgagaacgtcctttatacaaaccaataacataaccaattactcccgcacctatggcagcttgagcagaaaataataaactagctacttctccactcggaggttcaaatattgattgaaaccaaggttgatatgcgggttgaatttcactaatggcggttttggcttgatcatctgcaccaccaaattcagcatttttgactaatattatgggagcaaacgctaaagcgaaaacagctaagactaataaccaattattgaatccttgtttagactgattcattactttgagtttcccgtttgattaactttagcaattctaattcttgaggattataggattgtaacaaattccataccaacaccgttagtagtccttcactaatagctaaaggaacttgagtaatagcaaagataccagcgaacttggtaaatgaagcgataaacccaccaacaggtgcaggaaaagctaaagccagttggatagaagtaataatgtaggtgagtaaattagcgatcgctgctgataaaaatatagcaattctttgtttaccactacaccgaataatgagatgatagatccagtaagcggcaaacggtccagcgatcgccattgaaaaagcatttgctcccagagttgtcaaaccaccatgtgccaataacaaagtttgaaataatagtaccaaagttcctaaaactgtcatcgtcaaaggtccaaacagcaccgcacctaaccctgtacctgtggggtgagaacaactacctgtcacagaaggaatttttaacgctgacaagacaaaagtaaaagcaccagctaaccccaacaataacttcaattctgggttagcttgagtaatgcgagtcaaacttcgcaaaccgaaaacaaaaaatggtaatgctacaacccaccaaaaaaccgcccattgcactggtaaataaccttccataatgtgcatagcataggcaggtttaggtaaaccaactactaagtaaaaactaataaatcccatcagggttagactcatccaaccccgtttttttagagacataatctgtacctcgcagattgatgtaaaagtattgtcatcggcgggcatcctgacttaacctaataatggttcacagttgcgggacagcgccggacttgcaccgaactttcccccttgcgtccaatgactgctcctcatcagaaccgatgggagtaacaatatcatgactaacgccagttgctagtaaagttttgcaaatatagcaaaagtcaggagtcgtatgagcgaagcattcgggcgactaattatcaattagacatctccgaaaattaaaggcgaagccatagtacaataaagtatcggagccacgctccgatactttatttcggtggttgtggctcactcgattttcttataaatttcccggacaatactaccaccaagcacaaaaaaggcatcgacaggctgtgaagaagcaaaaactaaggttatagtagggaaagtcagccaacttagcaggatcaaacacaacccaaaagcaatatttcgtaacaatcgccacagttttctcaatctcatcagctaagaaactaatgatttgatggtaggtttgtgcttcataacatagaaaattaaagctttattgtttaatattgaaaaatccagccatcaattcaacaaagcgctatcttaggaaaaggatcttagttgaaaaaagaaaggagtgatgaaattcacacaaatgctgtggctgctttaacagtaaaaccacttccatcccagcgatatttattaataaaaagaccgtaattcccacatcatttacaaaggaaaaaatgatggattaatcttagattaagcatagctcataagtagagtataaaaacttaaaaatttcaggaaagcctgattgctaaactgtcaacaatacaattatttattccatctgtatacatgaatcaatctgcgaaacgtcactcaccgctccaagcagccttgattggtggagcgatcgctacaactgctactatatctttatttggtcaagcttggacaaagtgtgttcaagccgctttacaagatagtccaaaagcgttagttgaccaagtgtggcaacttgtaaatagggaatatgttgatggcaaatttaatcaacaagattggcaagcaattaggcaaagcttgttaagcaaagaatatacctctaatgaacaagcttatgtagctatccgccaagccttgcaaagattgggtgatccttacacgcggtttatggatcccaagcaatttgaagccctcacccgtcaaacatctggagaggttacgggaattggcattcgcatggaaatcaacgaaaaaaaccagcgattgacagtggttgaacctatagaaaattctccagcccaaaaagcaggtattaaaacaggggatgaaattgtagcgattaacggtaaacccactctcaatatgaaagtggaagaagcatctaatttgattcgtggtcaagcgggtactgccatcaccttacgactgtcaagaccgggaaaaaatcagtttgatgtcaagctgacgagggcaactatcgaagttcccatagtaaattataccctcaaacaagacggtggccgtcgcattggctatattcggttaagggagtttagcggccacgctgcggatcagatgcgaaaagcgattcgtgacttgactcgtcaaaacgctgattcctttgtcttagacttgcgtggcaacccaggcggtttattacaagcaagtattgaaatagcgcggatgtggctagataatggtggcattgtcaagacagtagaccgtgtgggaggtagtgaagaaaccaaagccaatcgcacagccttgacaaatcgacccttagctgtacttgtagatggtaattccgccagtgctagtgaaattcttaccggcgcactcaaagataataaccgggcagtagttgtaggtagtcaaacctttggtaaagccttggtacaatcagtccatgaactgaatgacggttctgggttagctgtcaccattgcccactactatacccccaaaggtacggatattaacaagacaggaattataccagatattcagctagatttaacggaagcacaggagcgtcagttagctgctaatcccaatttaattggaactctaaatgacccacaatacgctcgtgctattctggctctctctaatacaaaatttgcccaacctacaacaccttctcaaacttctcaaaatactcaacctttgagtattcgcgctgaagatttgaaattttaattttaaggagtcaggagtcatccaattttagattttggattttggattttggattgatatccactaaaaaaaagatccctgatttctccaagaagtcggggatctgctattatttatactataagcagagttatcagacaattagaacataacttgccttaaatcttcctcatccccagtacccaatcttaaccaactttcgctaaattagagaaaggtaaatcaacagcaaatctaagggaattttcaatgtcagcacaactgttactggtagatgatgaaccagggttacgggaagccgtgaaagactatttacaagaaagcggctttagtgttcaagttgccagtaacgcccgtgaaggttgggaattgatgcaacaaaatacacctgatttggtgatttctgatattatgatgccccaggtggatggctatcagtttctcaaacaactgcgagaggatccacggtttcaggcattaccagtagtatttttaactgctaaaggcatgacaggcgatcgcattcaaggatatcaagcgggtgttgacgcttatctacccaaaccatttgatcctgatgaattaatagccattgtagaaaatttactcacccgtcgcactgctcaagccccagggataggagaagatagtgaaaatatggacattgccaaattagcccatgaaatttccaaaatcaaagatttgttaagtcccagaactgccattgcccagactccacctccatttaaaattgatttaacccccagagagcaaagtgtattgaacctagtagcacaagggttgatgaacaaagaaattgctcgccgcttagaaaccagcgtccgcaacgtcgaaaaatatgtcagccggttatttagtaaaacaggtactaatagccgtacagaactggtaagatttgctttagaacatggactagctcagtagtagccaaacgaaaaaagaatattaccatgatcaagaggatttacagagacagctttctgattcaaattgaatgaaaacgattaataagattggtaaaatgcacctggttgagtttgctatcaaactctactaaatgggttcttgtggtagaaatgaaaccctaagtttttgtgaaatttccctgagtataaattttcaaccaccctaaccaaaaatttgagcaagggatgagcgaatcaacagacatccaggttttgaggtagtgcaactggcaggggtatagataatcttcttggttgtgttgtagagtgactttatttctctctattgtctattggctattatcaacaaagtttcttaagcgcatcagttgtcgtctcatttgaggtgatgctttgaactcagaaacctcctgcgcctttacagacgcttgtagtgtttccaaaaagtcatcagatccctcagtgagtgcgtctagtagcacctgcaaaagctgttcgcgatcgcctaacagactcttttcctcaatcaaacggaacttgagatgtatttcgcactcataaacacctacttcgagattattgatttgacgcggtaatgctttggagttcatagttttgaggattcctttactgggtgtttatacaggtgagaaactaaaatatccagaaaaaaaattctttatatttcttttaaatacaaagaactgattgaatgtaagaggcttttctcatccatcaaatttgcgttcaatttctcactcccccctatttttattccaagtggttttttactgtctaggttttgatattcccgtggtagttttggcatatctaattcatacactattattcagtttttaagattctatacaataaagtttctgtaagaacttgtccaacctttttaaaagtttttacatcaactttatggaaacgtcaataactgtgcaactttttacgctaatcatagtgaggttacttatggaaattagtgattattttccctgtgttatcagccagttaacattttaggcaatttaggttaaatcaacaatgtgttctttttgatatgtaaaaatttaaggggtaagatagtcagtttgtcaactgtagaaattcggttgtagatcatcatatatacactgaactaaattagtttagcccagaattttttccaattcttactggttctaaatattactggctatgtcgaaaaagatattttcaactcaaagcttgtaagttaaaacaattaaggtgagggagagcagttaaaatagttgcagtgtaattagccgaaatcttacacctttttatggataacccgatgctgctcaagtccacaacccgtcatattcgcatttttgcggcggaaatggacaaagatgaactagttcctagcaatcacgtcttgacgttagatgttgacccagacaacgaatttaactggaatgaagacacactacaaaaagtttatcgtaagttcgatgaactagtagaagcttccagtggtgtagacctaacagattataacttacgtcggattgggtcagacctagagcattttttgcgatcgctcctacaaaaaggtgaaattagctacaatctctctagtcgcgttactaactacagcatgggactaccccaggttgcatctaacgccaataaataagatggagagtggttgttgatgagttacaagatttataactacatttataactctataactcaccaacaaattaggtgtatggcaaaactacccccaaagaggtagctatcctggagaaagaggagaaaaggcaagggtgcagggtgcagggtgtagggaaaaagttcaaagttcccagttaataattcccaatccccaatccccagtcccaatctcctattatcattgagtacaaaaacatcagcggactaaattaccgctactcatgctgttgaataaattgccaatcgctgatcggttcgacaaatatggaaaatgacgcggcaacgctttactgcccaaatgaatattgtcaagctgccaaccccttgacccacaagtattgccagcgatgctccacacccttacccaagcgttacctgtgggcagtggcagatagtgtgatcctgggtagtcctggagaaattttagccgatcgctatttggtcattggtcaatcaatcattcttgatctcaaacctggtttactaccccaaatacctgaattagataatttataccacatcaaagcttatctaaaactcataccttaccgcttgcatataccacaagtgtatgggatcatctctctccatgaaggaaaatctcaaccagaaatcttagttctagaaaaaccgcccctgtcagttgatagtacatatactcaagtacatctgtgcagccagctaacagcagcgtgggatgatgcctcatcaatgcggcaaatgaattggctgtggcagatagcgcatttgtggcaaccgcttttgactgaaggagtcggttctagcttattagacccctatttaatcagagtggaagggggtttagtgcggttattagaattgcgttttgatcagcaaacagcaccaacattgtcacaattaggagtattttggcaacaactcctcaaaaatgccaagccagccatagctgaattcctcaagcaaattattgatgctttaattgatggtgaaatccactcatctgaacaattaattacggttttagatcaaggactgacaggattggggatcggctcctgtcgacgaaactcgccaatcccaagcactaacattaaaattattacccaaacagatacaggaccttctcgtcaacgcaacgaagatgcttgttacccacctagtggcgttctcgtgagtaaacctccccagcaaaccgccttagctattgtttgtgatggtatcggtggacatgagggaggcaacatagcatcaaatttagccattgaaactattgagcaagaggtgatgcaactcacttctgttgctgatgaaaacatagatcccttcagaatcatcaataatttagaacaagcagtagcacttgcaaacgataaaattagtcagcgtaatgatacggaacatcgccaaggacggcaaaggatgggaactactctagttctagccttaccgattggccatgaaatgtacattactcatattggtgatagtcgtgcttattggattacgcgccacggttgctatcaagttaccttagatgatgatgtagcttctcgtgaagtacgattgggctatgctatttatcgcgaagcattacaacatagtggttctggctccttgatccaagctttaggcatgagcaagagcgcctcattgcatcctacgtcccaacgatttatcattgatgaagatgctgttttcttgctcacctccgatggattgagtgattttgatcgagtagaagagttgtgggaaacggaaattttaccaattcttggcggcaatacaaatatagaagatgttgcagcccgactcatagaaattgccaacactaaaaatggacatgataatgtcaccatcgctttagtacattaccaagtcaaatacggtgaaccagatatcattctccaagcggacattccgactattacttcgacttcgctcagtaaaagttcagccagtaaaacagtagatttgacaccaagaaccacaaatgtaactgctttaagcaatgagtaccagcaacctcaaggaacttcagaaaccaagcctcggcgtactgccaaactaccactacagttgttgattattttaggtgtgcttttaggagccggtggactgggatattggctcaaaatccaacgagaaccacaatcgacaattacgccatcaactccgtctgcaaccccacaaccaacaacaacgacaacaccaacaccacaaagctcagaaaacccacaagatttatcgccatcaactgatgaccaaactcccgcgtctgagtgattctcatcaccatcatgggatatcataatgctggtgatcactaaaattaaaattcactttccagaaaaaatttgttgtcaaaacttgttgtcaaaacttgttgtcaattattagttcttagagtttagtttccacaaatccatgtcctgcctaaatctggcgatcgctcgtctagtaaatactggaaatgataatttcgccatttgggtcgttaaagctccctatcccagtggttatgttttgcgtgactgtgttttttctcctgaactgagtcaaatttggcaagaatggcagcaaatgtttgctggtcatagtcctctggatattgctttggcttcgacatctccaggggctaagtacatgacaattgatttgaatttaccccagggcggtcaaactaccagtccctacagtagtcggttgatgcaatatttaggcatcagtttatggcgttgggtattcgatggacaaattcttggtagtctagaacgtagtcgcggtatggctatgggtcaaaataaacggttgcgcttgcgattggaaattcgtgaccctgatctaattgcgctaccttgggaaattatgcagcgcgaacccggccaatcagcaatatctctttcccaagatattttatttagtcggactattagtgaagttgaacctctgccaaatttacgaacagatccagctttaaaagtcctgttggttttggggcatgatgataaattagaattggaaaaagaagctgctattctggaaaaaattttgtcagaatgtagtccatctcggaaaaattctgtatcagcttgtctggtgaagacactcttgcaacccacttcacaacagttaattcaagagttagaaacccaaagctacaacgtctttttttacgctggtcatggtatgccagaccctgatggtggtttattatttttggggactgatctgaccctcaatggcatcgaattagcccaagtattgacccgcacaggtgtaaaattaggggtgtttaatgcctgttggggagcgcaaccagcagcaattaatcaacaagctatacctgcaagtagtttagcggaagtcctgattcgtcatggtgtccctgcggtactagcgatgcgggatgaaattgcagaccaagaaagtcacagttttattcaagcttttgccgaagctttgcgatctcgtaaaccaattgatgaagcagtggcagcagctagacaagaactgttaacagtatataagtttaatcaaccagcttggactttaccagttctctacctgcatccagattttcatggtgatttgatcaaaagtgtggatgaaggaattacggaattaccagatactgctatttctggtataaattctccaatacctacggcttctttgcgatcgctttcaccagaaggtaaaacttggttactacgttctggtgtcactcgtattggtcgcactaaagataatgatattgttatccctgaactctatgtttctaaacgccatgccgaaattctctgccggaatattatcgctggttctcaatcagttcccacttattacctgcaagatttttctacttacggtacaacttggtgtttaagtccaaatggttggcaacaaattctccgtgaagaaatacttctgacatcaggtatgaaattaaagtttggcagtgctaaaggcgaaacatgggaatttgtgattgaagatatgaacagtgattggtgattggtgattgggaagagtaactaatgactcatgactaatgaattattttttgcggaaatttgaatattccagttgtagctgacaacaagaataaattaatgctaattaattgtgaggtgaaacatgattaataaaatccatgagttagatacttgtcaatttttaccatcgacagtagatttagaattattagcagcactactacaacctgaagatgagacttatccgtgggatctggctgatcaagaatcagaaccttattttcatcaactagaacagcaatttgaatatgatgatttattaggagaagacctgactaggcgatcgcaagatttttatcagaatttagacaaaatttgggatcaagtttaccattctaaaactgaccgtgatgaacaaccatctaaatgtataaaatcagctttacatagtgtttttgctccttctgttcctttaagttggctaaatactatcgctcaaaaagcatcggaaattatcaataatgtagaacaatctacaagtgagaaattagtagaatgtgtgcaaactttactgccaaatttgctcacagaagacttatttgttttagcccgccgttttgaacctgctatgcgaagtaatgaccaacaaaaattggcagttataatcagcaatattgaaaatcgagattggacaggtttatcagaaatagaacaggcgaaagttagtttagcaattgctgattatgccttcaaagaactttctaatttacaagatgaatcgtaaatttctgccgatacaaaaaagctaactagggtttgctgaaaaagtctttttgtgggggcaggcaagaggcaaaaggcaagaggcaagagtttgggctatctgttatccctagattttatgacttattcaactcaaaatgcacggttttgggagtatccccctcaaaaatcttgcacctactttcttttttagcagccccaaccccttgatttatctaggttttacatttattcagcaaaccctacttaaagaaaaaatcgttcctatccaactcttgaaactgtcacctgtcacctgtaacctagccttcacagataactttttcaacaaaccctagctagggcttgcgctaacagagcttgtcgaagtgtcgaagtgttccctgttccctgcctccacgacaagactttgatgcctgacagcacgccacgcgaaccgcaaaccctacttgtgttcgaggaagcgagtagcgaaattttgcgatcgcgtgggtgataatgctcgtgctttgagaattgcggccatcaaaaatgcataagataaaacaccgacaaccaccaacagcaaagcattaatagaaccagtagcattccataaagcatggagagcggaggcgcttaaataaccaacagtgagaatttgccaacccatcaaaggtttgaggacagctaacccgataaaatagcctaaatagccgctataagccatgtgtccagcgacagaacctaaaatgcggggaattaatagttgtaaacccaccagttgacctgcgcctactcctgattgttgagtgacattttgtgtaatcattggtacatattggccaagagtttccagcaaagtaaaacccacagcagaagcagttcccagaagaatgccatctagtggttcccaaactccgatccgttctttccaaggtgatggtactgaatcaccgatgaaatatgcagctaatattggtaatgccttgagtaattcctccattaaacctgcaccaaagaacattctgatcagtaattcagtgaaggtaatagaatcttgagatgagggtaaactaccaggcaaaatcacgcgaaatacaaagataaaaaaatctaataaaggactgactaaaattagcattgtactcactgccatagctatgagtacccaccaaggcttttgtttaccgcaaagttggtaaacaaagtaataagcagctgaggcgatataagagccaacaattacttgatttgcttggggatgacctacagtaccgaacattaacactacaaagattactgttaatattcctggtatgaggtaagctttgcgagttaaatctttaccggtggaaatgatgggaaatagctgtgtaaaactaacagagtcatgctgtgagtgcagttttccatttttggtagaggctcttgctgtaccttggttagttgtgattacggttggttgggaaacaaattcatgctcaaatatgaattgtggaccatcagcacccaaagaaatgcgatcgccgtggtgtaattcctgagaacctaccaaaagttgaccatttaaaaaagtaccattggcactgtttaaatcgcaaatcacccagctaaatctgccatctggtgatagggagaggggacgaaccactgcatgacgacgagacaccatcctgtacatcatggcatccaagacaacttggcagctaggatcacgtccaatgaccatttcttgattcggaagcagtgagtagcgagattctgactgggaagctacttcattactagacactagccgcagaaatgcattctgtcttgcgtttttgcctgtcatcgagttagtgagtgtgtctaaacaaattcatggcttatgccatgctacgcgatcaaatgtttgggtagtagacttaatcttagcctgagaaacggcagcacctccgataaatacaactatagcttcactaaccgatgctttgctccagttcaaaatacaaaatgttgaattaacagcagtcaggagtcaggagtcaggaggctaagttatctgacattctgctattgctttgggaaagttgttgttttcatgtccagaacggctgagtttaattagagcgaacctttgtaattgagttaacttttcccacttttgtaaggtaatagtcacacctattgcttgtgctttttcctgaacactgggtggtatagttgcaatgtccatccaagggggatgaggttcaatgggtaatttagtagcttggttgcctgtatgttctaaaattaatttttgtaggtaatcttggtaaaattgaatttctgtttctttggcacaaggtaattctactaaattagcacgttctaatgtagtcatctgatgccaatcagacaatttcaatttaataccacaggtatccaatttgtaacggacttgcatcggtatacaacggagagagtcaacaaaatctgcttcaaattcaaaaaattcggctgtcatgggattttagattttggattttagattttggattttatgtaagtaatcagctatcagtaatcagcttttacctataagtgtggattaggaaaattttgcagatgaaatttgtgttttttagtatcttgctgactgctgttatcgtagcgtgccgttaggcattagcttacagccaaatgctgaaagctaattttgatcattagacctactagaacgaattattaaataactaattgaaagagcaagtacagcaattcctaaaccaataatatcaattcctgtgactttttctaaatctagaataataatttttcgggcaacagcaattaaagaagtaacaattactaattcaacttgaaaaacgtgctttttgagataagctgtgatattttctaaaatttctaaagcaatgagaatatttaaaaataaaccaaataccttaaatacaactttcttaaattcaccatagggcgcattaaataattcgttgaacagaaaaatacttaaatctgaaattgccacaaaaataactattaccatcaaaatggagagaatcttagaaactattacttcgatgttttcaatgacgtgcatgaagttatcgtcgctagtccaagctttaatttgcttaaataatctcttcattagtttctcacactccaattgatactccaaaataaatcttcaagaatcatcaagaataatcgttactatagattatggactatattagccgttcttgaggaatttacttagaagtttaccattgtgaagcttaccattgtgaagactgaagctgataatttttggtggtaatttctacagaaattggaactaactgcacagcacaagcttttaattctggttgcaaagaatcaggacatgattcagaatgagttaaagcgttagcttcagcatcatctgcccatagcttaccccagtgcatggggacaaaaacagtaccgggggatatagcttgagtgattttagtaggaaacttagctgaaccacgacgcgatcgcacttccaccacctgaccatcaacaatacctaatttttctgcatcacggggatgaatttctagaaacggttcggggtgcatttgtttaattttatcaattcttccggtgcgggtttgggtgtgccaatgcccgtataatcttccagtagttaagataaaaggataattaggatcaggtggttcagctaaacctttagaataatatgcaccaaacttagcgcgaccatctgaagtatgaaaacgtaaatttgtatataaacgttgagtttctgaatttttaccctgagaaaaaggccaatgagttggaccatttattgataacaactcatgacttaaaccagacatatcacaaggacgatcacaagttaattgaacaaattcgtgataaacttcggcggaattttgaaagttaaacttatcttgaaaacctaatcttctgcccacttctgcgaaaatttcccagtctggttttgcttcttttggtggtgtttgaaaagctgaacataacgttactcttctttcagaattagtcataattccagttttttcaccccactgggcagcaggtaataaaagatgggaataagcagtagtttctgttggataataagcatcttgataaatagtaaaaggagattttaataacgcttttttagtccgttctaaatctggcatactcacagcagggttagttgcagctatccataataattggacatttccagattctaaacctgtaatcatatcccaagcatttaaaccaggaataggtgaaattttacccctttctaaacaccaaaagtcctcaacttcttggcgatgttctgcattttttactaaccgatatcctggtaataaatgcgataaacctcctgcttctctacctcccattgcattaggttgacctgttaaagaaaaaggaccagcaccgggtttaccgacttgtccagtcattaaatgtaaattaataatagttctaacttttgcagtaccttcagaagattgattaacacccattgaccataaagaaagtacagattttgatttaccccaatattttgcagccgtttctaaatcttcaatagaaataccacattgacgggtaacaatatcaggagaataatgacgaattacttctgcataagctggaaaattgctagtacaatcatcaataaaagctgtgtctaaataattccatttcattaataaataggcaattccatttaacaaatcaatatcagtaccaggacgaatagctaaatgtaaatctgctgcttctgcggtaggagtgcgacggggatctacaactaccatttttacatgacgattttttttatgatatttagctaatctgttaaatacaatagggtgacattctgcggtatttgttcctattaaaaaagcacagtctgttaattctaaatcatcgtaacaacaaggagggccatcagagccaaaactttgtatatacccagataccgcactagacatacagagacgggaattagcatcgaagttattagttcctaagcaacctttgagtaatttttgggcaatataataatcttctgtttgaaattgtccagaaccatacatacagattgattctgcaccgtgattaactaatgttttttgaatattttgggtgataatattcaaggcttcgtcccaggtaatgcgttgaaaatcttgatttaatgattttctaaacatgggataatgtaatctatttttgtgaattgcttcggtaattgttgcaccttttacacataccattccttgacttgacggatgatttttgtctcctctaactcgccaagttggagttccatcactatctctattcgtagcttttccatgttgtgcgggtggggaaacttctaaaccgcaaccaacaccgcaataagggcaaagtgtttttgtaatttcattcataatatttgggatttttttattgcacgcagagacgcagagagaggttgttgcatcttctttgcgttctaccctgcgggatctcctgacggagattgcgtctttgcgtgagttgttgaagaatttactcttcaatgtgggcgcaacgacgatagagaaagtctaaagcgtaatttctcaaatgataatattctgggttttccatgatgaggcgacggttgcgaggacgagagaagggaatttctaatacttcgccaatatttgctgctggtccgttggtcatcataactaatttatctgctagaaaaagtgcctcatcaatgtcatgggtaatcattaaaactgtgacttgatgatctgaccaaatttgcagtagttcttcttgtaattcttctttggtgatggcatctaaagcaccgaatggttcatctaaaatcaggacctggggacgaatagctaaagcgcgggctatggctactctttgtttcattcctcctgatatttgattgggtttcttttgggctgcttctgttagtcctaccattgctaaatgttctctaactattgcccgtttttcgggttgggttttattaggaaatacggaatcaacagcgagataaacgttatcaaaaacattcaaccaaggtagtaaacaatagttttgaaataccatcatccggtcgggtcccggttcggtgatgggttgaccttgtaaacacactacaccgtttgtaggtttattaaacccagaaaccatatttaaaagtgtggattttccacaaccggaatgtccaattaaacaaataaattcaccttcacggactttcaggttaatgtcatctagaacggtgtatggaccttcggcagtggggtaaattttgttgacaccatcaattactaaaaagtcttcttgtttctgggtttgtaattgttgaactttggttttgttattgaagtttaatgttgtcatgattttttggtaataataggtaattaatggttcaaaaaactaacgactaaataaagacttcctcgactcgaagctggcgtttaatttccgaacttttgagatattcaattggttcggaagggttaaagattttgccatcaaatagttgaattgtttcttctcgtccaatatctaaaatgcccatttctcttgcggctgcaccaaatatatctggacgacaaactctatcaatgacttctacccagtttttggggaaagctactaaaccccatcgggctaattgggttaatatccatagcatttcattacggtcgggatagttggctttatggaaataaaattggtggaaagtttgttttcgatggtgattattttgtgggtaattatctattaaagcagaatctaaatctaaattagttaatgtgagaacttcttcccggttacgagtgtcgtcacaatattcacaggctgctaatagggcttttattaatgctaaatgtgtttgtggattttcttgcgcccagtcttctcgcactcctaaaattttatcaggatgtccattccaaagttctgatgtgatggcaataatagaacctatattttctgcaattgcgtgtgtgttccaaggttctccaacacagtaaccatcaatttttttatcttttaaagcattcaccatttcctctggtgaaattgtcattaaactgacatctatatctggttcaattcctcctgcggctaaccaatagcgtaataataagttctgcattgatgcaggatgaaccacgcctaaagtgtgggttttatctagatcagcgttgatggttttttgaaattctgctaaatttgttactccattattaaataattctttgctgaaggtaatggcgctaccattgcgagaaagggtcatggctgtaaccattgaaatgggcgttttaccacctgcacctaatgtcattgctaggggcattcccgctaccatttgagcagcatcaagttttcctgtggctacacctttagcaatttctttccagctattttcaggttttagattgacttctaaaccatattcagcaaagaaacctttttcctgagcaattattaaaggtgcggcttgggtgaggggaatatagccaatttctaaatgtactttttctaaatttttgtgagaaataattgctggggctgtgggttgtttttgccgttttttcgcttgtttttgttggttgaggaagtagatcatttcgttccgcaagttgtaataactgggatggttaactacttccaaacgttgacggggacggggaataggaacttctaaaatttgcccaatatgtgcttctggaccattggttaacataacaatgcgatcgctcaataataaagcttcatcaacatcatgtgtcaccatcacagaggtaattttgtgttcattacaaattttcattaattgttcttgtaaattacctctggttaacgcatccaaagcaccaaaaggttcatctaataacaacaatttcggacgagtagctaaagcacgggcgatcgcaactcgttgtttcatccccccagataactcactaggatgtttgttagctgcacgtcgtaaacccaccagatcaatatgttcttctattatttctcgacgttctcttaaaggtaaattttgatgtacttcatcaacagctaaagcaatattttctcttacagttaaccaaggaagtaaggaataattttgaaaaactaccatccgatctggaccaggttctctaacttctctaccctccaaagtcaccccaccaatactagctctatctaagccagcaataatattaagtaaagtggacttaccacaaccagaatgaccaattaaagaaataaattcaccctggcgaattttcaactctatattttttaaagcgatatatttaccaccattagggaggttaaatattctgtctacgtggtcaatttctaaaaaagtcttcataggtttagcaatgggtaattggtgttcgtttagatccccgacttctttttcaggctgtaattaaattataaatagatgttagaagtcggggatctgagaattatttgtgttctgtttgcacaactttatcagcaataaaatccaccattctatctaacaataaacccaccaaaccaacataaactaacgcaataataatctcactcaaattagtttctgtactcgtgttgtaggcatcccaaataaacgaaccaatacccacaccaccaactaacatttcggctgcgacaattgccaaccaagataaaccaataccaattctcaaacctgtgaaaatataaggaacagttgccggaaacacaattttcaagaaatatttgtccttacgtaaacgtaaaacgcgagccacatttacataatcttggggaatattttgtacacccacagttgtattaattaaaatcggccaaattgaagtaataaaaattacgaaaattgccgaagggttagcttgttgaaaagcagctagagaaataggcaaccaagccaaaggaggaatagttcttaatacttgaaaaattggatctacagcattatataaaaacttattcaccccaataaatattcctaaaaccacccctacaactgctgctaaagaaaaacctaaagctacccgtcctaaactggtcaatatttgccaacctaaacccttatcactgccaccattatcaaaaaaaggctgaataataaaagggtcccaagtttcagaaaatgtttcaatcggaccaggtaactgaaaaccaggaattaaacaaagtaattcccacaaaaccagaaaaatcaataaaccaaagattggtggtattactttatttactaaaaacttattaattaccttctgctgtttactactaactctacgacttccaacactagcagccatttcttactccttaattctcttttctctgcgcccgtgaacctgaaaaattgaataaacataccaaaggtaacgggtaggggtaattcatgaattacccctactacttaaactttcttaagttgcaaactctttaaatattcctccggtttttctggatcaaattttaccccatcaaaaaatgtttccacaccacgggaagaacttgtaggaatttctgctgctgctactcctaaagctgtagctgcttttttccataaatcttctctatttacctgatcaaccatttctttgattttcgtatctttaggtaaataaccccaacgaatttcttcagttaagaaccaagtatcatgactcttatagggataggaagcattatcagcccagaatttcatccgataggcaaagttttcttccttgcgtccatcaccataatcaatattacctttagaacgttctaaaatgtcagccacagccacattaaagtattttctgtcagcacaaattttacacatttcctctttattttctggcttttcacaccattgttgtgcttccataattgccattaataatgcttgtgctgcgttaggatttttgtcaacccaatcttttcgcatagcaaaagctttttcgggatgatcattccataattcaccagtagttaaagcagtataacctaatttttggctaactaattgcgcgttccaaggttcacctacacagaaagcatcaacagtaccaactttcatattagctaccatttgtggtggtggaactgcttctaaaaccacatcttgatcaggattaataccaccagcagctaaccaataacgaatccataaatcatgagtaccaccgggaaaagttatggcaactttcatagatttattatcagctttggctttatttacagcgtcttttaaagctttactttgtaagccgacttttaaatcttttaatttttcagccacagaaatagcttgaccgttggtatttaatctggccaatagatacattggaactttatcattaatggtcattaaataaggcattgggctgagaatatgtgcgccatcaataccaccaccagatgaggcaatttttagattatctcttgtgactggccaggatttttgtttgctgacttctacatcagtcatgccatatttggcaaagaaacctttttctttggcaataattaaaggtgcagaatctgttaaagcaataaatcctaatttagctttggttgtttctacttttggagcattactaactgtggaattgttagcaagttgggcagtggaagaagctgcactatctgttgttgctgactgagagttattagatgaacaaccgtgcgctataatggaagtcgctgccgctaaactggaagtaataataaattttctgcgggaaatattgctcattttcaactctcagttgttcgattttagattttggattttagatttatgctaatagaaaatcattgcccaggtttgattggggttttcaatgatgtctatatttttcggtttatttaatgggaaattaaggcttcttcccgaacttttgcaccgaagttttgaatgagtatttcttttaatatgggttgtacatcttcacaaggaacgcttttttgtacacaagttcctagtttagcatctttaccaacttttccacccatataaatgtcaacaccttctactgtttgcccatttttacggacttttgtacccattaagccaatatctgctacttggggttgtccgcaagaatttgggcatcctgtccaatgaatacggacgggttttgataatattaattcccgttctaatgctttactcatggcaacggcacgattttttgtttctattaatgcgaagttacaaaattgtgcgcctgtacaagataccactgctcgcattaataaaccaggattaacaccaaatttatttaacaatggttcagttaaaaatgtgtttaaagctgaatcgggaatattaggaataatcgcattttgttcaactgtaaatctaatttcgccactgccataaacttcacctaaccgggcaagttgaaacatatcatcagcagataatctaccgacaggaatgtttaaacctgcataatttaatcctggttgtttttggggataaatcccaatatgatcccgtttttcccaatcaatttcgtcttttggtgctgcgggcgtgaatgtttttccccagcgtttttctacttctgaacggaatttttctaaaccccattcatcaattaaccacattaatctggctttttgacggttgagtcgtaaaccatgatcccggaaaatttcgacaatggctttacataaactaactacttcttcgggtttcacccaagcatttaaaggaatagctgcttcacaacgtttaccggagaaaaaaccaccgactaaaacattaaaaccaaatccttctttaaatgctggtacaaatgctaaatcattgatttctgcgtgaactgaattatcttttcctccagttacagcaatgttaaatttacgaggaagattggtaaattctgggtttccttcacctttattagtcagcatatcttgaatttgctgtactaattctctggtatcatacaactcgttagcatctaaaccagctacaggatcacctgtaatattacggatattatccataccggattggatggcggtcaagccaacggtgttaaatttattaaagatgtcaggaatatctgaaaaattgatcccgcgaagttgtatattttgtctggtcgtgatatctgcgctgccgtcgtcaccgtaacgctgtatcacttctgctaaaacatacatttgactgctggtgagaataccgttaggtatccgcatccgcatcataaattttccgggtgttactggacgaaaaaatacacctaaccattttaggcgatggttaaggtcgttttcgtccattgcttcccaaccaattttcacaaattcgctgatttcgtctttaactgcaagtccgtctttttcagctttgaatttctcgaatttattcagtttttcggtggtagttgctgtttctgtcattatgttgttttttgggaacaggactgagttaattgtttatccgtgttcttatcgatgctgtactttccacttttaagaaaacaactgatagtagtttcctggttggtggttgtagcaattcgatattgataaattaaggtgaatttttatcacaattcgtatagcttgttacgaaatttctagaattatgcagaaaccggatatgggtgttgcgggttttgcataatcaatggtttttatgggtgcaagtgaggataaacagtaatctttaaaaatttgatagaataggaataaatgatgatttcaatggaagaaagattatgttattaactcaaaatcaacaagaatctatgaaagaaagaattgagaaagttgtgaagattttgatggaagaacgcccgttatttaaggaagaattaaatgcagaggaaatggtggaagagttatgtaatttatttcagcaaaacttaccaattgcggagtttaatagtatggattatcaggaattgaagtcccgttgtagtgggattatgacgacagaagcagtagcagggacattaaatgaattaacccccgaacaattagcaatttttgatgaaatgattaaacggaagtagcgaaaatgacttatttattagataccaagattgtctccttagaactgaaaaataatcccataattaagcaaaaactaaaacaatttcaatcgcaagaaggattattgagtatcagttgtgttacttactttgaagttaaaagaggcttgtttgctgttaacgcaactaaacaattagaaagatttgataattgttgtaaggattatcaaatcatttttttggatgatttagcaattgtagaaaaagcagcagaagttcatgcgaatctcaggttaagaggtttacctattcaaacggaagatattttaattgctgcaactgctattgttaagggttttactgtggtttctaatgatagtgatttgttgcgggttgatggtttaaagattgaaaattggctagatgaataaggaattttttgtagaggtgaagcaaaagcttaatggtgtcaaattaattgaaaaagaacatattatttgtttgcttccgcacccaccatgaaatgatagcgaagcgtggcgttagccatatttcatgtgtgcatttaatttgtaaacttgaacaggcaagatgcctgttccacaggagctaagaatatgagtattatacaatttagctgcgtaacagcttatcaatcatctgagtcgttaaattaaggctacaataaaataaatagtaaaatcctcaccagtatatggttacatcaacacaacccaaaactcaaaccctatacgatcaagattattacctgtggataaaaacaactatcaaccaacttcgcacaggacaattttctgctgttgatttagagaacttattagaagaattagaaactatgggtagaagtcagaagcgaacaattaaaagtttattaattaagctgcttgtacatttactacaactcaaatactgggaacaggaaagagaacaaaatcaaggacattggaaaggtgaaattagaacatttagaatacaaataaaagatgaaatcaaagatagtcctagtttaaaaccttacattttagaaatatttgatgaatgttatcaagaggctagaaaagaagcatcagatcgttctcaacttccccttgatacattccctgttattcccatcagttctttagaacaaatcttagatgaaaactggtttcagtgaaaatgattaaaatgagcgaattttcaaagattatctaatttcctcccctggtaattacaaattgctggggatgttgtactgattttattaatggtttagaatcctggcagaaaagatatttagttgagaaaaccaaaggtgagaaaatattgttttcaatgttgcctatgtttaagcaatatgtgagaaattatcatcaaaattaactgttacaattaacttaactacattgtgctataatcataatccaatcaattaacggtaaaatcatgaaactaaaaatcattgtacatcaagcagaagaaggcggatattgggcggaagttccttctcttccaggttgtgctactcaaggagattcttttgaggaacttttacaaaatttatatgaagctattgaaggctatttatcagtagatatcaatgatattcaactacaagataatgctaaggttttagaaatagttatatgaaatcaatgacgggtaaggaattagctaaaatcttggaaaaacatgattgggtattaattagaatccaaggaagtcatcatatttatggtaaaccgggtatgaatgtaaaaatatctgtgcctattcatggcaataaagatattaaaataggattactaagacatttattaaaacaagcggaattatttgattatcttgattaaattcacgacaaaaattaatttatgagtaataataaacaatagtcaaaaatcaaaccataaattacagcatctatgaaacgtcgtgaatttttcaactgggtaggtttaggtttattagcaagttctttacctgtagcgatcgcagcttgtaccacagatacaaccacaactgcatcttccccttctcagggtgctgctaaagactggcaaaaaatcggtactgtggcagacttagacaaaacagggcaattattagtaccaaattccccagtaggtgcagtgttggtagttggtacatctaaagctgcaaaaaatttaattgctgttaaccctacctgcactcatcaaggttgtactgttgcatggaaaacagataaaaatcagtttgtctgtccctgtcatgatgcaaaatttgcccgtgatggtaaagtgcaagcagcaccagccgaaaaaccactaagaacctacctggctaaaattgaaaacgattctgtgtttgttaaaccagcttactaaagatttttattactcaatcaagcatcaagatgattttattctgtacgggtttagcaatgctaaactcctactgaattttgactgcgatatcagaaatttttacaaaattttgtatcataatctactaaaataatgtaatcaacttgttaactttgttaagtttattaaaattgagaatgtaattcctgctacctatgcgtttagagcagttacaagcttttttggcgatcgcccaaactggcagttttcaacaagctgctaaaaaatgtggtgtcacccaatctacaattagcagacaaattcaaggtttagaagcagatttaggtgtagaactgtttcacagaaccacccacgctaaactcacattgggaggtgaacgtttacttccccgtgtgcggaaaatttgccaagaatgggatacagcaatttcagaattaactgatttaatggcaggaaaacagccagaattatgtattgctgcaattcattctctttgtgcttcttatctaccgccaattttacaacagttttgtcatgattatccagaagtgcaattaagagtaacatcattaggaagcgatcgctctctcaaagtcctcaaagatggacttgtagatttagcaatagtcatgcacaatcgctttttgatcactggtaaagaaatggtggtaaaaacattatatgatgaacccatagaagtattaatagcagcaaatcatcccctggcgaaatttgcatctataccttggaatgaattaattaaatatccccaggtagtatttaaagatggttatggaatgcagcgtttaattcaagatagatttgataaactaggaatcaaattacccgcagctttagaagtaaacactttagatgcttttcgcggagtagttcgtcaaggagagctaatagctttattaccttattcagcattaatagaagcaaagtttgatcctagtcttgccgtccgtcccctagccaataatagtaatttaggtgataattctagtttgactcgtcgcgtagtcatggtaacaactcaagaccgtttacaaattcctcctattcaacatttttggcaattagtaagtgataacattcccccaaaattagaacaacagcgcacagcatcttaatattttagattttagattttagattggaaataactgaagaaaatccaaaatccaaaatataatccctattccccattccctattccctattccctaactaatgactaatacatttaaagaatttatccaaaaagtcggtagcggtagtcatacttcagaaaatttaactcgcactgaagcttataccgccatgaaaatgatgttattagctgaagctaaacctgcacaaattggagcttttttaattgctcaccgtatgaaacgtcccacaggtgaagaattagcaggaatgttagatgcttattatgaactaggaccaaaattacaaccaattaataataataaaattcccattgtactaggtattccctatgatggtagaactcgcactgcaccaattaatattattacagctttattattagcatctgcgggacaacctgtaattatgcacggaggaattcgctatcccacaaaatacggtttacctttaatagaaatttggcaaaatttaggattaaattggactaatttatctctagaaaaaatccaagaaatatttaataaaactcatcttggttttatttacacacctaaccactttcccctcactaacgctctttgggaatatcgagaacaattaggaaaacgtccaccattagcgacaatggaattaatttggtgtccttatgctggtgatgctcacattatcgccggttttgtccatccaccaactgaggctatgtttcaaactgctttagatttacaaggcgtaaaaaaatatacctttgtcaaaggtttagaaggtagttgtgacttaccacgcgatcgcacagccattattggcgtgtcatcttccacaacacaagaaatagaaaggttacaccttgcaccccgtgaatatggttttacccccaaaaacgtccccctgggtacaaccgaagaactcatcaaagatatgcagtctgttctagctggaaatgacagcgaactgatgcaaacaactttatggaatggaggcttttacctatggcactgtggcatttctccagatatgcaaacaggtatagacaaagccaaagaattatttagcagtggtgtagtcgcagctaaactacaagaggtaattgaatgaagaatgaagaatggggaacaagtaatatttattctgtaacctgtaacctgtcacctgtcacctacagataacaccataccttcacaagctaataaaacattaggaaaagcagacttaacttcatcctgaattttatccagaaaataatcatcatcatctgggtgatggtgagatataaccaattttttcacattagcactttgcgctaaatctactggagttttccagagtaattcagcatattcatgatttttattggtaggcggagtataagtagcattagtaaccaataaatcaacaccttgaataatgggcaaaatctggttttgctcttctatatcaagactattatgtaaatctgtagcgtaggcaatactgtggtttgcccaatttatcctgtaaccaattgatctctgagttttattaattagtgcggttgtaatttttacctcacctaactccacagcattaccaggagtcatgttataaaacaacaactctgattgcatcatttgtaaagggtagggaaagtgaggttggagcatctgatcacagaggcattgtttaattgatgcaccattggaagcagctgtaccgtaaatatggaagcagttgtctgtaacaaatgcgggggcaaaaaagggaaatccttggatacgatttgattgggagttggtaaaaaataaatgggcttctagtacctgttgttgttgccaagtttttcccaaaatgcgtaaaccagtacctccatcaaaaatcaagcgttttcctcctacgtatatttctacacaagcagtattactaccatagcggcaggtgtgactgtttggggtaggaattaaacctcgtacaccccaaaatttaacccaaaactccccagcagggtgattgagcggaggagttaattgatcattgacgtagttttgggaatcagaacgctcaagatttgacattttccttgaacttagagcttactgagcagatcatcgtagtttcttacttctaacatccggtttttttcgtccacaatgacaactgtaggagagtaatgttttaactcctctagtgtaaactgcccgtaagccattataatcaagcgatcgcctataatgcctagccttgcggccgctccatttaactcaatgattcctgagttagctggagccgaaattgcataagtaataaaacgctggccattagcattattaactacttgtacttgttcatagggtaaaataccagctttatctaaaagaacttgatcgatactgatactacccacatagttaatatttgcccctgtgagggtacagttatgaattttagccaaaaggagagtgcgctgcatttcgttttgggttgttccgcaacaaccgggagtagttttattctattaaacaggtttgtggttggtaatgggtgattggtaattggtgattggtaattggtgattgggaagaatgaatttattacccattacccattacctattacccattacccattacccattaaccatcatttattattttttagcagcagcgatgcacttttcgactaagggtgcaaccctgtctacatcctgccaaccgagaatttctgttacttttttctccaaatttttgtaagaacggaaaaattcagcaatttcttctaaacggtggggatggatgtctttgagggagtttacattggcataacgtggatctttggcaggaacacaaagaattttttcatcgcgatcgccaccatcaatcatttccaaaaaaccaattggtcttgcaggaattatacaacctggaaaagttggttcatccattatcaccatcccatccagaggatcaccatcatcagctaaggtgttgggtataaagccatagtcataagggtattttaccgaagaataaagcacccggtctagggcaaaagcgtttaaatccttgtcaaattcgtatttatttttactcccacctgctatttcaatcaaaacattaatcacacccggtttaggttgggcaggaataagagataaatccacaacaaaactccttcgcttatagtgagaatccaggtagcacgcagtttggctccccgtgttagattttaggacaattgtgcatctgttcccaaggctttaggcaaaaaatacagatccccgacttctgggagaaatcagggatctgctaatgtatggttaaattaaaattgctacagcacaactaaactggatgtagaaacagttatttattgcttctggctaaatcgtatgtcagggttgacggatgatgattgggaacaataggtgaagaatagtgggaaatgataaatacaggtagggtcagggtcacgagtgcgatcgccgttcccacaatgtctgccacacgttgggaatatgtgtcgggaggtttggcagactggctatttgaattcatacaaaaaatttttttgttcctatcacttgtagttatactctctttcagagagtttcatttctattttagctatttttctcaagtcaagctgctaactttaaagaaacttatcctgttgcaaaaatggcataggagctttttatacatggcatttttgttacaaatgaaatatcaaatatctgcttcttcatggagtaattaatattttccggaaattcgtttaactacatcaaaatcacttgatttagtgatcgtagtcacagaattattaattttattgtgcatttacagcaattttagattttagattttagattttagattttctcgttcccagtctcagactgggaatgcaatatagaggctcggcctctgattttaccaaaggcagagcctttgaaaattcattcccatacagagtataggaacgagaagcgagaaaatttaggatatgtttgagcttttatcctttagcataagcatccattggttctttaataaaccgaatataaagatgcctaaaagtggatttaattacacgaggcatagcaaaatcaattggcattaagttatcaggtaaacgccaatcttctatttgcaaaagttcaggagttaaattaggaaaatcaatttcacttaattctggacaaatacccaatctttgagaagctgcaatagtgggaacttgtaaaggatcaaccttgagaatttctaacattgcccgatctaaagcaaacacattatccgatcctgctaaaacacctaaatcacgaggttcaccaccactaggaccattaccttcatgaccaacaataccatctaaaattgttaaagtagggttaattgctctagcagtttctaccaacatttctccaaaccttgtggtatctttccccgcctcaaaatgccaccaagctttcatttttccaggcacacaaccaaagagatttttcacacccaaagttacagttaattgcatatgagatttaactttgggtaagttaataataacatctgcttccatggcttcttttgataatagcagatgattaaaatcattattcacagtttgataacgtttaccgtgaaattccacaataggaatattcaactcttctacaattggtaataaaccattagctgtagcgacacctttagcactaccaaaagcgggactatctcccaaaaatggtttacctcccacttccatcaccatttcagccacagcgcggactaattctgggcgtgtggtacattctttagtaggacgagaaccggtgagtaaattaggttttaaaagtacgcgatcgccccttttcacaaaagctgctattccccccaaaggttctaatagcgtggttaaggattctcttaaagcatcttgttcgtaagatttagcccgaattaaactaacggctggttttggtgtctgcataattcattaataattgcgttaatatatcacaatatagactatttttagctaaaattcaggtaagagggaaacaatatataacactatgtgaactataattactgatattggtactttgagagattcctcctttaccgtcagtaatgatggtattgctatcgttagagttcgagctttgtcaatcaatgctctccaaatgttcagcgtaaatgaatcagataagttaactatctttgacaataattaaactggagtcgtataccaagatgtttacagggaaaagctggcagaagttgaaaatatttgcaggtgcattttgtgttattgctgtaacaccgttttgtgaagttaacacctctgcaatggccgcagatacagtaattatccgctatggtcctctaaaagaatctgtatccttagcagagttgaaaaaagctgtggaaactggcaaattaccagatagtttagaactttacaccaaaagaatgaccgaggagcaacgccagtttttactgggaggattgaaaaacacaatccccatcaatgttgtaactttagatagattaatcaatacacaaattggtacgactattctcagtgatatctctacggctattagtcgtaaggatcaagccggggtaaaggccataaaggcgggattaattttaggggctaattccccgcaaggcttatctgtcctcagttttattgaggcgtatcctagtaagcacttacaaattaatttgccccaggcgattaatgtactgcggaatttgaatagtgcctttttccgcacccagcagtttatgttggcgatcgctcccctgcttaaccccacagaagtgaaatttaattctgccttagaccctgcggaagcaggaaaagcagaagtacaaacacttagcttaagttacaacgaccaaaagcgacaacgacaaattcccgtagacatttacttttcaactacggcaacggtcaataaacccctaattgttttttctcatggtttgggttcagtgggtactgacttgcgttatttagcaaaacatttggcttcccatggatatgtagttgcagccccagaacatcctggaagtaatgaagctagtagcaatgcagcttaccaaggtaaaaaacgactggttgaaccccaagaatttttagaccgcccccgtgatattagttttatcctggatgaattggaaaagctcaatcaatcacctaataatcccttacaaggtaagctggccactaataatgtcatggttgtgggtcattcctttggaggtggtactgctttggcattagcaggaggtgagttacaaattgatcacctcaaacaaaagtgtcagcggaacttggtccaagggagtttaggtgaggtggtgcaatgtgtagcccaagaattaccagaaaaaacctatcaattgcgagatgggagggtgaaacaggcgatcgctcttaatcccatatcatctctgatgtttggtgatagtggtttagctaaaatacaaatccccacattagttttcgccagttccgcagataaaaccacccccgccttaacagaacaagtcctgagttttgctaaaattcgttccccaaaatggttagtaggtgtaattggggctagtcatttaagtgtcaaagaccctgattttaccgtagatcaaagttacattcccgatactcccatcttgagccgagaaattactggtgaacaggctaaagatgtgcgtaaatttctctgtgctattaccctcgccatggctgcacaattaacccctgaagctagtcaatatgcgccttttctcacgtctgaatatgctcaaatcgcctcaactcgtcttttcccatttcgcatagtccgagaacttcctcctcaagttctggaaatgatggcgggtcagtaggtatctgagtatatcaaatgattcctacaaatgatgataaactttaacttgtatgggggtttagcattgctaaacccctacccaaaacccctacctggttataaaggtataatcgcactcatttgttctaaatctaaaacagaagctaattcttcctcagtcattaaacccttttccagaacaatttgccggagagactttcctgtttccaaagactccttagcgacagcagcagcattaagataaccgatgtgagtatttaaagcagtaactaatgctaaactaccttcagcgtaacccaagcatctttctttgttagcagtaattccttgaatacaactgttagttaaagccgcaattgtattacctaaaatttccatgctgtgaattaaattataggcaataagaggcatcatcacatttaattctaattgtcctgcttgtgctgctaaggcgatcgcgctatcataacccatcacctgaaaacataccattgatgtcatctctgccattacgggattatacttacctggcataatagaagaacctggttgcactgggggtagttgaatttccttaaacccggttttgggtccagagtccatcaaacgcaggtcatgggagattttaactagatcctgagctaaatttcgcacagcaccggaaacattcacaaacgcacccatactttgcattgcggccattaaatggggtgcaggctctaaaggtatttctaatagttgggaaagcgtctctactacccgtttccggtattcaggatgggtattcattcctgtaccggctgcacttccacctaaaccgagaaccatcaaatcaccggaagcggtgtataatcggttttgatgttcgctgagaatgtgcgcccaagcgcggaagttttcacccaaacgcacgggtacagcatcctgtaaatgggttcttccagatttcacgatatcgtaaaattccaccgcttttgcttctaaggtagaaattgcagtttctaaagcagggtgtagagtttgggaaagtgctaataaaccaccgatgcggatagcggtagggatgacatcgttggtagactgaccatagttaacatgatcattaggactaactcgtttataattacccttttcatctcccaaaatttctaaagcgcggtttgcgagaacttcgttaatgttcatgtggtgagatgttcctgcacctgcttggtaaacatcaactacgaactgatcacggagtttaccggctaaaatttcatcaactgcttgaatgatagctttgctaatatctgcgggaatacaatttaattcaccattgacgatagcggtagcttttttgatatataaacctgcgttgacgtaggtgggtaaaggttgtaaaccactgatgggaaaattttcaacagcgcgttgagtttgaataccataatagacgttattgggtatttggcgatcgcccatcgagtcccgttcaatgcgaaaatctgtattgttagtcatagtgtgtcgtaggttatctgaaaatacagatcatcccatgtgaggatgctaaaagcctaatttagcaatcttttttaggataaacttgggttaaatactaaaaggtaaaaatattatggtaacaacacccacccgtaaattaactttagcagaatttttacaactaccagaaaccaaaccagcaagcgaatatattaacggagaaataattcaaaaacccatgccacaaggtaaacatagcattattcaaggtgagttagtgactactgttaatagtgtagttaaacctcaaaaaattgctttagcatttccagagttaagatgtacatttgggggacgttccatagttcctgacatagcggtatttgcatgggatagaatacccatagatgaaaaaggtaatattgaaaatgcttttaatacccatccagactggacaattgaaattctttctccagaacaaagtatagccaaacccaccaaaaatattttacattgtttaaatcatggtactagcttaggttggttaattattcccgaagaatataatatcataatttatccccaaaaccaacaaccaatttatttagaaaatgaaacagacatattaccagttcccgaaataatgaaagatttacatttaacattaggagaattatttgaatgcttaaaattaaaatagataaaaaatattcccgacttattataaaacctctttgtgttctttgcgtactttgcggttcgttcataaaaaacctgtaataaaacgaaaaaaccgaaaataacaaactttaaaaatcatgaacataccaaacacaatcaccttttcccgactcataggaataccatttttattatatggcttatatattcccacaccccaagctaaatgggtctgtttaaccatctttttaatagcagcattaacagactggttagatggatatttagccagaaaactgaaccaaattacagacttaggaaaatttctagatccattagtagataaactcttggtactagcaccattattagtattagtagaactaggaaaaatcccagcttggggagtatttataatattagcacgagaattagccatagcaggttggcgtgttaatcaaaccactatcagcggtgcgaatatttggggtaaattaaaaacagtcagtcaaattatcgccatagctttactcatagcacctttatcagcagcttggcaaattccggctttgattgccttttggatatctataatattaacagtaatttcgggaataatttatctaataccagcaaaacaagaacactaaacaagaacaaatcaaggataaataatatgtatcaaacagatccaccaattcctgctcaagaaaccctccctaccatgtatgatcttcctagtgagtacgtggaggatgcagggttgccagacgaatttcatcttttacaaccaagactgttaacagataccttttcacctcctaattatcccccagatcaggtatttgtagcgtcagatttaaatctttattatgatactcgtaatccattatggtataaaagacctgattggtttgcggtggttggtgtttctcgtttgtttgatcaacgagaattacgtttaagttatgtaatgtggcaagaaatcattgctcctcttgtcatggtagaattattatcaccaaaaacagagaaagaagatttaggcagaactttgagagaagttaaccaaccgcctacaaaatgggaagtgtatgaaagaattgtcagagtaccttattatattatttttgatagatacactgataaattacaagcatttcaattagtggcagatcgctatgaagaaatagatgtgagttctggtaaaatttggatgccaggaatagagttaggtttgggactttggcaaggcagctttgaaggtattgaacgtttatggttacgctggtatgatagcacgggaaactgggttcttacccctgtggaaaaggaaagaaaacggggtgataaattagcggcaaagttacgagaattgggaattaatcctgatgatttgtaattacaggtgacaggtgacaggtgacatttaagagggaatagagaataggaatgttctttatcctgactcctgactcctgactcctgactcctgactcctgactcctgactcctgactcctgactcctgactactaaattaaacagctttcaaaatctcatcatctacagaaaaatcaacttctgttttatcttgtccactggctaaataatcattgtttaaagaatcttgtaaaccagaaattaaatcatattccggttgccaatttaaatctgtcatcgctttatttaccgatgcaaaaaagtgttgtacccgcatggggaaagctttacgtttaccaaaatcaaactttttgggatcgtaatgtactattttaagatcagcggcagatttaccagcagcgatcgcacaagcacgggctaaaccatcaaaagtgacaaagcgatcgcctgacacattataaatctcaccaatggctttttcattaccaatcacctgtaacatcgcctgtgctagatccttaacatgacctaactgggtaatgtgcatcccatttccaggaataggaatcgggcgatcgcggacaattctatcaaaaaaccagctttccaaagggttataattctgaggtccgtaaatataagttggacgaatggaagtaaaaggaatgcctaactgttgtaaataagcttccgtttcatgcttacccttgtgacgacttttcggatcaacagcatcaccttcaatgtggggcatttgatcagactttaaatataccccagccgaactcatataaacaaaatgcttcaccctaccatgaaaaatttccgccaagggttgagtatcagccagttcccgaccattattgtcaaaaatgacatcaaaactttcctgcgataacttatcctttaactgagttgggtcagtgcgatcgcctataatctgtcctacaccatcaggtgcgggatgattacctcgattaaacaaaaccacctcatggccagcttttaccagcagttgagtcaagtagacaccgataaaccgagtcccaccaataaccagaatacgcataaaatcccaaatccttataaacacaggtgacaaaacacccctattgttgagattatcaggtaattggtgactggtgattggtaattggggactgggtattgacactctgcgctcctttaggatcgcagattcttagttcaacgagtccacttagctgagatcccttacggtgtctaacaagcgatgaatcataaaactcttgtggtgcgggcatcttgcccgctactggtgtacttcacttatatgaaatctgctgtaaatatgtcatagctaatataggactcctatttgatttttgaacaaactcagtaaacctttattacttcttttctgttccctatttccttttccccgcctctacgagtaaattcataaatcaaaccgaattgctataggtaattaattatatttttcccagtccctagtccccagtccccagtcaccagtcaccagtcaccagtccccaattaatatgtcttcaaaatatgccttagttcatgagtggctaacacctaaagccacaggaggttcagaactcgtagtcaaggaaatattaaatcatgtagatgctgatttatatgccttaatagattttgaatctaccaacccagaaagttatctttaccagcgtcagataggcaaaacctttctgcaacatttacccttagcccgtcaaggggtacaaaaatatttaccattgttaccattagcaatcgaacagttagatttgcgtcaatatgaggtaattttatcttcatcccatgcagtagcgaaaggagtcctcaccactccagatcaactgcacatttgttattgccatagtccaatgcgttatgcttgggacttgacctttgattatctcaaccaaagcaaactaggaaaaggtggaattggatgggtcacaaaatacttattgcatagtttacgtcaatgggatgtattgagtgccaaccgcgttgattactttatcgccaactcccagcatacagcccgcaggatttggcgttgctatcgccgagaagcaaaagtcatttacccaccagtaaacatcgaaaacttgcccttctgcgctgaaaaagaggatttttatctgatcgtttcccgattggtgacttataaacaagtatccttgattgttcaggcttttaatcaactcaaacgaccattggtggtgattggtataggaccgcaaatgaaacaactgcaagcgatcgccagtcctcatatccaaatactcggatggcaacctgaggatatggtaaaaacctatatggctcgtgccaaagcttttgtatatgcagcttgtgaagattttggcattgccttagtagaagcacaagcttgtggtactcctgttattgcttatggtgctggtggtgctttagaaaccgtgcgagatattcgcacttgtatggacaccggaacaggtatattctttaaagaacaaacagtagcagctttggtggaggccgtagaaaagtttgaagtcaatcaggattttttaaaatctgagtatataaaattacacgctagtcagttttcgagacaggtttttgcagatcgttatctcgatttcctgaatcagtgtcaagaaaaaagaccttccctgtaataatattcaggatttttgtatttattttccaagcttttgggaatttccccccagaatcactgccttttagctttaagattgggactatgtgtggtgtggattattaaggagtatgatgactgcccagagttcacttctctccggcaagcgatacccacgtaaagatgctaatgcctcgacgcatactttagtcaaacgtggtcaaaaatcaaaaccgcccaagatcaaacccagaggtttatctgatcagggtttaaacggagagttagccaaacgactgttcgatattgcattttctttgtcggttttgatcttgtttttcccgatatacataatcttggccttactgattgctgtaagctcacaaggtccaattttttatatccaagaacgagttggtaaaaactatcgtccctttaaatgtatcaaattccgcacaatggtaacaaatgcggatgaaatactcgcccaaatgatggaaacttccccagagttacgtcaagaatttaccagcacttttaaactgaaaaaagacccccggatcaccaaaattggtcacttactgcgaattaccagcttagatgaatttccccaattttggaacgttttaaaaggggatatgagtgtagtaggtcctcgccccctagtagcggaagaattgtccaaatatggctctcatattaatgaagttttaaccattcgtccaggcattactggattatggcaagtatctggacgtaatgatataccttacccccggcgagtccaaatagacctacactatgttaaattcagaaatttttggctagatttatggatcatcttgaaaaccattaatgtggtaatcatgcctaaaaataacggggcttattaacgccctatggctaacgccacactcccctatcaggagtatggctaatgccaaaccccgcacttcagcagttagttcagcaacctaatacaaccactggcttaatcaaaaaatgctacaacttttattgttaacttgattaattcttcatataaatctatagtttatttggtttttgccaatctcagaaaaattattagaaaaaagcctgaaaccccttgagatcaagttttggatcttggcagacaaacttaaccgctttgtttttatagataatggaaacctaacttgttaaaatggtttttcttaagtatagtagttaacatttgagctttaatagcaactaagacttgtatgtttaaaatcaggcaattttagcaatgagttgctaatttatctagtattgcctgtcaattttacaacttcaacaacaagagataattgggaatgacagaaaaaaaacgagcgttgattactggtatcacaggtcaagatggttcttacttgagcgaatttttactagaacaaggttatgaagttcacggaattatccgccgtacctccacctttaacacagatcgcattgatcacatttacgaagatccacataaagaaggtgtaatattatttctacactacggcgatttaactgatggtactaccctgcgccgcattttagaagaagttaaacccacagaaatttataatttaggcgctcaatctcacgttagagttagttttgattctcctgaatatacagtagatgctgtagggatgggaactcttcgtttattagaagccatccgcgactaccaacaccgcacagggattcaagtacggttctatcaagccggttcttcggaaatgtatggcttggtgcaagcagtcccccaaagtgaaacaacacctttttatccccgcagtccctacgcttgtgcaaaagtttatgctcactggcaaactgtaaattatcgagaatcttataacttgtttgcttgcaacggtattctttttaaccatgaatcacctcgccggggtgaaacatttgttactagaaaaatcactagagccgttgcccgtattgtcgctgataagcaaaaagtattatatatgggtaatttagatgctaaacgtgattggggttatgccaaagattacgttagagcaatgtggctgatgttgcaacaagatcagcccgatgattacgttattgctacaggggaaactcactcagtacgggaatttttggaattagcatttggttatgttaatctcaactggcaagattatgttgaatttgatcaacgctatctcagaccagcagaagtagatttgttaattggtgatcctacaaaagcacgacaaaagttaggttggcaaccttctgtaagcttcaaagaacttgtttctttaatggtagaagctgacttacaagcccttgggcatacttctcctaatggcaatggttcaaaacaaccccaagatattgctactatccgtcaagaattaggaactctgcatttttaagggaataggaaatagggaactcttaacagggaatagttataaatataatattctgaactcctgactcctaatttattcaaattaatccaaaatccaaaatctaaaatccaaaattgaatgactggcttagaactaaacaataaacgtattcttgtcactggtggttccggttttctaggccgtcaagtgataaaccaactgtgtcaagctggggcagaccgtgagaaaattacagtaccgcgatcgcgtgattgtgatttgcgagtttgggaaaattgccaacgcgcagttgaacaacaggatatagtcattcacttagctgctcatgtcggtggaattggcctcaaccgtgaaaaacccgcagagttgttctatgataacttgatcatgggtactcagctaattcatgcgggctatcaagcaggtttagaaaagttcgtttgtgtgggtactatctgcgcttatcctaaatttaccccagttccttttaaagaagaagacttgtggaatggttatccagaagagactaacgctccctatggagtagctaagaaggcgcttttagtccaactgcaatcttaccgtcagcagtatgggtttaatggtatttacctactccctgtgaacttatatggtcctgaagataattttgatcctagaagttctcatgttattccagctttgatccgcaaagttcacgaagcgcaaaccaagggagaaaaacaacttcctgtgtggggtgatggttctcctacccgtgagtttttgtattccacagatgctgcacggggtattgtcatgggtactcagttctacaatgaatctgatcctattaacttgggtacaggttatgaaatctctattaaagatctgattactctgatttgtgagttaatggaatatgaaggggagattgtttgggaaactgacaaacccaacggacaaccaagacgttgtttagatacggaaaaagccaaggaagcgtttggtttcactgctcaattcagctttgaagaagggctaaaaaatacgattgagtggtggcgcaaaaatgctgcataggtaaaaatctagcagtttatctggttatctcgttatctcgttcccagtcttatctcgttcccagtctctgactgggaatgccatcaattgacaattaacaatggacaattgacaattacccttgaatgaaacaattgtcaattatcaattatcaattcacctgtcacctgttacctgttcgcacattgctaaaagttgattcacagctaaacaaaacaaaacttagacgtagtttgctaagaaaacgtcaatctatgactgttcaagattggcaaaaaaagagcgatcgcatttcttcccaactccaaaattcgcctttatttacccaagcaaccaccatcctcgcctatttcagctttcgtcaagaacctgatttaagtccactgtttaccgactcgcagcgtcgttggggttttccccgttgtgttggtaagtctctatcctggcatttgtggcaaccagatgatatactgcaaactggtaattatggtattactgaaccacacccagaagcaccaactatagatcctacagaagtcgatttaattcttgttcctagtgtagcttgcgatcgccaaggataccgtttaggttatggtggtggatattatgaccgtttgttgagttctcccgtttggtctaaaatacccactataggcgtagtttttgattttgcctatttccatcaactcccctttgataattgggataagtgtttacaaagtgttattaccgaatcgcaaatttacatccgataaaatcggagcggcgggattcgaacccacgacctccactaccccaaagtggcgcgctaccaagctgcgctacgccccgttaacttaacttttagattcttgattttagattttggattgaggatttttccaaatttgtgaatctagattttgaatctaacctttattaagtcacttttctaaatatatcaaaagtcgaaggaaaacgcaagggggtttttcaaaaaactttcagcatcgccgctgctgccaccaagcccgttactgcatgagcatcccattgtccttctgcacatcgcccagtgttgaggatcaagcgcaaactataggagtggggataaccttctacctccatccataataaatcagtttcggcttcacaggcaattttttcttcatccattaattctgtcgctaaatgcttcatcgtatctgcaagcttatttaataagcgacaaaaatcatctaattcaactttggttaattcaaccgcccaattatctgtaccaactaaacctttaaattctggtgcgtctggattccaacctatacgccaaccagttccgcttttaattactttttccattagttattggtcattagtcattagtcattgggcattaggttattaatatttccctgtcacctgtcacctgtcacctgatgatggagtattaaaaatattaaccaggacttgtactagcttattacgttggttgcgggtgagtttagctatagcagtgcgatcgccctctaatggattttgctttaaggaatcactgcccggataggaagcttcatatataacttcatttgcattcaaatagtcagctaaagttagtttccaatcgaaacgatatataggcactctaccttttacataaatgtggtaacgaatcaaccgactagctaaggtgttattttcagccaccttgccagtttctttactgatatattgattttcttttgacaggtcgggtaattgctgatacactaactgccaaatatcactagggctgattctctgggctacagcaggtgagatgctcagaaaatcgaagtttcctgaaccgaaaatcaatacactcagagttattattgtaattatcagtcctgattgaaaccgcaaaaataaaagttttttctttttcattgattgattttacgataaaaaaactgggaatagggaactaatgacccattcccagtatcatgtaaattacaaatcgccgataatttccggctgagttagttcatcagacatctcaataatggctctaagtacaggtttcatcatgctatcttcattattttcaaaatcttcgtaacgccgacgcttggcacgattagctacttgcacagtaatccgatagcgatttgaagcggcgctaataagatcctcggcacggtgcataatttgagattgggttgtctcgaacttggaacgcttgagcataatttgtgtttgttaggattctcaaccagtttagcagtaccaaaagaaactgagaaattggaattgtatatattataacaataccttcgccaaaactctgaaaccctattgatatcgtaacgattttattgggtttcagacctatctttggaaaattggcataggtattgttataaataacacataaataacacataaataacacataaataacacataaatttttgatctgtacttatgtctaaaaagaattttatcacttcccaaaaatctctgttattcatactcggcgcgagtctgactactttttttagtttatccatccaaccctcacaagcgggaaatataccccgcccttccgatgcaccactagaactaaatttattgactactccccaaggttctgtcatcaccgctaacactattaactccacaagtttaaccatccctagtttgtggtgggctaaggaaatctctgaaaataaacttttagataactggatagcatatccagcgtctgaaaatgaatcagcccgtgtagacttgatcgtaaatcagcaaatttggagtttattagattatctagaacgctaccgatttgtgcatagtctgggtaattatactcgtaatttgggttataacatccgcgttttcaattatcaaaaagaaatgttagcaacttacacctgtaaactggatttaaatccagacctatgtaatatccaaatgaccaatcaaagtaagttgggtttaccaattgagaattgagaattaagaattgataattagggtttgctgatagcgtagcgtggcgttagccatataaaactgaaaagtttacacgcaaagggttttagcgattttgactttcaaaaagtgcaagcttttaagccttcctgttcgcactgatttacccagttttactgctgcttctttgagtctttgagcataggtagtgcgatcgcctgcttctaataaactttgaataacctccatttttagtttcgctgttacagcagggtttcaatagttttgattttttgtgacaatattctgttaaattgtcaaataatttgtccgcgttgccaaactacctagaccacagcgacaaaaattgcatcaatcagatcgggtgatggggaggaaaagatttttcccagtccccagtccccagtccccaatcacccatttcctaaaaactgttacagtctataacgcgatcgcaacataaggtgggttacggtgttagtatgccctaaaaacgttgagagaaaaccttaaccttatggcaactctaactggacaaactcccctcttcggcggtagcactggcggtctactcaaaaaagcagaagtagaagaaaagtacgctatcacctggacaagccccaaagagcaggtttttgaaatgcctactggtggcgctgctacaatgctaaaaggcgaaaacttgctttatttggctcgcaaggagtatggtatcgctttaggcgctcaactccgcaaattcaaaatcactgactacaaaatttaccggattctccccagcggtgaaaccactttcattcaccctgctgatggtgtcttccctgaaaaggtaaatgctggtcgtcaaatggtgcgccacgtaccccgcagaattggtcaaaaccccagtcctgcacaactcaaattcagtggtaaagctacccacgacgcataaggtctagatactagggactggggactggggactggggactggggactgggaattgtagataatgataaatgctgataatttatcattcatcttctataatcatcctcacacccaatcaccaattcccaatccctaatcaccagattatttatgattttccccgacttccaacaatttacaaaactcgctcaacaaggtaattttgttcctgtctatcaagaatgggtagctgacttggatacccctgtttctgcttggtacaaggtttgtgcaagtcaaccttacagctttttgctggagtcggtggaaggtggtgaaaaagtaggaagatatagtttattgggttgtaacccgctttggattttagaagtaaggggagatcaaactacccaaacctatagagatggttcacagaaagtttttacaggtgatccgttcaatgtgttagcggaatgtttagcaccttatcaccccgtaaaattaccacagctaccttcaggaattggcggtttattcgggttttggggctatgagttaatcaattggattgaaccccgtgtaccaattcatgcccaagatgagcgtaatcttcctgatgggttatggatgcaagtagatcatttattgatatttgatcaggtaaaacgcaaaatttgggcgatcgcctacgcagatttaaggaataatgaaaacttagaaattgcttatcaaaaagcgtgcgatcgcattcaagaaatggtaagcaaattatccttacccatatcaccagaaaatactaaattaccttggacatctccccaaaataaacccaaagcaggaatagaagaatacaccagcaatttcactaaaaaagaattttgcgcgagtgtagaaaaagcgaaagaatatattaaagccggcgatatttttcaagttgtcatttctcaaagattatccacagaatataaaggtgatccttttgctttatatcgttctttaaggcaaattaatccttcaccttacatggcgttttttaacttccaagactggcaaattatcggttctagtcctgaagtaatggtcaaagcagaacgagatgaagaagggggaattattgccacagttcgacccattgcaggaacaagaccgagaggaaaaaccaccaaagaagatgaagctttagcagcagatttattacaagatcctaaagaagttgctgaacatatcatgttagtagatttaggaagaaatgatttaggaagagtgtgtgaaaatggcacagttaaagtagatgaattaatggtaattgaactttactctcatgtcatgcacattgtgagtaatgtagtaggtaaattagcagaaaataagacagcatgggatttattaaaagcttgttttcctgcgggaacagttagcggtgcgccaaaaattcgtgcaatggaaattatcaacgaactagaaccaacccgcagaggagtatattctggggtgtatggatattatgactttgaaggacaattaaatagtgcgatcgctatccgcacaatggtattaaataatcaaactgttactgtccaagcaggtgcaggtttagtagcagactccgaaccagaaaaagaatatgaggagacattaaataaagcgagaggtttattagaagcaattagatgtttgcgatgagttttactggttaaaaagaggaaataattgacataaataatgcacacagacacaatcttctaccaaatattcctcactttccacaccctattatttgaaatactgggtgaaccaacagaaaacgccaaagactatcaattcacctctgtagaagtgaaagaaaaagcatttagatttgatgggatttttatgacagataatgtagaaaaacccatctattttgtggaagtgcaatttcaaccaaaaccaaacttttactgggaattaatagcagaaataaacatttatctcaatcaatttaaacctgtacaagattggcaagcaatagcgttatttgcaaaacgcagtttagacgtaggagaactgacagcttatcaacaagaatttattaacagtgggagaattaa

SEQ ID NO: 31 - DNA, 54312 bp, Sphaerospermopsis sp. LEGE 00249
  LEGE00249_46
actggggactggggactggggactggtgactaataactaatgactaattactaattaaacagttcttgataagcttgatgacactgttgataattttctgccaaaatttcattattaccaaaacataattgctcatgggtggtaattaaggtttcataaggctgaacaggagttgcactagaagttagtaattgcagatattcgccgtctgtgcggctaggttgttgaggtgcgatcgctttttcatgcagttgctgtaacatagctaaatatagataacggcaagcttcctgatagttaccctgttggtaaaattcctgggctttagttaacaacaagctgatagataactcattagcttgatttttattctgggaaataaaggcatgatcaaatcttgccagccaagcataaatgtaagtattaaattcttgccataaacgccaaattacccaaacgaaaaataaacccagtatcagccaaaatagaatttttagtaattcagctacccaaggactaattgaccaaccaggaggtaattctggcagggttttttgaaagcgtgaaaattggtattcaaaccattctcctactttttcctgaaataaataaaactgccaaccccagtttgttttttcaaaagcatccgtgttcataattcgtaattcgtaattcgtaattcgtaattcgtaattgttaattttatcacctgcctacccaggtttctaatccttaatttttcgttagtccacgcaggtggactttgcttgtgtagtagcgttcgccgtcaggcgtgccggaggctctattatattcgcctaaaacttttaagacaacctctaaggctagtacggctgcacggaagtcaacaggaatataaaatttaatatacagcctattacagctaaatgaatgaagtacaaaattgaattataaatcctggtcgccaacggattttaatgctgatcactgatagctgactgctataaaagagaaattttcaaatgactatttacttttacaaagtttggcagccctatggctgtttttctaacttttctccccaccctatcgaaattgacggtacttactggccaacagttgaacattattatcaagcgcaaaagtttgctggtagtgaggatgaggtttttatacccttaatctatgctgcacctacccctgaagaagcggctgctttaggtcgatgtggcgatcgcaaactgcgctcagattgggatctggtaaaaactaatgtgatgcgagcagctgtactaaaaaaatttctcactcatgcagacatcagagaagtgcttttagttactggggatgaaattttggtggaaaattcacccacagattatttttggggctgtggagtagataaaacaggtcaaaatcatctaggtaaaatcctcatgagtgtgcgtgaacaaatccgtcagttaatgttgttaaaagcaattaccaattcttgatagcaataccatcattgctgacggtaaaggaggaatctctcaaagcacgcaatataatattacgtgcgccgttagcatctcttgtttgcccaatctaaatttcacactaccaaaagagggttagtagctagtacagcacggcgtaaatagggcttgctgaataaatctaaaacctagataaatcaagggattgaggatgattaaaattaaaattgtgcaaggttttaggtactgtgagcctaagaaagcttgtactttgttagtattggcacaatttccaaatcaaaaaactccttgatagcgacttgtactgagcctgtcctgagcggtgtcgaagggcggtgtcgaagtaagcgtggcgtagccatactccttgaactcctgtaccctcacagataactttttcaggaaaccctaaatagatttgtttcaaaacttaaaatataaatgagtgaatactataaaatagtaataaactagaaacccttgctaataaaatatttctggatgtaattgacctatttactcaacttttcttaaatcatttttccgataaaagtaaagtttaatttcaaaaagagaaagactatagacaaataatttttgaggtgttattttaatagttgaagctaaaaaaaaaagcttccctggcagatcaaacagctagagttgaaaagaaaagaaaagaaaaggaaagacaagagaaaagaaacgtagtaagaggttaaaaagctgttaaattcctatctgtctcgtcgaaacaccgcaacacccaacgcgaacgcttatattccctcaaattagtgagaatcagggggcaatgtaactggttttcattccttgttgatcaaggtgatgaaagaaagtacatccctggatagtataaacaaggggagggaaacaccaagctagtagatgttgggtgttgttgtgtttggtaataaataagaaataatgggtaatgggtaatgggtaataggtaataatttattaccaatcaccaatcaccaatcaccaatcaccaatcaccaatcaccaatcaccaatcaccaatcaccaatcaccaatcaccaatcaccaatcaccaatacgtaagtttgtactacaattgaatagaaaaacagtttaaataacgatttatgtcaattattgcgctcagagcgtggtatctacaggattatgaacctattacggaattggagaaacgccctccagatattcgtttgagtaaaaaaagcctgctaaaatcagggttgcgtgcggattttttagaagatagcgatgaagtcaaagcatcaacttggtttaggcgctatttggaaggtgaaaatatagaattttatattgagggtagtggtggttattgtgtagcgaacattgacttaattagtcatgaaatttatttaactaaacaaagtttgttagcgcagttagaaccaacaatttttttctgctatcaaactgaatatgcaaaatctagtgatttgctcagagaacaactgcaagaaagtttgcaaattttaaatggtaaatcccgtctacccctaacattaatagaatcatcccgtcccagtcatgcaccgctaaggttaaatcgtaccatgatgcggaaaatccgtaagagtttattatttattgcggataccacacctattaccagcattgatgggaaagaaacttgtcaattaattcctagtcctaacgtctgtgtagaaattggttatgcaatggaaaataaacgttctgaacaaattgtactaggacaaatgcaacgtccagaattagaaggacaatttccctttgatttacccacacagcaaattttacaatttagggacggtgcagaactgaataaaatcctcaccatgactatggaaaatcaattagcacgatttaaactatttttttgacaactgtttgtttgaaaactattttcttaaattttttcagcccatttcagatccccgacttctgtgagaaatcagggatcttaattttgagaagtcgggaactgttgagggggaagtcagcgtcattttgggaaagtaagctgttgtgcatttaatttgtataagtggaacaggcatcttgcctgttaaacaagagttcagaacattaggattatacaatttagctgtgtaacagcttaaaattacggtttgttgccgtattttggtacatctggcacttctcccgtatgcttacccttttcattgggggctgacgtggttaacaataggttggatgtatagaaaataatgtgaatttatgcctagaactcccaacgaatatgcgattcacctcctgttggaaagtggtcatcgggaagaagtgcgctttcccactattcaagattttcaaaagtggtatagtggtgaacttgtaccaaagtctgcttctaatgactttattaacgtaccgattaaaaatattcaaggcgaatatatggtggtacgtccttctaagattatagggattcgggtagaaccgatttttagttctagtattgaaagatgatgagaaaaacccttgctttgttttccttgagtctgggaattgcctgtacaagtcctgttagctcagttttagctcaagtaatgattcctctgccagtaccagcaccagcaccagaatcaataccagtaccagtaccagcaccaaatacgcctgaagttttaccagcactgcaacctatttccccggaaactgcttgtaattctcaaagatgcttgggttgggatgagcaactttgggggagaaatggcgatcgccaagctttattaacttccattgatcacagtttgcgttatctggaaactaatagagcggcggaaatatatgctaactaccccatcaaggagattactctagatcgggtacgtcggagtttattacgcttccgacaactggtggtgagttctaagtcagcagccgaactacaagcggctgtacatcgggagtttgctttttaccagtctacagggaacgatggcaagggtacggttaaatttactgcctattatgagcctgtgtatactgccagccgggtgcgaacttctgtatacagatatcctatgtatagagtaccaccggattttaaagaatggaaaaaaccccatcccaaaagggtagaattggaaggtaaagatggtttacaaggacataaaggcagattacgcggtttagaaatgttgtggttccgcgatcgctttgatccttacatgatccaaattcaaggttctgcccaaattagattaaccaatggacaaagaacttctgtaggttttgccggaggaacggattatccttggactagcattggtggggaactagcaaaagatggtaaattgccattaagcggtttaaccatgcctaaattaattagttatttccgcagaaatcccagagaaatgaataattatttaccacgctgggaaagatttgtattcttccaagaaaacaacggtgcgccagctacaggtagtcttagcgttcctgtaaccgcagaacgttcaattgctacggataaatctctcatgcctcctggtgcattagcattgattcaaaatgcgtttccttttcctgcgggtggagggaggttagaaagacgcagagttgatcggtttgtattagatcaagatacaggtagcgcgattaggggacctggtagagtagattactttatgggtactggtaaattagcgggcgatcgcgctggaattactggaggcaatggatcattgtattatttattgttgagagaataggtgactggtgactggtgactggtgactggtgactggtgactggtgacagtaaacagcgataagtcataactgatctatctccctctgctccctgctccctgctccctgctcccttgctttttcccagtcctcagtccctaatccctagtccctagtatggtggataagcaaattcatcatcatcggcgtaaatataagaattagtaacaccagatatttctgctttagaaacatctggtttcataaattctttaccaaattctttgtaatcttcaaaaatcttacaaattgtttccgattcaggagaatcagaagcaatcatatattttgttaaatttgaatctttaggatgttcataatttacagttgcagccaccaaaacaatattcggttcaatacctctttcttcgcattcaataatcgggcaaaaaatcccatgtgcatgaaataatggacctttgggagttaatggtttgttctgaaaactggcataagctttttctaattctcccgcaaaacccccagtcagtctaccttgttgatattcagaataactcttaccaaaacttgcgccggctgcaccactgagagttaattgtaaaggtgattgatgtaaaaactttttatcttcaccgactaaaaaaatcagatggcgagtgtagattttaaatttcagtttattagctaaaaaatcatctttgtaatctttaaaagtacctaatctaatttttgtgtctcggtcttgaacggataaaggaccacgacgaataattactaatctgggggtagtggtaataaaaaatgtgtctacttctccagaatcaaattcatgttctatttcttgccaattatcatcaggttgaaaacccacagcttgagcattatcgagtttaagggctaaaccataactttgtaaaccatcttcaccatagcggggtctgatcatttgacaccaggggagggtttgggatggtggggcgttaaatttttcgtcttcaaagtcgaacttagcatgattactgttagcagatgctttaaccatttttgaatatccgcgtgttttattttacaaggttatcttttgtaccatcttttgtaccatccattgaggatgtgtggcactttctgaattagattttaacaatttcggttaggaggtggttggtttggggtgaagtgggggtaattgggtataatttttatatcatgggtgataagcgtctattttaacggtaatttgtcgtgttgtatcagggaaggataagagggaatgaaccacgaagacacgaaggacacgaaggaagaggaaagaagagaagaagaaagaaggatgaggaggtttagtgatgaggttgagagtttagcttatgctgtgattggtgctgctattgaggtacatcggatgttgggggcgggttttttggagagggtttatcatgaggcgttagttacggagtttcgtttgcgtggtattcctcataggtctaaacatttggtggcgatcaggtataaaggtcatccggtaggtgagggggagttagattttttggttggtgattcaattattgttgagttgaaagcggtggaaaagttatctcctattcatgaagcgcaggttatttcttatttaaaaatgactaattgccctcttggtcttttgattaattttaatgttcctgttctcaaagaaggtattaaacgaattatcctttcttcttaacttctctcttcttcttctcttcctcttcttccttcgtgttcttcgtgtcttcgtgtcttcgtgtcttcgtggtttgttaactttattaaatattctagattatgtctcaaattaaaaccttaaaatggaattttttcaaaggggttgcccctctcgcatttaatgtgtttgatagcgaaaaagaactaatatgggcagaagaatcatggaatatacttataaaaattggattagctaattattcaaattcatatgaactgagtcaagtaaaaatattttttttggctttaagtgatttttataatgaattatgtagcatgatctggacaaaaaaatatcctaagccagattatttagaaattgccaaacaaattcaaatccgtgcgtttcacattggacaaataatttctactgattcaacttggaaatatgataatgaacaaaatcaattttcacttgcactagaacgattaatccaaaattcacggtataatattgcaaaatcattgatatataaatttggtagtgaagctaaactgctgatatggatttacagaagtttagaaacagaagttgattatcatatagatgataggtatgatgataatgaagatatttcttttttctcatataaaactgatcaggaaattttagagatattaacaagagaaaatgattatgccttagcatggcttgaaaatctatgtcagtatcaaaatgattttaagatcaatttaatttctcatagtgatttagaatctagacccaatccaagctatactctatatgaatgcgctgatgacactgcatttcctgaagataaactagatttgtggatacgtaccatagaaaggaaaaaacaaggtatattttacggttcaccaggaacaggtaaaactttcatcgctaaaaaaatagcaaagttactaattagtgaaagtgacggtttttatgaacttgtccaatttcatccagcatacacctatgaagacttcattcaaggtatccgtcctcaaagtgaaaatggtaaattaacatatccacttgttcctggtatatttttagaattttgcaaaaaagcagaagcacttcaagatacttgtgttctcatcattgatgaaataaaccgagcaaatttaccacaggtttttggtgaattaatgtatttactagaataccgtgatcaagaaattcctctcgctggtggtaataaatttcgtattcctgaaaatgtccgtattatcggcacaatgaataccgcagatcgttctattgcacaacttgatcacgctttacgtcgtcgttttgcatttattgaattacgtcctaattatgatgttttaagaaaatatcatgatgattcagatttagccaagaatttaatttatatcttaaaacaattaaatcaagcaattgatgataaaaattatgaaattggtatttccttctttttgactcctaacctcagagacgatatagaagatatttggaaaatggaaattgaaccttatttagaagaatacttttttaataacccagagaaagtagatgagtttcgctgggataatattaagacttatatacaataacaatatctctaaaactctcttctcttagtgttcttcgtgtcttcgtggtttatttttagtgacttgtgtatcagtcataaatatcaagcaatatttaactatatgaactcagaaaatttacaaattattgaaatcacagaatatcaaaataaatatttttctcataatgaaatttccgaagaatacggaattacattatatgaaaaatataaaaaccaagtagatgtagaatttcctagttacaaaactcgctatcaatggaaattaaccgctaaaggttgggtaggttacattcctgtaaattttgattttgctttaaaaattaatcccaaagtacctattaaaaatttatttgggatgttggaatatgcttacaatttaaaaagttttaaatttcttgatggtttaatgacttgtgattctgtagaggatttttataatcaactagctgatattttagcagaaaaaattatagaacgttgtcgtaaaggtttatatcgtagttatgtacccaaaactgaaaaattaacttatgtacggggtaggttaaatgttcaagaaattattaaaaaaccttgggatgtaaaattacaatgtacatatcaagaacacactgcggatattattgataatcaaattttattctggacactttttcatattggacatagtggttgttgttcagataaagtatcacaaatagttagaaaagcttaccacgctatgcagggaatggtatctttaaaaatttgtgatgcaaaagattgtcttgagcgaaattaccaccgtttgagtaatgattattatacattacatcaactttgtagattctttttagataattctattcccagtcatgaacatggtcaaaatacaagtttaccgtttttggtaaatatggctaaactttatgaaatgtttgttgcagaatggttaagggaaaatttaccaccacatttaactctgaaaactcaagaaagaattatcatagacaaaaacatatattttcaaactgatttaattatctatgatgctcaaactttaactcctaaatatattctcgatactaaatataagaatccagaaaatatttctaagaatgatttagctcaagtagtagcttatgcagtttctaaacattgttctgaagcggtgttagtttatcctacagttttaaataatccttttaatcaatatgttggaaatattaaaattcgtggtctgaatttttcccttgatgataatttggaagatgggggaaaggcatttttaaaacaacttttttcttaaattatccaggtataattagattttactaacaatagcgatcgcactaattaattaactcttcctcttcttccttcgtgttcttcgtgtcttcgtggttcgttatcaaaataatcctgtaaatccttaaatcctggacatcctgattctgacaaaaagactttacagattcccgacttctatcaatctttactcataaataccataaacttaacaaagaagtcggggatctttgctcaatttccgtaaatatcagagtttactaggtcatgatttatttgaaaaatatgatatcaaaatcctagctaatcaagtggaattttatcccagataatacttaaaattttgtatttaaattacactacctggtggtaaaaccaggagtatagaaaatacatatttataatcgttgcattatatttaaaccgtgtgtatcagttccacaggtgttaaataaaccgtattcttctgctaacatttgcacttttttcgtttctacagaacaaggtttccaagggttaggatttttataagcgtagaaagtctcaaccccatcaataccatattccgctgcttgaggaattaaatcaaagtgcgatcgcttgtaacgggcaggatgagcaagtacagctagtccaccagcgtcatgaatagctgcaataacgttagctgcttgataatctatacctgtagaggcttttctttgtagataaggtttcatactggaatgttctatttcaaaaccataagccaaaatatgtacttcagcatctagcaaacctgcattaatttctacaccactccacaaatgaggaatgctgctatcagcatgattccatttccaatcttctaaccaatctcgtgctacttgatacccaccaaccgtatgatgatcagtaattgtaagccctttcaaaccaatggagatcgcctgttccataagtatatgtggatgcaatctaccatccgaaaataccgtgtgtaaatgaaagttgaaaaacctgggacaactttgagcatcaaggctttggaagacttgttttaacatttctgtggaagcagtagtccgggcaaaatttacaaccataaccccctctgatcaaaaatatgtgattctgaataaaagaacgtggcacacttacatacaagaaatagaaccgagaaattactagcacattaagctagtatttaaagctactttttaggctacagtaatgatttttttgcgatttgttaaaactacgttagcaaatctcaatcattacagtcatgagtatttttgattacttatataaagaaatgctaaatttttcagaaaatttctataaatactgatactgatatagttgtcagtgatcagccgtcagctcttgttattcaattgctatgaaaaatctcaatttcagagaaatgataaattagtcttagctgactgctgatggctgaatgcttaaaaaagaccaattaattcaccagaaccagccacgacttcaccaatggtaaaagagggaatatcctgtgattgaaaatggctaattgcttgttctgcttgttcggggggcagtattagcacaaatcccacacccatgttaaatgtattatacatagattctgcaccaacagaaccggcttgagctaaccactgaaacacagggggaatattccaactaccaggattaattttaatagcttgacctgttcccagacatctgggtaaattttctggtaaacccccaccagtaatatgtgccataccgtgaacttttaaaccatttttcaatgctgctaatatagatttaacataaatgcgggtaggagtgagaaaagcattaccgagagtttgcccatttaataactctggggtatcattccaagaaaaaccaccattactaacaatttttctcactaaacttacaccattactgtgaatacctgcactagctaaaccgatggccacatcacctacttgcacctgagaaccatctagcattttgcttttttcgactatccccacacaaaaacccgctaagtcatattcaccgacttggtaaaaaccaggcatttctgcggtttctccacctaataaagccgcacctgcgagtttgcaaccagtagctattcctgccactacctgagttaactgctctttatccagcttaccagtagctacataatcgagaaaaaatagcggttctgctcctgatgttagcacatcgttaacacacatcgccactaaatcaatacctacggtgtcatggcggttgagaatttgagcaatttttagctttgtacccacaccatctgtaccagataccaatactggttcttgataacctgtaggcagttgaaaacagcccccaaagccccctaaaccacctaatacttctgatctgaaggtactgtgaactaaattgcgaatttggtctacaaaagctctacctgcttcaacatcaacacctgcatcccgataatccatgactgtttacaccgtgatcattcttttttcaaccccgtttattatagggtaattggtaattggtaattggtaattggtaattggtaattggtaaatttattactgtcacctgtcacctgtcacctgtcacctgtcacctcaaaatacctgatcttcaatacctcgccaccattcacctaaattcattaaatcttggtgaatatctgctaattcttcctcgtaagcttccggtgatattgtatctcgccgttcttgtaattttttcagccgcagttgtactaataaccaaggtttagaaatactatctgtagcttctagatattgtgctaattctttactatccataaaacctgaatttatttttcctttcattggaatttttctggtaagctggtggtttaccacgcacgataacggaatcattagagtttaagttaacaccagctaaagatagaacatcacgcagtctgccacctgtaatttaattttactactcggccaccacactcgaaaaccaacattttctgtgagggaaagactaaataaaccggtcttccttcctcatgaggaattggttgatcatctttggcaactgctaaaataattgggtacttgagtaaatcttcatagttacttgataagcgtcataacagacaaaagtaatttccgtaacaccgctttgaatggcaaatttttgtaatagtgaatttacgtctattccagtaacctaaagctaagtttttccagactttcaatataaccacattccaaactattacttgagacggtttacaggtgacaggtgacaggtgacagtaataaatttaccaattaccaattaccaattaccaattacccattaccaattaccaattaccaattactaacaaattttatggtattacaagtacaaaataacacttacgaagcgaaaacccaggaaattgctaaacaggttctcgctgcaactgaggaaagtcgctcttttttggcttctttgcgcgatcagatgcgctgggatgataagttactcgcttgggctatgagtaatcctgggttacgagtccagttatttcgatttattgatactttacccgctttacatagtaaatcagaaattgcatcccatttgcaagaatatttgggtgatgagtcggtagaattacccgcagctttaaagggtatgctgaattttgctaaccctgattctatgccgggacaggtagcggctacaaccgtggaaactgctgtgcaaactttggcacataaatatatttctggggaaaatatccaacaagtaatcaaaacggtggaaaagctgagaaaagaaaagatggctttcactattgatttacttggggaagcggtaattacggagatagaagcacaatcttatttagaaaaatacctagaattgatgcagcagttggttgaagcatcgaaaaaatggcagcatatccccgctattgatgaagctgatggggaaatgattcctaaagtgcaggtttcagtaaaattaactgcgttttattcccagtttgatccgttaaatgctgatggtagtgaacaacgggtgagcgatcgcattaagattttattacgtcgtgcaaaagaattgggtgcagcagtccattttgatatggaacagtacgcctataaagatattactttgaagattctcaaaaaactattattggaagaggagtttcgtgaacgtacagatatcgggatcactatccaagcatatctgcgtgacagtgaacaagatgcaaaagatgtcattgcatggttaaaacagcgcggttatcctcttactattcgtttggttaaaggtgcatattgggatcaggaaactatcaaagctgaacaaaaacactggaaacagcctgtttttaatgataaagtggcaacagatgccaattttgaggcgataactcagcttttgttagaaaatcacgagtatgtttattctgccataggtagtcataatgttagatcccaatctagggcgatcgccatagcagaaagtctcaatgttccccgtcgtcgttttgaaatgcaagttctttatgggatgggtgataaaattgccaaagccttggtagataagggttatcgggttcgggtatattgtccttatggtgacttattaccgggaatggcttatttaattcgtagattgttggaaaatacggcaaatagttcttttttacgtcaaaatctggaaaataagcctgttgatgagttgttagctcctccaattatagatttttctcacgcaaaggcgcaaagtcgcaaagaagagaaggaaggttttgttggtgttgcggatacggattatgctgaggaggagaaaagaagggtttctcaagttgctttccaaaatgtgcgtcagcagttgggtaggacttatttacctttgattaatggtgagtttgtaaatacgacaacgtttgttgattctctgaatccttctaattttggtgaggttgttggaaaagtaggtttaatcagcgttgaacaagctgaggaagcaatgaaagctgctaaagctgcttttcctggttggaagaagacaccggttaagcaacgtgctgatattctgcggaaagctgctgagttgatggaagaaagacgtgctgaactttctgcttggatagttttggaggtgggtaaacctgttaaggaagctgatggggaggtttcggaagctatcgacttttgtctttattacgctgatgagatggaacgtcttgatcaaggtgtaatctatgacgttgctggtgaaactaatcgttatatttaccagcctaaaggaattgcggttgtaatttctccttggaattttcctttggctattgcttgcggtatgactgttgctgctttggtttcggggaattgtactttgctgaaacctgcggaaacttcttctgtgataacttctaagttgacggaaattttgattgaagcgggaatacctaaaggtgtttttcaatacgttcctggtaagggttctcaagttggtgcttatttagtgaaccatcctgatactcatgtaattgcttttactggttctcaagaagtgggatgtcgaatttacgcagaagcagcaattgtaaaacctggtcaaaagcatctgaaaaaggtaattgcggagatgggagggaaaaacgcgattattgttgatgaaagtgctgatttagaccaggctgttgtcggggttgtccagtctgcttttgggtatagtggtcaaaagtgttctgcttgttcacgggttattgttttacaacctatctatgatgcttttgtagaaaggttggtggaagctacgaagtctttaaatattggggaagcggagttacccagtacccaagttggtccggtgattgatggaaatgcacgcgatcgcattttagaatatattgagattgggaaaaaagaagctagtttagctttggagttatctgcacccaatcaaggttattttatcggacctgtgattttttctcaagttcccccagatggagttattgcacagcaggaaatttttggtcctgttttatcggtgattcgtgctaaggattttacggaagctttggaaattgccaattctacaaactacgctttaacaggtggtatttattctcgtacaccttcccacattgaacaagcacaagcagaatttgaagttggtaatttgtatattaaccgcaatattaccggggcaattgtcgctcgtcaaccttttggcggttttaagctttctggtgtaggttcaaaggcaggtggtccagattatttattgcagtttctagaaccaaggagtattacagagaacattcaacgtcagggttttgcaccaattgaaggtaatgaataattagggtttgctgagaaagtctttccgtgaaaattaagaatttccaggagtcaggagtttgaggatatcaaggagttttttgtattttcaaacgaggtaaaaaccaacaaagtgcaaggttttcctactcatagcttccaaaaccttgcacctattttctttgttatcaccctcaaactctttatccatccaggttttgagtttattcagcaaaccctaaatgtgtatctcatctctatgttttcgccacacttcgtgaagggaatctgctggatgtgatataatttttgattgttgatggcttaattgttgtaatctatttgttaaatctgcgatcaattttttagcattttgttttaaacatccaggaatataatcttgtacttttataggttcagcaatttgaatatttacatctgttccccaattgggatagggttgactatagttaatagctacaggaataattttgatgtctaaccctagatgcagatgttctgcatttaaagctaaacgcgcaacacctgattttaaagggtgaactttgctatctcgaaaaatatcaccttcgggataaatcaccaacatttctccctgtgaaattaactctactgtatgacgcaaggcggcgatcgcaggtttttgagtatctacaggaaaacctcccatgcgttttaccaaccaaccttgtattccttgacactcactgcttgtcaccataaatcggagatctcgaccactaacataacgacctgtagcatagggtaacagcaaggaatcccaacgggaacggtgagtaggtgcaagaatcactggtccagttttggggatattttcttgccccaagatgtcaattttaccaaaatacataggtatcaccacattatgccccaaactataggctaaagaagttaaccaaggggaaacctgtgatctactaaaaaccaccttagaagttttagagatatttgttagttgagagggggacttggtagacgcagagtaaaattccttcataacggtggctgaaatttagctggtaaaatgtgacgcaaacttgattatgtccaccgtaaattttcttgagtaatttttgttttcctatctggacagtttaacctctgtctgttatttatgcttatgtctttttgctgcaaaccaggactgtaattgttgacgacaagctgattctagaatacctcctactacttgtaaacggtgattggatgcggggcttgagggtatgttaataacagtacgtactgaaccagttttagtatcgtccacaccatagacaattgtcgccaaacgtgcatggacgatagcacctgcacacattggacatggttctaatgtgacgtaaagggtacattgatctaaacgccaactttgtaaggtttttgcggctgaacgaatagcgatcacttccgcatgggcagtagggtctttatctctttcttttctattttcacctgtagctattaaattacctgctgcatcaacaatgactgcacctacaggaatttcccccgcttcacctgctacctgtgctaattctaaagcttgatgcatccattgttggtgattgaggattggtgattggtgattggtcatcagttattaatccccccctgcttcccctgcttcccctgcttcccctactttcttcactgtcacctgtcacctgtcacctcaaataacaacggatcaagttgaccttttgtatccaactcatacagatcatcacaaccgccaatgtgttgactattaataaatatttggggtacgctacggcgaccgttggcgcgttctgacatttttgatctcgcttcttcgttaccgtctattttatattcggtaaattttacacctttccaagataacagcattttagcacgtatacaatatgggcaggtttgccatgtatatatttctactttggctttaatgcgttctgggtgacgacctaaaagggggttaagaaaatctagcatatttttattttttgttatttatatctagcttagatgatttagcgtgttctgcttttgcctgtgttgtttccagatttttgtgatcaattaaccgcaaagtacgcaaagtacacaaaggaagagaaactaggctaacaccttcttgcctcctgcctcttattgttaactagcaacttaggttaatacaaaattactgctattttctagcattttgaccacttgggataattaatagcagtaaaacttaacttttttctatatgtatccgtactttggtagacttaaagactgaaatggccagataaaaacgacgctaatatcagcaactgagagggcagtcctgtggaaaatacaattggtttagagattattgaggttgtggagcaagcagcgatcgcctctgcaaagtggatgggtaagggtgaaaagaacactgctgaccaggtagcagtggaagctatgcgcgaacgcatgaataaaatctatatgcgcggtcgcattgtgatcggtgaaggtgaacgtgatgacgctcccatgctttacatcggtgaagaagtaggtatttgtgctaatcccgaagctaaagcacaatgcaatcctgatgaattaattgaaattgatatcgctgttgacccatgcgaaggtactaacttggtagcttacggacaacccggttcaatggccgttttggcaatttctgaaaaaggtggtctgtttgctgctcctgatttttacatgaagaagttagcagcacccccagcagctaagggtaaggttgatatcaacaagtcagctaccgaaaacttgaagattctttctgagtgtttaggtcgctctattgaagaactggtagtagttgtgatgaagcgcgaacgccacaacgatttaatcaaagaaatccgcgaagctggggcaagagtacaattaatttctgatggtgacgtaggtgcagctttatcttgcggttttgctggtactaacattcacgcgctgatgggtattggtgctgctcctgaaggtgtaatttctgctgctgctatgcgtgctttaggtggtcacttccaaggtcagttaatctatgatcctgaagttgtgaaaaccggtttgatcggtgaaagcaaacaatctaacttagatcgtctagcttctatgggtatcactgacccagataaggtttatgatgctcatgaattggcttctggtgaaactgttctctttgctgcttgtggtatcacttctggtaatttgatgcaaggtgtacgtttcttccacggtggtgctagaactcaaagtttggttatttctagccagtctaagactgctcgctttgtagataccattcacatgaatgagcaacccaaggttgtccaactgcactaatttttggtgattggtgactggtgattggtgattggtgattggaaaaatttattaccacccattaccaattaccaattaccaattacccattacccattacccattacccattacaaaattatccatttaagaatttaagaaataaaagatgaatattgcagtggtggggttaagccataaaacagccccagtagaagtaagagaaaaactcagtattcctgaacctcaaaccgaaggtgcgatcgctcatctcctcagttatccccatattgatgaggtggctatccttagcacctgtaaccgtctagaaatttacattgttagcggtgaaattacttacggtattcaggaggttactcagtttctggcagaacacagcaaattacctattatatctttgcgtcaacatttatttactttgatgcactctgacgctgtgactcatgtgatgcgagttgctgctggtttggatagtttggttctcggtgaaggtcaaattctggctcaggtgaaaaatactcacaaactgggacaacaatttaatggtataaaaacaattttaaatcgcttatttaaacaagctatcaccgcaggtaaacgagtccgtacagaaaccagtattggtactggtgcagtttctattagttccgctgctgtggaattagcgcaaattaaggtagaaaatttagctccctatcggatcgctattctcggtgcggggaaaatgtcgcggttacttgtacaacacctaatttctaaaggtgcaactcgaattgctattgtgaaccgttctcgtgaacgtgcggaagaattagcaaagcagttctcagaagtacctattaaaatacatctgttaccagaaatgatatctgtggtttcccatagtgatatagtatttactagcacttcttcaactgagccaattttggatcgtgctaagttagaaatggttttagatcctaaccactcgttgatgttatttgatatttctgtacctagaaatgttgatgcagatgtaaacgatttgccaaatgtccaagcttttaatgtggatgatttaaaggctgttgtagcgcaaaattacgaaagtcgtcgtaaaatggcacaggaagctgaaaaaatcctagatgaagaggtggcagattttgatgtgtggtggcggagtttagaaactgtctctactatcagttctttgcggaataaagtggaaaacatccgcgagcaagaattacaaaaagcactttctcgcttagggtcagaatttggtgaaaaacaccaagaagtgattgaagctctcacacgaggaatagtaaataaaattttacatgacccaatggtacaattacggtcacagcaagatgttgaagctagacgtaattgtatgagaactctgcaaatgctatttaatttagatgcagaagagcagtttagttaatcaaagggaacagggaacagggaacagaaaaatctttattctgactcctgactcctgactcctaaagtttgagtttctctaactgcttagtttgttcttcgagtctcacttgtaggcgatcgcatactaaatcacacaattgaaataatatcggatcagctatttcataaatcacgctgactccttcgggtgttcttttgacaatacccgcttgagttaaaattttaagatgcttcgatacgtttgcttgtcctagtccagtctcagctatgatttgggttacattcttcgctccattttttaaacaacacaacacctgtaaccgactgacttcagatagcactttgaaatattctgcaacatgactaagagcgcccggaaatatatctgacataaaaaaccaaaaaaaattttataagtttatattgactattttactatatagtaatagaatcatctcattagggaaaaaattcaggtgtaaatatgttatttcgccaactttttgacagagaatctagtacatatacttacttaattgctgacgatacaacaaaagcagcagttttagtagatccggttttggaacaggtagaacgggatctaaagctaattgaggagttaggattaacactacgctactgtttagaaactcacatccatgcagatcatatcacaggtacgggtaaattacgtcaactaactggatgtttgggagttgtaccagcaaatgcaccagcgagttgcgcggatcaacaaatgcaagatggggaaattttacaattagattctattgtaattgaagcgatcgccacaccaggacatacagatagtcatctagcttatttagtaaacaaagaaagattattaactggcgattctttattaattcgcggttgtggaagaaccgattttcaaagtggtaatgcgggaattttatttgatgtcattacccaaaaaatgtttactcttcctgatgcaactttggtttatcctggacatgattataaaggttttacagtttctactattggggaagaaaagcaatataattctagatttaaaggacataatcgggacggttttattcaattaatgaatgggttaaatttacctaatccgcaaaaaatgatggctgctgttccagcaaatgaaaagtgtggaaatactattgcagtttaatattgtagggtatttctcacgcagaggcgcagagtacgcagagcttttaattgcagagtttttaatatttagtaaatagtaggatcttgaggagttttgagaaatgaatacttcaactaaacaggaattacaatttgttgatgctgctggtgttaaggagttaatagaaaaacagcaagtacatttaatagatgtgcgagaaatgtcagaatatgtaggtgaaaatattcccggttctcaagttttacctctttctcaatttcaaccagaaaaaattaaattagttcctggtaaacaagttgttatttactgtcaatctggaaatagatccaataaagcggcacaaaaattaattcaggctggatttacagactttagccaattacaaggtggaattactgcttggaaacagtcaggatatccgactaaagttaataaaaatgctcccattagtttgatgagacaagtacaaatagttgcaggtactttggtgtttacaggaactattttaggggcatttgtttctccttggtttttaattttaagtggttttgtgggtgctgggttggtatttgcaggggtgactaatacctgtgcaatgggtatgttattagctaagttaccttataaccaacgtggttaaaattgccaactcagatcccggactttttaaagaagtcagggatctaaaaatcacgaattacaaattacgaattattatgatctggatattaggacatattttagcaacgggaattggtattagtttaggtttaattggtggtggtggttcggttttagctttaccaattttagtttatgtaatgggagtaccaacaaaacctgcaattgctatgactttagtaattgtaggaactgtgagtttaattggtttaattcctcattggaaaaagggaaatattaattttaaaaaagcatttattttcggttctgctaccatgttgggtgcttttttaggggcaaaaatcgcatatttaccatttgttactgataatttacaaatgctgctatttgcaattatgatgctggtagcagcaagtttaatgattaagagaagtttacaaaattccactaaattatcttcaaaagatcacttagaaaatatcaaaaccgaagtttatcaacctcctgtttgtcagtattgttggttatggttgttaactgaaggtttaggtgtgggaatattaacaggtttagtgggagttggaggaggttttgcgattgtgccggctttagttattttgggtaaaactccgatgaaagaagctattggtacttctttattaattttagttgttaatgcaatttctggttttttaggttatttaggacaagttgatttagattggaatttaatcggatcttttgtgattgctgctagtttgggtagtttttttggtgcttatttatctcaatttattgatggtaaaaaattacaaaaatattttggttattttttaatagctgtagcggcttttgtgttatttcaaaatcaaagtgcttctccaagaaaaaaatcagcgttaaattggcaagataaagtaactattctgaatcctgtacagactgcccagcataatctatagtaataaaaaagctgttaggatattaactgatgataaaacctcaagataaaaagatggcaaattgtctttcttgtgatactgttatacagtaatactgtagtgatgataaaaatatttatgtaggggtttagcattactaaatctttactgacttctgtctcctactatatctacataaatcgtgaattattaaaaataatgtttctatatctttctaaattactacctctatttttttatcctttgggattagcttgtgttagtttaatagtggctttggtaactttgtggaaacgtccaaaaattgccgctgtttgtatttccctatctttaactttattattggtttgtggtaatgcttgggtggctaaaaatctggtgcgatcgctagaatggcaaaatatccccatgacagaaataccccaagctgaagctattgtagttttgggtggtgctactaaatccggaatttggcctcgtccgacggttgatttaagtgaagcgggcgatcgcgtgatttatgcggctcaactctattggcaaaaaaaagcacctctaattattttaagtggtggtcgcattgattggcgtggtagcggttttcctgaatcagcagatatggctactattcttacatctttgggtataccagccccagcgattattcaagaacctgattctttaaacacctatcaaaacgctgttaatgtgcagaaaattctcggagaacgaggaattaaaaaagtattgttagtaacttcggctatgcacacaccgcgatcgctcaaaatttttcagcgtcaaaatattgatgttattcctgcacccactgattttcttgttagtcggagtgagttggaagaattaaccagcactcccaaagccgctatactaaatttattccctgatgctgataacttgaatcaatttaccagtgctttaaaagaatatattggacgttttgtttatggtttgcggggttggttgtgagtgactggtgactgggaaaaattcactaataaccaatgactaataaccaatgactaataaccaatgactaataactaatgactaataacctatgagtaaagaactaccatatatagtcccatcacctcagccggaagttgaggaagtgtttgcagttcaccaaacaactgtagaattttaccacgaagttcagactcgttcggaatttaaacgttattgtgaatggtattacacaaccgcagccgaaaaccgtagagatttagaaaaaatgcgcggcgaactcaatattatggggtggttttttcgccgctaaaagaatacagtagcgagttatcagttatcagttatctgtgactcatggtttctgactcctgactcctgtacgggcgttggcaaagcgtgctggaagcatcagcattcgggcaatcaattatcaatttttgtctaaggttattttccgaatgcttcgcccctactgactcctatttaaataacctctaattcattctcacgtaaatgagctttaaattttttgctaaactgaactaaaattggcaggttagcactgacaggtctgccttgccattgagtaacaacagcaaaaatttccccttctgatcctttgatgtcaaaaccctgaccccgatgctcaggatgatgataaactattactgactcttttacacgaacgcgatcgccaatattcatagtattatttatacctaattttcttgattactgaattgattgacttggttgatcttaccatatcttgacattcaagaaatatagcttattggcgctgggggcagaactgttgtaattctgggggaagttgctgacacaaccgcccaaaagactggggttgaagttgccaccaagcaaataaacctaaacttgtacctccaaccaacaaagctaaaaatccgcctaaaactaagaccagtttaccccgatttgctgctttaacaggagtagaagctgattcttcacttagattcaaatccattaaagctagggaactctctgctaagtaatctactgctggtgattgcgcttcaaagttttctgtttctgtgtttaggctcgctacttcctctgtttcggacgtttctaatactattggtacaggtgtaacaggtactaaatgggcttgggaagtacggacaaccgtgagaacaatagatgtattatcttgaccgtttttttcatttgccaattttacccagttacgtgctgcatcttccactgtcagtttacctgttaacaggggaattacataattctgccaagatttttctacccaatcatgatcacttaaaccatcggaacataataataaaatcccgtcttcttccaaaataaagcgtttgatggcaaattgtagatattcggcttcttttgttcctaatgcttgggtgagtgcatgggcgttagctgttgtgattgcttgacgatacaaactttgaccaaaacacacttccctggttgccatatcatcatctatggttagtagttgacaatagctgggagtaatccaataagcacgactatcaccaacattagctatataaagttcatgagtattttctgattcccatcctgtattggtgactatacgttgcggtaattgtatggccatgactaacgtggtggccatgcgttctctaccttggcggttttgttcgtcgttgcgtgaccagatcatattatttactacccgcaaactagccgctagttgttgctgcaacaagtctggggagacaatttctgtttgttcggctacatcttgtaaccaagcacggatttgtaattttaaggactgaactgctagctgactagcaacttcgccgccttcatgtccgtcaataccatcacaaactactgatagatgctggtttaaatagttgtctattttatcagtagtattagggaaacaactgtcctcattgtgtttcatcacaagacctgcatctgtaaacccagcaactttcaccattaatggtaattctgctgctgatgctagtaataattgattaagttgatggctaatggtagtaaaatctacttcaccttggcacatctgctggatgatattacttaaaccaggggctatttcggcttttgctaccagtacccatgagtgccaagattgccctaagtgctgcaaggtaagtgtttctgttgtttggtatagttctaataatttgatacaccacccttgaacgagtatgttatttggtgatagtaaacttgcagctactcccatttctgataagggtttccacagttggagaatttgccatagccagtataattgtctaacggcttttgcttcttcccatacttcggtaatgatggggtagagattgccttttgtatctataggtgcattttctaataagagaatatcatttgtgtcttctgtgtcttcggttgtagaagttgtaaatccgtagggttgggggatgtgtaacttttgtggatataattttaggtaagggataactgccggtggcagttctgatggtatttctggtgcttttcctggttgggtatctagccaaatttgctgtgtaattacctcatatctgtcggcaatttttgtttccgggggtatgttggcggcgtttgtgccgatcgcccacagatagcggtaaactatgggtgtttggcaatttttacaaaggcgatcgcctagattattaatgggtttttcacagtcgggattgatacaatgaattatccgttcagtagaaatcataaatgtataaactaaggagttaggagtcaggagtcgtaggggcgaagcatttggaaaacaaccttggacaaaaattcataatttatcgcccgaatgctgatgcttccagcacgcttcgcgaacgcccgtacaggagtcaggaggaagaagaactaatttctgtactttgcactttatactttgcactctgcaccctgcactgagtcaagagaatagttaagtcagaaattataaagatttaataattttcaaaaaagtttaagtataatactcaaagtttgatttatgctacatattctatttttgagcttgagttgtgagtgtataaattataaagaaattcaggtgattttagatcaaattgggatgttaattactagaataggaatcaaatatgtttgtatgctcttgttgataggcttgtacttgaaagcaaaaattgggaaatcaaaaatttctttccgtaaatagtgatggttgagatgtagttaatcacaaaataatattggggttaattttttgtttttattgtctgggatggcgttatgccaacttttaccttaatctggctggtagcaggaataatcctgtgtttgatggaacttttgttaccaactgcctttgtagaatttatgatgggaattagtgcctttgcggtggcgctactttcttatttgggtttgatcagtttatggctacaagttattctttggctgttgctttccacggttttagttgtgttttcccgcaggtttttacaaccaccaacacgcagatcaaaaatctctgatgcggtgattggcgaaactttaacagaaattttaccaggtcaggcgggacgggtactatatgagggtaattcctggcgggctagatgtgatgatgacaaactcagtttagcaccagggcaaaaagtttatgtggtcagtagagaaggtacgactttgattgtaatgccagaaaatattttatgacaggtgacaggtgctacgccacggtgacaggtgatagataagagttttcaaagcatcgtatttgcggagatttataaaaatgggtcagtttttattgttacttgctttggcttttgggggcggtactgttgtcctcaaatcaattagagtgattaatcaaggtgatgaagctttggtggaaagtttgggtagttataagaaaaagcttggtccaggcttaaatatgattaatcctttttttgataatattgtgtataagcaaacgattcgggaaaaggttttagatattcctcctcagcaatgtattacccgtgacaatgtttccattactgtggatgcggtggtgtattggcggatcgtggatatggagaaagcttattataaggtagaaaatctccagtcagcgatggttaatttggttttaactcaaattcgctcggaaatgggacaattggagttagatcagacttttactgccagaactcaaattaatgaaattctgctgagagatttagatattgctactgatccttggggtgtaaaagttacacgagtggaattgagagatattatcccatctaaggctgtgcaagagtctatggaattgcaaatgtccgcagaaagacggaaacgggcagcaattttaacatctgaaggtgatcgagagtcggcggtaaatagtgctagaggtaaagcagatgctcaaattttggatgcggaagcgcgacaaaaggcgataattttacaagcggaagcggaacaaaaagcacttattttaaaagcgcaagcggaaagacagcagcaggttttgaaagcacaggcgatcgcggagtcagcagaaattcttgcccacagaatgacagctaacgcagaagcacacaaagccatagaagttctcatggccttgggttatttggatatggcgactattatcggtaagagcgaaagtagcaaagtcatgtttatggaccctcgtaatattcccgctacttttgaaggtatgcgttccattgtttctgatcttcctaatggttctcaacctttgttggaaaatagggactaggttattatctcatcttgtggggtaggcatcttgcttgccttgtataattagggtttgctgagaaagtctttccgtgagggcataggagtcaggagtcaggaggagatttgaaaatttctttgccatctcttgaaatcccaaaaaatgcacactttttccggtatacccttcaaaacccttgcactaatttctgtgtttatcagcctctaacctttgatatatcaaggttttaggtttattcagcaaaccctaattagcgggcaagatacccgcaccacaagaaacacttgtatatctttttatttgtcagtcccttaataaaaactcttacctgtcacctgtcacctgtcacctacgtcctgacatttattacacagtccgaaaaattctagggtgtggtaaaatactttaaatttatggctggtttgtaactcgttttctagttcatggactggacattgatggataggtatggaaagaccacattgtaaacaggtgagatgatgtttatcttgttgggttaaactatacaaagcctcaccattagataaagttctcacctgtactttaccttcgagtttcaaagcttctagggagcggtaaactgtggctaaacccatgctttgactacagttacgtaattctatgtatatgtcttgtgcggaaattccttgtttgatgtttttcaataggtttaaaattcgctcttgactgcgggtacgtatagctttcatagtaattttggcttttagattgggactggaaaataaaaatttttttgtatcttatgtgactagtttaagttaccatatctgatatgagcttttttgattggctggctgatagattaactttaaccagtctgtgattctattttcactcagttggaacataaaagttataggatagcgatcgcaccattcagcaaaagttacccccctcatgcaaaggaagtatttagctaaaatttttgtgactcttcggccttcagttctcgatcctgctggtgtcgccgtacaaactagcttaaaacaaatgggacatgaaaccgttgaacaagtaagaattggtaaatatattgaattaaccacgattgcacccgatgaagctatagcgaatcaagatgtgaaaaatatgtgtgaggaactgttagcaaatactgtgatcgaaaactatcgttttgatttgattgaagtagaatctcaaactggtgttttttaggtaatgggtaattggtaatgggtaattggtaaaaacttctttactgtcacctattccctattccctattccctattccctattccctattccctattccctattccctattccctattccctattccctattccctattcccttatttatgaaattcggtgttttagttttccctggttctaattgtgaccgtgattctgcgtatgtgactagagacttactcggacaaccaacacggatggtttggcatcaagagacggatattagtgatatagatgtaattatagtccctgggggctttagttacggtgattatttgcgttgtggggcgatcgctcgtttttctcctgtaatgcaggaagttgtcaatcacgcacaaaaaggtaagtttgtcatcggtatttgcaatggatttcaggtattaactgaagctggtttgttgccgggtgtgttaacgagaaaccgagatttacattttatttgcgatcgctctcccttaaaagttgagcgtaataatttaccttggactcatggttatacagagggagaagtgatcactttacccattgcccacggagagggtcgattttacgctgataaggatactttagcagcaattgaagataacggacaagtggtatttcgttatcacggagaaaaccccaacggatcattaaataacattgcagggatttgcaatttgcaaggtaatgtgttaggaatgatgccacatcctgaacgcgcagcagatcaagcattaggtaatactgatggtttacgcttgtttgcgggtttgttggggaaggttgcagctttgatttagtcttgtatttgacaaactctcaaaaacataaggtggttaatttccaccttatttaaggatttttacgtattgacttgtcaaattgactagatgtattatttttgatagtataatattaaatccatcaagaaaagcgcagatgaacagaatagcaataaatccagacttagcaaatgtggattatactgatttattagataaaatactcagagtattaaaaaatcagcagatatttataatttctgctgataataaaagagttaaggttgatattaatgaagtagttaatgaagttattaaattaactcctcataacccattgggaaaccaaaaagcagcacgttcagcaactttgaattttactcccggtactgaagtttcatttcgagagaaaattagacaaattacaggttatattcaatatcaattaacattagctattcagcaaaatcccaatagtaaatcaatggatagatttgaatttatccacaatttactgacagacttacaaacatttcaaacagatagaaaaccaactaaattagacttgagttatgaatttctaccctctaaaaacttacaaaaacaaagattaacagtcaaaaaagacgataaagcaaaacagaaacaactactaaaagcgcataaagttaaaatttctgtagataaaccaaaagatttttacacagcactattaaccggattgaataactttatagacattaacttttcaagttctagtgacagagaagaaataggatttattttagaaaacctcaaacaaaatacaaagtctgatatttatcaactacaaaacctagtcaacgaagaaacactaggaaaactcaaaaaactatcacaaattaaatatttagaatttctcctagaaaacattgacgaaaaagctagttctaaaaactaccaagctaaaatatatttacaagacttgatcaggagattacaaatattagaagattacattaataaccccaataaagcagatggagaatatgaagttagctatgcacaagagaaatttaatttgcaaacagtattttctcgtggtgatgcttatgataaattaccaattattcccttagtcgaaggttatttaggagaaagtgaacatcaacaccaagaaaaaatagaatttacctttggtttaaaattaaaatttgatggtaaagtccaaaccgatggaggtaaaaatgtttttcaaagaaatcttgatattctcatcgcagatccaaatagtgaagagaatataaaagaatttgcagagaatttgaataacaagaagaattttgtcaacaaagttttaaaaattgcctttctgtattattttatatttgcatcaacacaagatccaaaagcagcaaattatgatccaagagaagaattaaattacgatcctctacggagatttgaaaaggatatattatcagtatttaaaggagatgatgaaaatgctaagaaagaattactcggaaagttaaaaaaaggtttcgataaatttaaagtccagaaaaaagtagacatattaaaagaagtcttaactaacttaattaaaagagaaacaccatttcctgaaagacaatatccggtacacatctctgtcaaaaatagcattttagaaaatgatattgaaacaattacggaacgagatactttatttaaaaatacattgcgtggtaactttaaagactgtttaaaatatattcatttaggaaacccaagtacacaaacaaacatccttgtcactctacctgcaaacatcaccattagcgaaattcactttttagaaactccagatgtagaaacatttgacatggaatatgacattacttcaggaattaaagttttaccagcaatatttttaggaatagataaccaacaatgtagaaatttttatgaaagcaacttaaaaaatagaaacttattagtatttccccataggttggaagaacaaaagctagaaaagcatcaagaatttatttacaagattgtgtatagtttactagcatatctttgtcttcatgtgattttagaaagacaaataaaagaagatgcaaaaccatttataccactaattagaatacacctcaaagaaaaaacggatgaaactgcaatcattgaaaagtttatagttgatctaaccaaagtattatctcatttattgaatgaaagatatcgctgcaatgaacaagggatagtggttacaaaccccaaaacaatcagctttaaaattcctaatgttctcagttcattatattccgtatttcccaaaaaattcacattcttaccaacggataattttagatttcaggaacttaataaacttgcgatcatcgttgtttctagtcgggaaagtgatcgtcgtttcggagtagatgaaaaaaaatctaacttaataggtgaaattatcaccatacaaacagaagacaacaaagcaaggtttcaactcttcaaaactttctcagaaaactacgacgatcatcaaaaaatgtttgaatatcctacagttgtagttgataatgtggacaaactttacaaaagagggtacagacactttatttatattgcaaaagttccctacagtagtacattacacattactcaagcagaaaaagatgaagaattattcttcatgtcacaaaatgtaattcaatctttgaaaaaagaaagacatgatatcaaaatttacccgatgttttttgaaaaatactatgcagtaaaagtgggaaattttaaatctacatccttatacattcaggatactttagagttgactaatttagcggaggatagaaacaaacaatctgtaattttctttaatttatttaatgggttacaggttgctaaggaggttaactatcatggagtcatgtcttatgcaactttatataatatgtatgaaagtacaattttagatgataaggatatttttacaggattaatagataatgaaagtaagttaaaaaatgaaattactcaatgtttaactttgtttcatttctcccgttatgaaaaatctgaaaaatcagggaatatgcaattaaagttagatccctatcaaaatttaatcggggatgaatcagttagtgaatctgcaagttttaaacatattcgagataaaactgatttcaattctcttgcttttttaactcatgttaaatcaatattactaggtaaggatgaataacacttctctttctttacgtctttgcgtgagatttttcttataaaaacgaaccgcagagacacagagttcacagagaaaagaggtttttgagggtttttataaggagtaaaaaatgactgcacaaatagcggatgatttgggaagattgtttgaaatgggttttaatattgggattttgtcttatatccataagaataatattaaaaattattttggtgatttgtatagtcaggagttgcaaaatctcaagtttgcagaaattacaaaaaatattgtgaagaaggttgttggtaagttagaaagagaaattgcagaaacttggtgtcagttttttgtacagaagggttttttgtgtgggttaaatttctttcgggagtatcttaaatctctgggatgtcgtgaaaaagcaaacttgcaaaatctggaagttatttattttcaatgtcggtttaatggtgaaaatagtattggtactcatgaagttgatgaaatacaatggttcaaaaatgttctctctcagtttgaaaatgtaaatgtcacttctggggatattcaaaattataaacaaggtggtgattttctcaatgcagatagtttgatgttgttgaaatataaaaataattaccgggttttatgtcttgacttgtcggtattttctattcacactgatgaggatttacaaaatattgattatgtggaaattatcagaggtttgttattacgagatatcaattatttacgttctaaaagtgtgttttctaagttgcgtattgataccgaatctttgggtttagatttttctcccagtttaaaggagtattttaccgcttttaaatctaaggataaggaaagtgctaaattaattcaagcgggtagttatatttatagtttctgtcagtttttacaagcaaattcttttcttcctgatatttctaggttggtttgtaatgcggtgggatatagcgatcgctcttttaatactatctctattcctggaaataatctagaactttttcacacttgttatcaaatttatcaagaacatgataaaaaggaagaaatcaccgacgcacgttatcgcgttttacaaaaaatccaaatcaacgcatatcgcagttttcaacaaggtagaaaactggttgactctctcctcaacattacccccaataccatcaatattttaccacgtcacacagaaaccatcaccgatttttataactctgtttctcccgtaccatctgagttaatttctagtttaaatttaaccgaaaatcccaattttagacaagcgcacaaccaactaattaaaagatatttactttctgaaaatacctacattttcttaacaggaaatcccggaatcggaaaaactactgctatcgttgattttctcacacaatatcaaaatgatggtttcctattattatacgtcagtccccggaaacaagtcaatcttgatatcattgaaaaattcaaagatcgcaaaactggaagattagtaaatgatcaaatttttgctattaatactcatagtaatttgattcaagataactctggtaaactctcagttgcttatacatcaaaccaacatgaagaagattttactttggaaaatgtgcattttctcaacagtgaaaatattgaacgaaaatctcgacgcaaagacagactgcaacagattacagatgatacttttcaggatatgggaacaaaaaacaagggagttttacaaagtatttgtgaagggttatattacctgatcaaatatcaaaaatctaatcaaattatcgctaccgcttctacccagtctttaaaaaaaacagactatggtgatactttacaacatttagaaaaaatctttcaagacgcatatagaaaaagtgacaataaagtatttcctgaaaaaatgcgaaatatatcccgtcgcatcaaacatctatttattatgatagatgaaattaccggagatgaaggaggagtagaatttttagagggaattaaaaaaatggttaaaacttataaattaacaaacccagaaaatggttttaatactaaaatcatcgtcgcagatgcttctattgttgataaaaatgtcatttgtcaacatttagaagatacttcccccgaaccaaataaggtttattttagaaaagcagaatcaaacattcaacctctatctgtagaaagtttcacatttaaaggttcacccgctatcattattaatactaacacctatcctgcaaaaagtcttactattaattatcaaataattgtcgaatcttgtcgttttactgatagaattaaactaagagataaatctgatttagagaaaaaatcccaggaagaaattttaaaagatattaaaattatcttccaaaaatccgatattgaacaatttatagtttatatccaaaataaacctaaattatcagaactgattgataaaattcagtcagagttaggaagagataactttgtcaaaaatacccacttcctagaaatacacgcgaatatttccgaagtagaaaaacaagaaattaaactacatcaagaaaacgtcaaggttgtatttatgactgcttctggtagtcgcggtttatcctttcctaaagcgaaacatatattagtcgaaattcccaaatttgaaattgaaaaaaatttaatggaaataattcaggtaatttaccgaggacggggaaatgatatcatagatagtcaagataaatacctcacattttatttagctgaacgttcagtttattatcaagatgatccagaattatctattaaagaaaactctctaaatttactaaatcttctcatcattcttaaagcatctatcatgactaggattcaaggttatggtaatattgggagaaagaattatttacttatccccatcggtggaaaatcagtttttgctgcgggagaaagtttttctagtaaaatcgaaaatctcattacccaaatgaaaaaagaatataaccgtaataaaagtcacacttccttaaaagacgcatacaccaaactagaattattaatgggtgatggtgattttatcgttgcgaaaaatgcagaagagagttatttaaagattcgggaaaattttaataatacatttttagaagttgcgaaaacttttgataaattattagattttacacctttagaattaggttatattaatggtggtttattaattgtacccagtccaaaaattgaagaatcttatcaaatgcggtttttggatattcaaaactatgcaaatatagaactatggaataatttaaaaagcattagtaaaaatcaaatctacccggaaagtcttacctctgcggtaaaagatgcaatagaattagtagaaaagttaattaatgcacctgcaaaaacccagaattatctgcaaaaaagtcaaaatacagatcaatattacgctttaccgttatttgcatttattagtggggaagtgatgaaagaatattttgaaaataaaccagaagaaccggaagatcaacgttttaaagatatcctatctatatatattcgttctttatatcctgtaggtaatattttacccataggacataattacaaagaatttccctttgtggtatttagaagttatagtttggaggaaatgagaaataaattgtttacggaaaaatatttgttaaattctcaagagttaaatgttctcaatttaattctttctcaaaattcctagatccccgacttctctaagaagtcggggatctgattttattaatcttctttaagtcttcctaataattcctcacgggataattgcaaaagtaagggtgtaaattcttctctatttagagtaatgattttatcaatcacttgttctaaatcatcatcaaccttaccaaaacgcacctgtaaaatactttcggccatcgcgcgacgttctcttttttctccttcttctcttccttcttctctcccttcttctctcccttgatgtattccttcttgtcgcttttcttctttcatttgttctaataattcctgatacatttctgataatttcataatcaactcctgatcatcttgatcaatatccttttctttttgctgtctggctgataacatggctattaagtcatgtactaattgtataacattctctaactgtgggttattgttagctaatgcttctaactcttccactgcttttctctgtaccctacccctacctaatacccttaaaaataaggtttctggtgtactgggtaactggtgaataacgataatacctgtccttgatacttcgtctaataaataaactcctttaccccatgtttgataatctaaactcagatcaatacctctgaatatttcctctgatgcagtaggtgtgaatatccataaaaatggtaattggttttcactaatgcgggtattattgcgttttgcttgtctttctaagtttgcatgaatatcaaatagtttacccttacaacttctgatttcacttctatcaacggggttacgaaatggttcaaaaactacggaagttgcatgaattcccatttttcccaatagtcctaatttttcgatgttttcaggatttgaagatggggtaaataatacgtctatctgtcttttttctgagataatatcttgactgacttctacttttccgtagggtgtaaatatctctgttagatattgttttgcaaactgatcatgaataaaccgagtcatggaattttggattgtagatttgggattttagattgattaaaaattgattataaacaatttgattataatttaattatctccattcgttaaattcttcgcacacacatcaaccaactcacaaacatcacaaccaggagaacgtgctttacaaactgcacgaccatgatatattaaacgaatagaccaattttcccattctggttggggtaataatttcattaaatctttttcaatattaataggttcagtattttttgttaaccccaatctttgacttaaccgcttgacgtgagtatctacagtcacccctgcattaataccataagcgtgcgctaaaaccacatttccagtttttctcgcaactccgggaagttttaataattcttccattttattgggaacaactgagttaaaatcatcaacaatcatgcgacaagcagctttgatatttttcgctttattgcgataaaaacccgtagaacggactaattcttctaattcaaaaatatccgcatttgctaaactttctgcatcaggaaaccgactaaataaagctggagtaactttattcactcgttcatctgtgcattgtgcagaaagaattgttgctactaataattgtacaggagtttgataatttaaagaacaagtcgcatcaggataaagacgatggagacgagagagaatttctaaagcgcgttgcttttttgatgattttgataattttttagtagtcacatcaataatatttgaatttattttatttgaaatttaacttatttcttgttcccatacagagtatgggaatgaattgtataagactctgccttttttgtcaaatagaggtagaacctctagatcgcattcccagtctcagactgggaacgagatcacgagatcatttgcttacaagttctggaatatttgttgcacaaaatctagttgcagtgtttctttgaaaattaagaaaatacctaatcctaaaagtaggactaaacctgtttgcatgacaccttcttgaatttttgctggtaagggtttaccaagtaaaccttcaatcaaaagaaaagctaattgtccaccatctaaagcagggagaggtaaaatattaatgatggctaaattaatactaataattgctgcaaaagatagcaaatttgcactattatctgctgctaatttagcaccaattttcacaatattcacaggtcctgaaacctgacttgctgtttgttgaaaattagttattagctgtccaaatcctttgattgtaccaataaatagctgttgaaatctatcagcagcaacgctgaaaatttctatgggattttggggacgacgataaacagcttctccatttggtcctagttcaattcctactaaacctttaccatcagcactttctgtaggagttaattttaaagctatttcttgattttgacgctgaattttcaggttaagttgttgatttggatgggtttgaatttctttagtcagcaataaggtagaatctttactagcagctaattcctgaccattgacgctgataacaatatcacctgcgcgaataccagcttggtaagctattgattgttcattaacaggtttgacaagtacaccaggttgatattgaaattcttggggtataccaacaatacctatttgcaaagcgagaacaaaataagcaaatattaagtttgctatcacaccggcgctaataacgatcgcccgatctaaaataggacgattccgcaataagttgggatcattgggaggaattgcgctatctggatcatcgtcgggaaaaccaacaaacccacccaaggggaaagcgcgaatggtgtattctgtctgtgatccttggtactttaacagggtgggaccaaaacccaaagaaaagcggttagcgtagataccttgagaacgtgcggctataaaatgtcctaactcgtgtactaagatcaaaatagccaaaactgcgatcgctgctaaaactgacatagagcaaataagtcaaaatatttcggatatatatttctattgtagtttgggaatggactcagaaacaaaatctgctgttatttattgtcaattgcaaagaaaagcgcaagttatggtaattttgctaatttccaggttttgagcgaaacttgtctgatagcgtagcgccagtcatatcaggatatccaggatttgaggatttacaggatgattcatttatttttcatcctcccacattgtataattttcttcaaaaacctcctcccaagttaaagcagtaatttccggttttttccccatttcatccctagcatcttgtttagcagatgtaaaacacttatcccaaatagactctaaaaactctctattaagactaggcatttcttcctgactatcagcaatttctctccttgctgaacgaatggaaattacccaactagcactgcgtttttcaggttgacatttccatttaattatatgtaacatcaatcgagttacttgactaataactgcccttttttctgatcttcccattgacgctgctaaactctctaaaatctgatcaacttctgccatttttccctcctttagcaattcctttgctttttccactgctaagtatggtgattgaaataccaattcatcccatattaatgtcattttaaaattcctctcttttatcaatataaagttgatctctagtattcataaaatcatcagaaaattgatctaagctatcaattaaactttgccacggattatctttactaatcagaacaataggactaacaatatcacctaatgttttacctttaccagcaatggaactaggaggaatgcgacatttttttgttggtaatttatgtttgataaattgaataaaatctaaaacttcttgttgtttatctgctggtaattctcgcaagttttctaaaactgcttgttcaatagtcatagttttacttttaggattataatgtaattatattatagattataactttttgtctgaatcaggatgtgcaggatgtttttttatattcatctacattttcataaattgcattttgtctgaatcaggatatccaggatttgaggatgtacaggatatcttctttgcgcgaaatagatttttgtcagaatcaggacacccttcgggaagtcaaaagtcaaaattcaaaaaattatttcttttcagaagttgcgctaattcaaatattccagaatattaatatcaaatataatcctgttaatcctttcatcctggttatcctgattctgacagttaattatacattactgagtgctttaacctgagaaatagcacgttcaacatctggtaatttttgaccatgtttttcggctgtttctaaccataaatctctgaccatgatcaattcttgtaatgtttcttctaaagtctctccctgtgctaaacatccttttaatgctggaatttcagctacaaaaccaccttcctcacagggataaacaactatgggataattcataattacgctccttctatcaattctaatactcgtttaacataaactgattttacccgattattatgtacgggaattactaaaattatatcatctttgataaagatatgatgactacctgtaattctatctaatacaaaatcatctaattctaacagtttacgaatatcactgaatttggcattattgggactatttgttaatttttcaatcagtttatcttttttgaccattttccgcgatttgaggatctacaggatggttttttaatattcagctacattttcagaagttgcgctaattttaatatcccagaatatcaaaatcaaatataatcctgttaatcttttaatcctggttatcctgattctgacagttaaattttaataaaaaatgagtatttatgtgtattattcatgattgctattttctgcttctaacacttttaacattatatttgcagcttcaaaagcatcataaggagaggagacaggataagacattcctggtttaattaattctgattcttcttgtactaattgagaggctaaatattggataatttgtaatttttcagcccgacttaatttatttaataatggcattaattctagcatggtttgatgattgctatagttagtagttgatattatatcattttattaatggtaatgggaatttgtctgaatcaggtggttatcgagcgacctgtactgagcggagtcgaagtaagtcgagataatgtccaagatttgaggatttacacgatgttttttaagattcatctacattttcagaaattacgctaattcaaatattccaaaatatcaaaatcaaaaatataatcctgttaatcctttaatcctggttatcctgattctgacagtgcaatatattataaaaataataaaaaatggtgcattaaataaagttgattaacgcaccctaagagcagtattatttaaaaggaatatattcaacgacattcatccattcatcaatctctgaagctttagcaataaattctaaatcttgcacaaattgaccaattgtaccacctagttgatgtccaaaaattaatcctgaaaactgttttccttctttttgccaagtttccgctaaaactcgaaaacggatatcttgagtaaatagaactcgtttaagttgtgtcactctttctaataatttatcatcaggaagttcttgggtttcatcatcaaaagcagttaatacatccacaccccgacgacgcaattgtgatgtaatagattgaggtacatgaacatccatatataaagcaatggtcatttacaacagtccttttgctttcattctgttgtaaaatggagatgatgctaattcatgtctgctttgttgtacctgttcccattcctctttaatttcttggtcaatttcttcttggtggtcaaagtaataacccatagtagcatgagcttcagcttgggttaaataaggatgttgacgacacatttcttctactgaccaaccataagcaatataatccatgacaatttgtgctactctaattctgggaaaacgctgcaatcttgctggttgattctcggttttttcaatatgcgggtaattcagggttaacatatttttttatttagctaattcgcttgaatcactgtattttagtatatcatttttttgtctgaatcaggatgtccaggaataactactgaagctgtagctacttcatcttgatacagattcattttatcaactactaatttatttgggatttttttgttaatttccgaaataatattagtatctaaaagaaaacgaaaactcacagttctacctctcgtcctggactgcgatctctaagacttgcaaaatcctcatctgtaaattctataccctctctttccatccgttctcgaaatcgcaaggtcatttcccagaaattttcaccgtcagaattaaaagtaggtttttctgctggtaatttatgtttgagaaattgaataaaatctaaaacttcttgttgtttatctgctggtaattctcgcaagttttctaaaactgcttgttcaatagtcatagtgttacctctaggattataatgtaattatattatattatattatagtatagattgtcactttttgtctgaatcaggatgtcgaggatttgaggatttacaggatggttttttcatattcatctaattcaccatcacactcttcaataggtgttgctaatccttctttaattgattctctcatccctggaatagaaagtaaatatagtgtttcttggatagatttccagtcactttcagataataatactgcgttgctattttctccagcaatgataataggttgatgggattgattgactgaatcaattaaatcctgtagttgttgttgtgcttgattgattgaaatcataatctttttgttgagattacattattattaaataatagcataaaattgaattgtcagaatcaggatttccaggatttgaggatgtacaagatagttttttaatattcatctgtattttcagaagttgcattttgtcagaatcaggatatccaggatttgaggatttacaggatatttttttagtattcctctacattttcagaagttgcattttgtcagaatcaggtggttatcgagcgacctgtactgagcgcagtcgaagtaagtcgagataatgtccagaatttgaggatttacaggatggttttttaatattcatctacattttcagaagttgcgctaattttaatatcccagaatatcaatatcaaatataatcctgttagtccattaatcctggatatcctgattctgacagtggattttaacgtaatattctaacttcaactcccacattaatattactccataaacgatcagtagttaaaacaggttggttaagaataatacctaatgctaaacaagctctatcaccaaatgaaagtccaattgatttagtaattgggcgtaaaattcccgcttttaatgcttgttcttcattaaaatcaattacctccagattcagattatttataattaaaataatatcattttctggtattcctgcatctgctaatttagcgatcacctcagataaattaaccgtactaattgcagctttatcaataaattttaatacttcttcgcttccaggttcttcattgagtaaagctaaaattgcggaagcatctaaaacaacttcactcatttaaagtttcctctctccgttcctgaattaattcttcagatagttttctagtaggtggaatatactttctaaaaatagcttgggcattttttacagaattatgtaaattatcacttattgggttatcttctagtacaataactgctttatattctccctttgggatatctacaggagaatcaactaacaatttgccatcactggttatagttactgttacacctaatgtaatcatagtcaactccattggttaattagtttattaattatatcagaaaatgtgcattttgtctgaatcaggtggttatcgagtttcgactacgctcaactaccgcgacctgtactgagcgcagtcgaagtaagtcgagataatgtccaggatttgaggatgtacaggatgattttttaatattcatctatattttcagaaattgcgctaattttaatattccagaatatcaaaatcaaatctaatcctgttaatcctttaatcctggttatcctgattctgacagttaaattttaataaaaaccggtgcattaatgaaatttaacgcactctatgagatgagcgatcgcactaataatttaatttgttaattcactactgttcattccatttacttggcaatatgctaccaaaatcagtatatcttgggtgagcattaaatacaattaaattttcacgagttcgagttattgcagtataaataacggcatcaagttgtgaattatcaccccaaaaagtatcatcaatatatagaactacatttagtatttcccatcctttgaagctatgaattgtggacatttttatcctgctatcacccatccaaaatgattttttatgatagcgagatgactcattttcagtatcaaaaacatgatttacatatatattttttgattcaaaatgattaacacactccataccaattttatgatttggtagcagtataaccatatctgaagctttgtatccttcttctttcagttgattaaatgcgtaccaaatcagtttcaatctttgatttggttcaacgttaagccatacaatgtgaggattgagtgggcgttcaaacaagctttgctgtacaattctctcagtcttcaattcctgatttagattgaacattagactgaatttttcagcagcaatagctaccttctctggcaagcgaaaaactgtttccaacttacgccagtctcctctaaattgtgtgcctttgcctttcaaagatccatctatccaactaagctctacaccatatatattctgctttttatcacacactaatcttttgaaaaatccttaaatgtttctttagctgaagctgttgttgcattgtgaaaatatagacctgttttaattaaccccagtgcatttatagttttgtcaactttttctccgatatctggaatcaattgtccaataatattttctcgatattgttctacttgataaacaggatttttaattggatagctacctttagagttagatacaaataatgtatccttatcaaagtggtaatgcactaaattccaatcttttacttcaattattgtaagaccaacagaaggattaaaaactataatatctggacgatgaccattcaaaaagggttgaatgtagatttgccattcttctggtaaatacttatctaagaatctcgccaaagcaatctcaccagccgtaaatttatcaggaagttcgcccatttgctcccaacttggaaaaattctatttgccataacgtacctacaacattttatctaatatttttttcacctagcctagtatagtattttaacaaaaaattatctgtataaccactattcacagtgattatacagaattttatataggtaaaatacctacaaaacctccctacccaaataaacctgcaaaacctccggtactttaatcgtcccatcagcttgctgataattctccaaaatcgccgccatcgtccttcccacagctaaaccagaaccatttaaagtatgtacaaactgcgtccctttcttaccagcttccttaaaccgaatatccgcccttcttgcttgaaaatccacacaattagaacaactagaaatctctcgatacttcccagaagatggcaaccaaacctctaaatcataggtcttagttgccccaaaacctaaatcaccagtacataaattaatcactcgataaggcaattttaaaccctgtaaaattgactctgcacttcctactaacttctctaattcctcaaaagaatcttccggttttactaacttcaccaactccactttattgaattgatgcaaccgaattaacccccgcatatcccgtccataacttcccgcttctcgacgaaaacaaggagtatatgcacagtgataaatcggtaattcttccgcgtttaaaatttccccccgataaaaatttgttaccggaacttccgcagtaggaattaaccataattcatcatctgcacatttaaaactttcctctgcaaacttcggtaattgtccagttcccgttaaagaatcagtattaactaacaacggtggactaacttcaatatacccattttcaatatgcttagaaagcataaattgaattaacgccctttctaaagcagcacccgcacctatcaaactgacaaaccgactttgggcaatttttaccgccctttcaaaattcaaaattcccaatttttccccaatttcccaatgaggtaaaatattctgattttccggtttatattcatctccccatcttctcacttctgggttatcatcttcacttgcaccgatgggagtagaatcactaggaaggttaggaagtgctaacagtaaatcttgaatttgcgcttttaactctttttcctggggttctaattcgcttaatgtgattttaatattattcccttcttcctttaaagcgagaatttcctcactttgcggactaacaccagatttgatcttttgtcctaccagtttaccaatttcattactccgcgcttgtaaatcgttgcgttttccttccagttcccgttgtttttgacttaaatctaatataggctgaatgtcatatttaccactacgagtattcagcttttcttgtaccagttgggggttttctctaatttgtttaatatccagcattggtgaattttgtgagtttttgtcaattatactcgattgaggtgattaagcgtagaggtttagcaatgctaaaccatttcttgcatcatcaatcatatctattattaacaccagttttatacaataaccacacaaaatcatcaaattaatcaaaatccctttttcatccgcgtttatctgcgttcatctgcgttcaaatctcaatatagaatgtaggttgggttgaggaacgaaacccaacatttaaaggaacgaaacccaaaattaataagatattgataagattttgttgggttgcgctatcacttaacccaacctacaaaatatgataaaataatatcaaaatcaggaagttttcagcaatgatcacatctgaaccagtaattttaaatatcaaaaatgtcggtttaagtgatgaacaattttttcacctctgtcaatttaacgaagtttggaaaattgaacaatcagcaaaagatgagttaattattctccctggttctgatttaattactggtaatagagaagcggaattaaatggaaatttggtgatttggaatcgtcaaactcagctaggaaaagtctttagttcttccactattttcactttacctaatggtggtaaacgttctcctgatgtcgcttgggtagctaatgaacgttgggatgctttaagcattgaagaacaagaaaaattccctaaaatttgtcctgattttgttatagaattgcgatcgcgcaccgattctttaactcaattacaggagaaaatgcaggaatatcttaatagtggtttaaggttgggttggttaattgatccgcaaaatcaacaagtagaaatttatcgtcaaaatcaacaagtagaaattctatcattaccaaccactttatcaggagaagatgttttaccaggatttattttagaagtacctaattttccatgattaataatagcatttatcccaatcaccaatcaccaatcaccaatcaccaatcatcaatcatcaatcacccattaccaacctactttgtaatccgatttaataaaaacagtgaagctataagtcctgaaaaatgcgctgatacagtatttatatttgcctgtactacaagcatatctaaaccgctaataatccgagtggggtcaaataattgcgttgttactgcttgtggcgaaattgacctagcaaccagtgtacctacaatcgcttgcgctcctaacagtgtgactaaaattccacctaaatttacccataaccctaatcttaatacttgcacactttccagcttacgaggacggttactaggatttgaggattctaattgtttgccaattgttgtatacctataggctaagtaaatacccgcacctaaaacaattagtccacaaactgctaaaaacacaccaaagcctgttccgggattattactagggcttcctggtctttgactaaaaaaggcaaataatatcactattataccagaaattacccctaaaactaattgtatccaaaaactaatccaacctgctaggcgaaacatttgggcgatcgctctaatattagaggatggggtttcaaaattttgtgtcataaatctaaatattaaatatattcggtaataggtgataggtaataggtaatgggtaatggataattaaataattattctcaattattctcagtcaccaatcaccaattaccagtcactcatcactgcttcccttaacttccagaataattgataatgtatatgtcagatcaaaaagtccaaattaattatggataatactattgtgcaatctactttcctactcactttacttttatcagtaggcttatttttctttattcgtgcttctacaaaagaccgcaccgaacaagcgcatttaacttctgagcaggatgaagctactttgatgaaccaactcaaggagtattttcgctcccgttcctaccgtgtaacatctatagataaagaaaggaatcaggtgaattttgaaggatttgttagacctagctggtttttagctatattcttaactattttagccgcagttggttttgcttgcctctctttggttttatctcagcttttttctagtcacagtccatttttcctggttttagtcctgctgtcaccattaagtggtatattttattggcgcaaagcaggaagatttgagaaagtgtcactcaaaatggagtctaccccaaatgaacaacactcctcaagtataattactgtcatcgcccatcgtgatgaactcgctgagttacaaaaggcattacagttaaaaatggttgactaaacttgatttgttagtctaggcttgacaatcgcatactgatgatgaactgctaacttctgacagacttttgaggaaagagaacagtagggaggaaacacaccaaatcttatatgggtagttttgcttttagatacatttggcaattaaagctcattatatctaagcaaaacatatttttgtgtgcttgattttgttgctactccctgctgtatgattatcctagatataaaaccatgcaatctaaaactgcacagggtttgacaatctaaattgaattagctctactgacagttcagctacaaacttaaaaaaaattgaatttttgcataaactgatcaattttgccagttaattaatgtcagagtcagaagtaagaagtaggattcaatgcgtaagagataattttagaacttagcgacttgccacagccactaattcttgttgactagctggagtttccaacactctcagactaggaaatagaaaatgattctcttctacgtattgagcgccaaacagacctttttccgcccagaaataacggtctgtagtgtgttcgttgcgttttacaagtagcaaggcaggaggcaagataccttcagcttgaatgaattttctcgctgctgtcacaggtttatcttcgccactttctatgctgtactgaggtacgtgttctagaatccgtcgtccttcctgacgacgacgacttttccgtttgcgtctccttgccaacctattgtcctcctctttcaagctataagtttgtagtcatagctacaaaacccgtcgtaattatataagttataattgaaaaaatcaatggtttttaaccttttgatacaactaaagtcatctgttagcaatttagaaaaattatcagtagcaaagtatcgtgtacattacagtataaatcactagaaattgggaaatgtatcaagttttttggtcttagggaatagggaacagggaacagagaataaattgctgtgtaattcattagactggaaaacgctataaaatatttagtacagcagaaggcaggggaggtagggggagcaggggaagattaataacccaatccccagtccccagttacctgctatcagctgctagtccatcatcctgagcaagaactaaaaatgttaatttctgctagttctgattttattgctctatgcaaagagcaaatatctctgttaacccaaggactgggagcgtctttgagtgttgtctatttaactcaagaattagtagacacttccacaggtgaggcgcaattaattccagtggtggtttacccagagacagtaagattaaaacaagcagaggatctggttcaggctcaagacaacaagcaaataaaatttagtaaaattttggcattaccagaccagaggggaaagttattgacagcaggttcagcttctgatcctccatctccgaagtcagaaaatacaaatacacccctaccaaatttagaagatgaatatatattcagtggtaatcaaattgtgttacctctgatttatgaaagtgtgatgatggggttattggtgacaggaagagaagatcgaccttggaatgaatcggaagaaagggaaattcaacgcatagctaaaaccctagcgatcgcctgtattttagatcagcgtcaagtttggttacaacaacaattgcatcaacaacaacttctgcaagaacaacaacgggatttattggataatcttttacaccagtttcgcaaccctttaacagctattcgcacctttgggaaactgctgtttaaaagattgcggccagcagatcctaaccgagatgtagccaccagtatagttagggaaagcgatcgcctacaagaattattacaacaatttgatcaagttatagacttaacagatacagatttaacccccattcccctgccagagtctaaactgccagaatccaaaattgttgtggaagcttctgtgcagaaaccagctaacccacccctattactgccaggaacaggagaaaatattattgattgtcacttacaagatttattagtaccattattaatatcggctcaagctattgctcaagaaagaaatctagaattaatagcagatattcctgaaagtttaccattagtaaaagctaatatcaaagcattaagagaagtattgagtaatattattgataatgccttgaaatatacccctgctggcgggaaaatttggattcaaaccggactgcaaaaagttaattttcaaggtttagctattagtgatacaggtcctggtattcctccagaagacttacagcatttaggagaaagacattatcgcggtgtacaagcacaaacagaaattcctggaactggtttaggaattgcgatcgccaaacaattaatcgcacaaatgcaaggagaaatcgaagttttcagccctgcattaaattcaaatattacttccccaaaacatccaggaactacctttattatttggttgccggaagtaggtgatagctaactggggactggggactggggactggg

SEQ ID NO: 32 - DNA, 53558 bp, Sphaerospermopsis sp. LEGE 00249
  LEGE00249_47
cgatttttgataattctttaattttcaattatcaattgtcaattatcaattcccaacgggttttcctggtgtctatggcgcggtggaaccacactgatcccttcccgaactcagaggtgaaacgctgctgcggcgacgatagttgaggggttgccctctgtcacaatagctcgatgccaggtttaatatttcacaacaaaccccttcattgcaataatgatggggtttgtttttagctagacatgatatagttgctacaactgtcactatagttttttatggcacaagttttcccttcattagaacaaattcatcaattacgcccgaaacctaccgagggtgagttgcatttacttaaatttttatcggaaaatttggataataattatgaaatatattttcaaccttttctgaatggagatcgtccagatatcattcttatgcgtcccgatgcgggagtgatgatttttgaagtgaaagactggaatttacgcaattatgacatcaatgaaaaaaaacattggtttgttactcaaaatggcaaaaaatggtcaagaataaaatctcctattgatcaagttctcaactataaggaaaatctttataatttgcatattgaaaatttattggaaacaaaaataaaaaattctaaaacttggggagtagtaagttgtgctatctattttcattgtgaaaattatgataaggttgataatttcttaactggtaaatttcaagataatcaaaacaataaatatagaaaatttcttagtcatttcgtcattttaggtaaagattcactcaatagaaattcattaaatcaatttttacgtaaacattatctacatagacagtcaagattttttaatgatactctttacaaaagctttaaacgtcatttacaacctccatatcattcaagagaggaaggaaaacctataaaatatacctctaaacaaaaagaactagctgttagtgaagcaaaacaaagaaaaataaacggtgtagcgggtgcaggaaaaacttgtgttttagcaaaaagggctgtagatgctttaaaaagaatatctagttctgtttcatcaagttcagataatcggcctgatatcttgatattaacatataatataacgcttaaaaattatatacatgacaaaattagtcaagtgcgggaagatttttcttggggttgtttttatataaaaaattatcatgatttcatcactcaagaattaaataatttaggaatagaaatagaaattcctcaagattttgatgattggaatagtgaacagaagagtcagtattttgaagatcaatattatagtaatatatcgctatttcgtaatcagaaggagcatatttatacttataaagctatttttatagatgaaatacaagattatcaagaagaatgggtaaaaattattcgtcaatgttttttagagaatgcaggtgaatttgttgcttttggagatgaaaaacaaaatgtatatcaacgcagtatggataaggataaaaaaccatatactggcattggaggaggatggaataaattaaaagatacttttcgtttatccactcatctatctagtttagcaacagcttttcaaactaacttttttgagcaaaaatatgaaattgaaacaattaatactgaaaattcattgaaattaaattttaattcacaagagcaaattattgagtatattccagttacgaattcttcacctgaatatatttataatatgtgtaatgaacgggcaattaaatatatgattcatccgaatgatatctgtattcaatcttctacaatagagatattaagaagtatcaatttatatgcgatgcagtcacagcaaattaaaacaacaacaacttttgaaagtttagaaatttattacttaattttattacaaataatagaaaattttaatatccaaaatgaagatttagaagggcaaaataacattattaatgaaattagacaatacaaattgacgattagagaactcaaaaatatttttattaataatactaataatgacaatataaatcaggcaatagttaaagcattatgctatagctttcatcttaaccatccagttgtagagcaaaaattgacagagtatctgagaacgaaaaatattacaagaactgaatatgatacatgggtttctcaaataatgcctattttacaacaggtatctcgcaatcaggcaattatgaatagatttaaaagggaacttgaaaagattagaaaaaataaaaaatggaatttttggatgaatagtggaaacattaaattttctacaatacatagttttaaaggatgggaggttgattctttatttttaataattgaaagagaacttgacgacaataattttacgacagatgaactaatatatacagccattactagatgtcgtcgtaatctttttattcttgatttagatcaatcacggtatctggaattttttcaatcttttaatcattctctaataatatagcaagaaatatttaataatttgtgataatttgtgaatagtcaaatattcaattttgtatccctgatgatgactcttaaaattactgggttagaggggatgataaaatacctaaaacagcatccaaaacttttaaaacatcctcgtagggttaaactgcttctttcaatttttgaatatcaccattcataatcacatcaatgttacgggtgattttttcaatttcccaatcccaccaacgaatagaaagcaggatttctatttcttcatgactaaaacgctgcttaatgggaactgcgggatttccacctgcaatggcatatggcataagcaggaatatctttaactactacagaacgcgctgcaattacagcaccatcacctatttttactcctggcataattaaagaatcataacctatccaaacgtcattacctattatgatgtcacctttactgggtaagttcattaaatcattcattgctgcttcccaaccatgaccaaaaatcggaaatgggtatgtagaaattccatcaagtttgtgatttgcaccgttcatgatgaatttaacattggtggcgatcgcacaaaacttaccaataattaaagagtcatcaccaatcaccaatcataatattgggtgatttgatgcagtttttaataaagcaaacccgatgatgttctggtatgggataaggattttttgggtttggtctaaattgttctattaattccattaaattctcactttcctatttcataaattgccaaattctaacagttttatccgaactaccactagcaataactttaccatctgcactcagggaaatagaatttactaccccagaatgtcctgttaaagtttgtaaaacttcccctgtagaaatatcccaaattttgatagtagagtcagcactaccactacagataaattcacaatttggactcacagcgagagattttactttgtctgtatgtccatttaaagtatttattaacttacctgtacttaactgccaaattttaatagtagagtcagcactaccactaaacaaatattctccattgggactgatagctattgatgtaacttctcctaaatgacctgcaatagtacgtaaatgatcacctgtgcggggattccacaatctaattttgtgatctgaactgccactagcgagaattgtaccatcaggacttatggcaaccgcgtgaacctccgatgaatgccacaaagtacaaattctttctcctttttgtaaattccaaattttgattttattactgccactagcgagaattgtaccatcgggactaattgtgactacattaactggtttttgatgtcctaaaagtgtatggattagtttaccagttttcaaatgccatactttgacattactttgtggatgttcacaactacccacagccaaaaaattactatctggactgatagctacagacgaaacagcacctaaatttcctgtgagagtgcgaattaatttacctgtttgtagattccaaatattgatggttttatctgcacatccactaactaaaatctcatgatctggacttattgctacagaagaaactttcccagaatgtccattgaaagtatagttaagattcgccattcccaaattacgattattttttataatggctatttcttctaaaagactctctacataaacaagattattgctatcaccaatagcggcaaaatattgttttaaagtagtgatatagttctcatcttctattttcaacgctagttgcattgcttttaacgggtgagtgacttctgttaatgatacttgccgtatttgcaaccaggtattaatggagtaatcaacttgttcctgtaaccaaaaagaattagaaacatgagataaactttgagctaattgtaaagcaatttctggaacttttaaccgtctttcatttttgaaagcttcgtaaagttgtttataactatcagtaattacctctaaaacttgtctatgtattccttcattaattaaacttggtagcaattttggtaacaagggaggtacatcataatgcaccaagtgataaacatctgtcacccaagcagtaactaaacaatgagaggtaattaaaacttgataaagatattcccagtcttgggaagaaatttcatattctactgataaattactaacatcaattccttgagattgccatttttctaccttctctaaaattgccaagttgcggtttttctctttacctaaatcgttaattacttctaaatcttcttctaattctagcaattgatttttaacatttttccattctaaagctcgatttttagcagattcttgcaaaatttgccgatagggtaatttagaaatagttttatagtaataattatcttgtcctaatccccaataaccaatgcggaaattgagataatctccatctttttctgattctaaaattaaagtaggttggttttttaaagcactaaataaagccttgatgctagattcactatgaaaccgtttactatcccaagcaccagctaaaaattctataggtctttgtggatgatgcaaagaataatgattgttgataaactcacgcaaaccttcagccaattttagctcaatttcatcagtattttttgaggtttgtaaatcaaatttatcaaactgtatttgtggtgctgctaacaaaacttttaatggtgtgtgttgataattaatagaagattctaaaagttgggaaggatataatctcaatggccaactatccagaattttatgcacttctggtagtctaattgctgtttctttttcttgatgagctatttttaattgtgtggcatgatggtaaactgctaattgctgttgttggttcaattcagctttagtaatatctaattttgtaacattatctactgtgtgaatgaaatcttgaattacttgggaaattggcaaattgtcggtttttgagttacttgatgtttgtttttggatgatgtttaccatcacaggtgcaaactctaataccagttgaatgagtagatttaatcctggttgcataaaaaaatcctaatgactatctaatacaattaatccaaatcttttgttaacttaattacaataactatgaaatttccacacaggtaatcttcttgacctacttctacttttgattgagaaaattaatacatattccctatactactatcttaaggcatagttttgagtgactaactaaagattataatataaatgaattgatagcaaccataaaaatgtcaaacatcggctaaattgacaacctagctaatgtttgactagcaaatttccatatatattgaggaatttagtttgttattttgataaattggcgtgattgagttgagactaatgtaaactctatatttcagctaataactgctattttttagctatgattatgtctcaaattgcaaatttttggataattagaattttattcctagttgtccattgaaaccgcgtatagaatggtatcccgcaccgagaaaaatatgtttggtggcgtttgcttgtacaccaccggaaaaagctacacctttatcttctgaatagtaaccaactccaacgtaaggagaaattacaggtaaattgatgaattttaagacatctgcacctgtagcaccgtcttcacctgttcctacttctacacctaaacttaatgctttagcacctacagcgtaagtaacgtctccatcttttccaccgacggaaacccaaggttggggtacaatttgtgctgatgcttgactggggtttaataatactaagaaacccagggatgtgatgagtgttttaataataacttttggtttcatttttatatctcacgcaaagacgcaaagacgcaaagaaagaaaggaagtgatagagaaataaagactaagaaaagcaagggtatgctttccaaatatgactattgctagtacaacagtttatacgacgtattggaatagcatatgtgcctgaatttgaaaaagacgcaaaagaagataatttctctctgcgtcttttcgctatcaacagcttttacttactacatcctttctaaaactttaattcccagcaaatctaatcctagttttagggttcttgctgttaaatagcataacatcaaccgcgatgttttgatgggttcttctgattttaagactggacatttatcatagaatttattaaatttttcgctgaggttatacaaatactcacagaggcgatttggtaataaatcctgttctacttcggcaattatttcatctagttgtaatatgtgtttcgctagggttaattctgtatcttctttgagaattagtttggcatctgttcctaaatttgcaaagtcaatattgccttctctactaatgccttgagtccgtacataagcatatagcatataaggcgctgtattgccttttaaggaaagcattttatcatagctaaaaacataattgctagtacgattttggcttaaatcggcatattttaccgcactaataccaacgacatcagcaacatttttaataaattgttctgtttcttctctaccttcttcttttaatcttgcttctaaatctgttcgagagcgagatattgcttcatctaataagtcttttaaccggactgtatcaccagaacgagttttgaattttttgccatcttcacctaatactaaaccaaagggaacatgaactaattcaacgtttttaggtatccatcttgcttttttagcaacttggaaaaattgagcaaagtggtttgcttgtcctgcatcggtgacgtaaattatccgttttgcttgatcttcttcaattctataacgtagtgctgctaaatctgtggtggcgtagttataaccgccatctgatttttgtacaattaatggtaaaggatctccttctctgttagtaaaaccttccaagaaaacacattttgcaccttggttttcttctactaatcctgctgtttctaaatcttctactaccttggatagtaaggggttataaaatgattctcctctttcaattaatttgatatcgagtacatcataaattacttgaaattcttttcttgattgttcacataatagtttccaagcatgaagggtatcttttgctcctgcttgtaatcttacgacttcttgacgtgctgtttcttgaaagttttcatctgcatcaaatctttgttttgcttggcgataaaaactaactaaatcaccaatatctaaagcgttagcggtggtaagtgcttgggggtaaacttcccgcaaataagtaattaacatcccaaattgtgtaccccagtcaccgacatgattgaaccgcaatacatcatgtccccgaaattctaaaatccgcgcaatacaatcaccaataattgtagaacgtaaatgtcctacgtgcatttctttggcaatgttgggactagaaaaatcaactatttccttttgtgggttttgtactttgggaactcctaaacggggatctgtttttatggcgttgagttgtgcttcgagataggatgtttgtaattttaaattaataaaaccaggtccagcaatttctggtggttcacaaatttctgatacatctaatttttctacaatagcagtggcgatcgctcttggttgcattcccaattttttactcaaagataaagccacattggcttgaaaatcaccaaatttaggattacttgcaggtactaaaatgggatctacttgagtataatctgctccaaatgcagccactaaagcttgttgtagtttaagtttcaatttttcttgtgtagcgttcatattcaaatattatctgtgtctaagatcctaaaggctgcctaaactttgtatattgccaaatgcttgattattttaacttgataacagttaattacgaattaggattgtgatttaacaactgtcattccttgaatccgccaagaaccttgtttgcgaattaaatcataacgcactcgcaagcgatcctgagaagtcttttgaaattgatttcgttgataaaaatgggtaacttcccttactgtagcttctaccacggcattatctgacatattgctggtttgattgacaaattctaccttgacatcatgttcatacttgcgatagcgtttttctgctatatcctgcttgacaattgattgccattgtgggattgcagaaacagttaaaatttcatttaaacgattaatttgatgatctggacctaaaacagcggctttagtggataaccacttttcaatcacgtcctgggcgatcgctggtgtcagttgaccttcaggtacttctggtttgctgctattgggttcaggaatggtgactggtggttgattcaattctatagccaagggtgttccctgcacagttggttgggggaaaaacacattgttaaaccatccccagactgtagaaactaacaaccaaaaaactaacaaacctcccatagatagaaacaccagccaaactaagcgagtttttgcatctaatgagttagcaaaagtgcgccgtcgtcgagcatgagaatgttgatgttccgaagccgaacctcgactattaactgcaacgggcttacgccttctacgctttttagtttgactcgttacatcataattaccggcattgatttgctggtaatattcagttcctgcctcttctgctgtcgccgacggttctggcatttctggggtgtgactgttgctgtatctcctagaatgccattctggtgcagaatagttagcagattcgggtacttcgctgggtgctgaggtgtaaaactcaggatcaggtgtatagttgtgatttactgtcccattactaaccccatgattaatcccattactaacattgtgatagctgtgataacgggtactattaattgttggtgaggtaaaaaactgtttattaattgtagtccattcatcagttgcttgtgtatcttttggtaaagcttctaaataagcttgtacctgtttatcagcaaaatattcttttaaagaagcttgttttttgactaaatctcgaaaatgaggaaatacctcttgttgtaaccactgttcacagtacaaacacaatcctggtaacaaatctggggaatcttgagatttttcccgaataatagctaaagcttcatattcctgacttagttccaaaacacgagttgcttcttcggtttgcccaagtaacaaagcacagagagactgttctaaatgcacatcttggcgcttaccaagacgaattaacatttgctttgcctgacgaattaaagctggttgacgttgggcaaaacccctggcgattagggcataaaccgctaaatatgtagacacagcagaaggacgcttactttcagcttcaaataatttatgctgttctgcaactgtcaaatggttgcgtaactgttgaataaatctcagaaaatcatctatatttaaaccagattggtcattaccactaccatcaattccaccccgctcttctaaaatactgtgtaataattctaaaccttgacggcgttctttggttttttctaaaggtagttccaacaactctagaattctataggggcgtagcttacacaggtctgcggcaatttccgcttgcatattaggaaacagaccttcacgcattagtaattcttccccagtttccaatgatatagcagcattttcataattaccttgctgccattgttcccgtcccagttccaaacaagctaaagccactgtgagaataatatctggcagttcaggactggcaaaaaattcctcactgttaagatgagatcctactttcacccctgcgggtttatttctatttactaggtgtggacgacctagcttcagcactaattcgtattctcccaactcttggagaagcaataaagcacccactaattcatctggggcaatttcgatgctgagactttgaacatcgtgattgcggttaatgctttcggtgctgttttctaatagcgatgttgccccaagccgatctggattgtatgcttgggctagataagcctgatcgtaggtactgcgttctctgggatttgataaaaccacgtaagcttcttctatgagttgtttacgagaggatatagctgcaatggaatactcccgtcttggcaattgaacaatgcgatcgctataagcttgccgcaattgttcctcacttgccgccaacggtagtcctaaaattcggtagtaatcaagcggaattcgcacagcctacttcccctgcactgtgtttacgtggcatctcccagagacggacatgattaacctagagcattccaggcttgtaaaaccgtgccataatcatagctttaataataccgtgtataatataccagttgagtgtatatcgtaacagttttttttgtttcttgctaagaataaatatatcccaagaattattttcagctgttgatttagcacagcaccagtatttcccccaagatattacctgatgcactagcctgaagtaaattagctttcggttatcattgccttatgtatgtttaatgtatctttcccctattatatatatctgctaaattatagatatactcgtatcagacttttacatttaaacacacaactcaagcttttgatagtggtagagatgtacaaccaactataatataaaactattaattagttttagctgtttagagtgcgttagtaataaaactgcactacaattgattaatcctgataactgaataaaacaatatagcacgattaatttttcatgaccattacttaacaaggagtaaatttctacacaaaaaattccaatgactgtggcaacaccaagaaagagtagggaagagcatttttgaggcagacctgatattaagatcagaaaattgttaatggctatgcagaaaaacgactattctgattgctaacttaaagagcgaacataaaaagccacagttacgacaccaaaaacccaaaataggcaataaacattaaaaaatggcaaaattacaccttaactattccataccaatcttttttaagtcagaaatgaagattttatagttggcaggttgatttttgccaaggccgtcctatttccagctaacattattaagacttgcttatagcagattacagagaaatgaggtggagaatctaatttcaaggtcagatactatactaaggtcgttttactcttgactcttgactcctgtaagggcgaagcattcgggcaacccatgatcaattttatcaacaggctattttcctgtaagggtgaagcattcgggcgataaatgatcaatttatgtccaaggcgattttcctgtaagggtgaagcattcgggcgataaatgatcaatttatgtccaaggcgattttcctgtaagggtgaagcattcgggcgataaatgatcaatttatgtccaaggcgattttcctgtaagggcgaagcattcgggcgataaatgatcaatttatgtccaaggcgattttcctgtaagggcaaagcattcgggcgataaatgatcaatttatgtccaaggcgattttcctgtaagggcgaagcattcgggcgataaattatcaattttgatcacatgttattttccgaatgcttcgcccctacgactcttgactcctgctataactttaaaaccgtagctttaacttttacgacagggatacttcacaataatggttcaagaacgcacgttacccaaatttgatacttctacagtccagattaccaaagcagaaggactggaattatacgaagacatgactttagggcgcttttttgaagacaaatgcgccgaaatgtactaccggggaaaaatgtttggttttgtccacttgtacaacggacaagaagccgtttccagtggtattattcggggagcaatgcgacctggtgaagacttcgtttccagtacctaccgtgaccacgttcacgctttgagtgcaggagtaccagctagagaggtaatggcagaattatttggtaaggccacaggatgcagcaaagggcgcggtggttctatgcatatgttttctgctgaacatcgtttattaggtggttatgctttcgtagctgaaggtattcctgttgcatctggggcagcttttcaaagtaaataccgtcgagaagtcttgggagacaaaacagcagatcaagtaactgcttgtttcttcggtgacggtgctgctaacaacgggcaatttttcgagaccttaaatatggcagcactttggaaactgccaattatttttgtggtagaaaataataagtgggcgatcggcatggctcacgaacgggcaacatcagatcccgaaatttacaaaaaagccagcgtgtttaacatggtaggcgtggaagtagacgggatggatattttagcagtgcgccaagtcgcccaagaagccgtagcccgcgcccgtgcaggggaaggaccaaccctcattgaagccctcacctatcgcttccgtggtcactctttagcagatcccgacgaactccgcagcaaagaagaaaaagatttttggttttctcgtgatcccattaaaaagctaggtgcttatttggtagaacacaacctagctacagaagcagaactcaaagacattgaaaagaaaattcagggtgtgattgaggatgcagtgaaattcgcagaaagcagtcccgaaccagatgcgagcgaattatatcgctttatctttgcagaagacgaataggttggggactggggactggggactggggactggggactgggaaagaagcaggggagcagggagcaggggagcagggggaaattatttgtattttcccaatcaccaatcaccaatcaccaatcaccaatcaccaaatatgtttaccattactgaacaacaacaacaatacaaaacctacatcctcgcggatactactgctggttctcatctggaagtagtaccagaaagagggggtattattaccagttggcgtttgcaagatcaggaaattctctatttagatacggaaaggttggctaacccagagttaagtattcgcggtggtgtaccaattttgtttcctatctgtgggaatttgcctgataatacttacacctacaacggtaaatcatatactctcaaacaacacggctttgggcgagatttaccttgggaagtgacaaaccaaattactgaaggtaaggtcagtttaagcgtggttctcaaaagtaatgaggtaacacgcgctgtttatccttttgattttcagctaacctttatctacacgctacaaggtaattctttggtcatcgatcaggtttatcaaaatctgtctaatgtacctatgccattttccgctgggtttcatccctattttcagtgtggtgaaaagtcccagttagagtttaatattccctctggacagtatctagaccagaaaactaaggaaatgcacctgtttaacggtaatttcgactttgaacgggatgagatagattttgcttttggccatttgcggagtcagtcagcagcagttacagatcatagccgcaagttgaaattgacccttgactatgatgatatctatgctatgctggtcttctggacgttgaagggtaaggatttttattgtcttgaaccttggacggctggacgcaactcgctcaatactggtgaaaacctaactgtgttagcgccaggagcaagcaaaactacctcggtgaaattaactgcggattttttctaaaaaacagttgacaatctagagagagtttgttatattaaaaaagttgcgaaacgcaaaagggtcgctaactcaacggtagagtactcggcttttaaccgattagttccgggttcgaatcccgggcgacccataaaaagccaaatgatgatattttgcctgaatcaatatctccaggattttgggatttacaggatgttttattttgtctgaatcaggatatctaggatgttattgagtgaagttgcttaatttttaatatctggggagtaggcgatcgccatgctaaaatgatagtcatagtaaaaaagattcaaagtaatttctatgcagatttctattgttttacctgatgaacttgccaattctctggcagcaaaatggggtagtttagatagtagagttactgaaatgatagttattgaggcttatcgtcaaggtttaattagtgtgggtaagttaagagaattattagggatgaaaactcgtttggaagctgatgcttttttgaaatcccaaggaattgatttagcttatgacgaaagagatttagaacaggattatcaaactcatcaagcgttacaacaatcaggtacggtttagataaaatgctagttgtatctgatacgtctccgatttgctatctagtgttaattggtgaaattaacctgctgcatcaactttataatcaagtattaattccgcaaatagttcaagaagaattattgaatgaaaaatcaccaattgaagtacaaaattggattaattctcctcctaactggttaattattaaaaatattgatatttctttatctagcaaagatttatcagttttagatccaggagaaacagcagcgattcttttagcacaacaagaaaatgctagtttaatgattattgatgatggtttaggtagaaaaattgcgagtgatcgcggtttgaaagtgactggtttactaggggtgttagatcaagctgcatcaaacaatttagttgatttaccctctgtaattagtcgtttgaaaaaaacaacatttcgcgcttcctcaaaattgctggattctttattacagcgttactcttcttgaatctctttatttgtctgaatcaggatttacaggatgttgatttgtgagaatggagttaagctaattgtaggataattgataggagaatttaggcgatcgctcttttcccactcatcaaatattaggaattatcaaaatattccacaatattctatgatgctgtaatttgtaactctattctttttcctaatgctgttaaagttttttcgataatagatagtttgatatcatagtgaggatcgagcatatcttttacttcttgttcaccaatattgagaatagaagcaagttgtactcaatattgctaaaataaaggttaaattacaggaatacttagccgtagattgagattaactgaaacaatatcatattgattataaaacacataatgaacccagatgaagaatttcctattattcttgttacacaagatcattatgaacttgcacataacgaagtaatagggactaatagcaagttttggtttgaacataaaaagcttagttattgcttgtataaacaaaacaaatctcaaaatataggacaggattggtctgaaaaagttccatctgaattgtgtgatattttaaaattaccccatgctatttattatctagcagaaacttgggacggaaatcgtggtatagtttcaccttcatttttacccaaaggtgcaacactgattcatggtaatgaaattctcactcgaattttgccaaactatcccacttttgaaaagtatggggtgtcacaacatacaatagatattgtattgagtgtactaacagaagaaaatatcaattttccaattgattggaatgtaccaaaaaatattcaaaaccctgtagaagtatttgttggctacctgatgttagatgcttggataggtaatggcgatcgccatcatcttaactggggtttaatcaacagtcaattgacaccccataccagagaaactatacacttagcacccacctatgatcatgcttcttctttaggaagggaactatatgatgaaaaaagacaaaaactatcagtagattcatatatcaaaaaatgcaagtctgctttttatgaaagtgcagaaaataaaaaatctggcgttgctgatttttgggatgaaaaacaattttgcatatacttaaaacccttgtagagacgttccatggaacgtttctacacccaaaaaacatcccgcatttatgcaatgccaaaaatctctgaaaacttttgatgtattttaccaagttgcaattcgttatccccaagcggctataatgtggttagaacatcttgaacgtatatctccagcagacactctgttaatttttaaccgtattcccaaaaatcgtatatcaagtataacaattgaatttgcacaaaaaattttggagttaaaccaaaagaaattacttaatttcaaggagttattaacatgaaaaaaccacaaacattattcttagcttggcaagatactgatagtcgttcatggtttaccattggtaaattgacttatgatggtaaagaatatcaatttgtttatacccaaggagtaaaagaagctgagaatcagtgccaatttcaacctttatattcatttccagactttcataaagtatacacatcaatccatttatttccagtttttgctaatcgtttaatgtctccttcccgacctgattatactaattttattcaatggttaaatatcaacccaacagaagatgatcctttggaaattttagcccgtagtggaggagaaagagaaacagatagtcttgctgttttcccctgtccagaaccagatttagaaggaaaatatcaattgtacttttttgctcatggactgcgacatttacctaaatgtgccattgatagaattaataatttcgtacccaaagaaaaattatggttagctcatgaatttcaaaacccttatgatactaaggcgttaactttaaacacagaagatcatcatatcgtaggttattgtccgcgttacttacgcagtgaaattttcgatttgatttggaataaccctagttcagttactctagaagtagagcgtgtcaatgtatcacctacaccgcttcagtttcgtttattgtgtcatattactgctgtgtgtgaaaatgattttcgccccttttctagttctgaatatcaaccattggtggtagataatttggtgaatgctagttagtgtttagggttgtctgatagcgaagcgtggcgtagccatatcaggatttccaggatttaaggattttcaggatgtttttgatgtctggtgttaaattttatattcttaattatctaaatgttaattttaatatagttttcagtattaataacagcctacaaacaaatatacactaagatgattagacacatatatcctgcgtcaatcattattagggtttttgtaatatgtctagtaatcctgaaattcaatttttatcccatcttcaagactatgcaaaagatttaactactaaattttcactggcttctgtttcttttggtgcagaagatcaactaaaatcacctattgaaaatttattaaaatcagcagctaatattttaaattcatctattgtagtagtgactgaagtcagagaaaaggtactttcaggaagaccagatatgggaataaccatgaatggtcttttaatgggacatattgaattaaaagcaccaggaaaaggcgcagatcctaataaattgaaaggagatgataaacaacaatgggaaaagtttaaaagtctgccaaatttgatttatacagatggtaatagttggggactttatcgcacaggtgaaaaggtaggaaaaatcattaaattttcaggagatattactgctaagggtgcatcagctatcactgctcaaaatgctaatgatttactaatattattacgtgattttttaaattggcaacctatagttccttctacacctaaagctttagcagaaatgcttgctcctatttgtcggttattaagaaaagatgttttaactgctcttgaagatcctgaatctaatttaagtcaagtagctaaagattggcgacattatttgtttcctgatgcagataatcaacaatttgcagatgcttatgctcaaactttaacctatgcacttttattagccagattttccggtgcagatgacttatctttaccacaagctgttaaaactattagaacaggtcataatttactagctgatgctttaaaaatattgggtgatgaagcagcacgggaacaaatagaagtttctgtaaatttattagaaagaataattgcagctattgatgttacagcactaaataaagatggttctgaagatccttggttatatttttatgaggattttctggctaaatatgatccaaaaatgcgaaaagaaagaggtgtttattatacacccattcctgtgattaaaacacaagtaagattagtagctgaattattagcagaacattttgatgctgaattttcctttgtagatgataaagttattacgttagatcctgcttgtggtacaggtacttatattttaacagctattaaacatggactcgatcaaattagtaatttaagaggaaaaggaatgaaagtttctgctgctacaaatgcggcagcaaatattcacgcttttgaaattttagttggtccttatgcggttgctcatttacgtctaactcaacaaattttaagtgaaggtggaactttaccagaaaatggtgttcatgtttatttaagtgatactttagaatctccctatgcagaattaagtggtaatttacctttaatttataaatctttaggacaagaatataaacgcgctcagaaaattaaacaaaatactcccgtgatggtttgtttaggaaatccaccttataaccgtcaaacaattgatgaagatgatttaatgaatcagaaaagaaaaggtggatgggtaagatttggagatagtgaacaaaaggttgatgaaaacgaacaattgatgaaaaaacgtcctattttagaggattttcttgaaccattaacagcaatgggttatggtgttcatgccaaaaatttatataatgattatgtttatttttggcgatgggcgttgtggaaagtttttgaagcgaatacagaaaatcgagccggaattatcagttatattactgcttcttcctatttgcgtggtcctggatttgcgggaatgcggaaagtgatgcgtcaaacatttgatgaactgtggattattgatttagaaggcgataatttaggagcaagaaaaacagagaatgtatttgcaattcaaactcctgtggctattgctattggtgtttgttacagtcaacctcaacctgaagtttctgctaaggttcattttaccagaattgatggtacaacagaagaaaaattagcaagtttagagaatattcattcttttcaaaatttacaatggcgagaatgttctacaaattggactgatttatttttacctgtaagtaatacagattatggcaattgggcaaagttaactgatttatttccttggcaagaaaacggtattcaatttaagcgaaaatggactatcggtgaaaataaggaagttttacaggaacgttggcaaactttgattaatgctagtaaatcgccgggaacacagaaaaaactgtttaaagaaacagatgctagaaaaattagtaaacagtatccatctttagaagatagaggaaatttattagctcccattgctaatttattatcaaaagatttacctgtagaaccaattcgttatgcttatcgaagttttgatcgtcagtggactttattagataatagattgtgcgatcgccctagaccaaatttacgacgttctcacagtaataaacaggtttatatgacaagtttattaactaaagttttaggtcacggtcagtcatctgtaatcacttcagaaattcctgatttagattatttttgtggacgtggtgcaaaagatattattcccctttggagaaattctgaagctactgaacctaatattactactggagtcttgcaaattcttagtaatacacttaattacaatatttccccagaggatttttttgcttactgttatggaatacttgcaactcccaaatatgtgaaagaattttggaatgaactagaaacacctggtccaaggattcccattagcaaaaatcgggatttatttattaaagtagtagaaataggacgcactttagtttggttacatacctattgtgaaaggtttgttcccagtggtaaaaaaccaggtaaaattcctattggtagagttcgttgtcaaataggaatacccaatacagtaaacgattatcccacagaattttcctatgatgtcggtacacaagaattaaaagttggtctaggtgtatttgaaaatgtccgtcctgaagtttataattttagtgtttccggtttagaagttgtcaaatcttggttagcttatcgcatgagagacggtgctggtaaaaagtcttcacctttagatgatattcgtcctcaaacttggcaatttgacaatgaattacttgatttactttgggttttggatgctactgttgatttataccctgagttatcttctttatttgaggaagtgattaaaagtgaattatttgtagctactgagtttccaaaacccacggagttagaaaaatccaactctctagaaatgcaaactgagttactactttttaatttagaagagataaatgaagaagatgagtaaagactttcatgatttttaggatgggagagaaataaaaaataaaaaataaaaaatccgcgtttatctgcgtttatctgcgtttagttatataaattctctgaatgtgatattctcatattgtacagttgttgctatttttgaagtgaaaactcttgaagaagcaaagcgatcgcaccaagcactaaagactaaaccgaaaatcctttaatcctgaaaatccttaaatcctggacatcctgattcagacaaaaaacgtttatattagagtcagagactctaaaactgcattcccagtctggagactgggaactaggaatcctgattcagacaaaaaacgtttatattagagtcagagactctaaaactgcattcccagtctggagactgggaacgagaataaaatcctcaaatcctggaaatcctgattctgactaatattatttactcctgtgtcgcaacagtcaaaacctgcggaggagaagcatcaggaggataaagaaaatcaacttccacccaagaattatcccccggtttcatatttaaagacaccaaaggttgaccaggttcacctcttttttgcactaaatgtacaaacctagtcgccggtttaccttgttcatcccgataacgtacccgcaccgtacccctaaagaaaacctgacgcgcaggagttgtaaaaaaccttaaaccagattttgttaactcattttctttaatgggagtttgcagagatacagtgacattttttgcactttgggaattattcaacaaaggcaaccttaaactatattgaatgccataattaccatgtgcaaaataagctgtatcaggataacggactaacatcggtgctgtttgaatttgacctgtaccaaaagttcccccatgtaaagaacttaaagcataagaaaaagcttgaccaggttggggaatagttaaatacctgctgttagaattatctgttaaaagcgatcgccattgtgacccacgggacacacccgcaactcttccataaattgcaggtttaccagttccctgtatgggagtgggagttttatctcttggtgtggataaatcaccattctttaataaatcttcccattctgctaaacttggcgatcgctcactaccatcagcatttgtctttgcaaacatcgctaaactagcagcatacaccgtcccattactccgcaaacgcatataagtagaacgaccatttaaaggtggtgtcaattctcgcacgggaataggtaaatttaataacatctgactttccccaggaggaatgactatttgcgctgggaaaatattttgtcttctccctctcaaaatatcagacatcaccctactaccaggacctgcaaacacatttcctgcatcattaggaataaaagaatctaatggtaaaaaaggtgcatctggttgacttaaataacttgcaccttgcaaaatattcacagttaccgatgtattaccagggttatgtaaaattatcccgtggtaaagagaacgtaaatcttctggtggttctgctctagcaatatgatgggaaaagacatcaaaccgcccctgaaaaggaaagtttaaatgtgcagtaggtacttttttatcctctgaaggaaaggtagaaagtaaaattccttcctttaataccaattctggactattactattaaatactggaacagtatccaacctgcctggtaaagctcgcacctcttgaggtattaccacttcttctggtggtggtgcggttggagttgcttgcgcgagagtcaaaccgagtaatgctgacaacataggaaatttaaaattcaaaatttataactgactggggactggggactggtgacaggtgacagttaacagttaacagttattagtgagtggagtttatgatttactgttccccattccccattccctattgcctattccctgttccctgttcccttgattcaaaaataaccaaattattcatgattaaaacaaaatcagcaagaatgtctagcaaattttcttgatgcaaaatcggaacatggacaaaaatacaaggaatgggtagttgagattgattcaagtagtccaacactgaataataaagaccttcgcacacaaatttaccacagtcgtaactaatctcaactgctgctgtctcagctattaattgttcaacattaacaattgtgtgcaaagttgttatcccaaaattttccccaccatctctaaatgaaatatcagtagtctgtatagactcgctactagcaacaacttccacacttaaattttgccgactagcagccataccacaacagataacataatctggtttgagttcattgattttggcaatgacgcgagaactggcaagggcaacatctacaggtaatcgtcgcaaaaaagttaagtcatgatagatatcagccattttggctagttcgagtaacaagtcatcagaagaatttgactgttgttcactcagccaagtgtcaaaagaagttaataatatttttttctgcataataaatattatttagaatattatttagaattagaatataaatgcttccctaataaatttacaaggagcaagtaaatgccagtcattgcgatcgtagattatgatatgggaaatttgcactcagtctgtaaaggtttagaaaaagctggtgcaattcctaaagtaacttattctgccaaggagttagaacaagcagatgctatagttttgccaggagtgggagcttttgatcccgccatgcaacatttacgttcacgcggtttagaacaaccaattaaagatgtgatcgcatctggtaaaccgttcttaggtatttgtctaggactgcaaattttatttgaatctagcgccgaaggaactcaaccaggactaggaatagtgcggggaaaagtgcggcgatttcgtccagaaccaggaatagctattccccacatgggttggaatcaactgcaactgactcaaccaagaagcattttatgggaacatttaccccatcaaccttgggtttattttgtccattcctactatgttgaaccaactgaaccgcaaattagagcagcaatagtgactcatggtagtcaaactgtgacagcagcgatcgctcatgaaaatctcatggcggttcaattccacccggaaaaatcctctaatattggattacaagttttatctaattttgtggctcaagtccgtgaaaaaatccctgcttaataaaaatttgctttctttgttagtcgtcagttgtctaatgactaatgactaatgactaataactaatgatcaatgactaattaatgagtttaagaatttacgggaatcgtctgttaaaaactttaccagggcaagagactagacccaccagtgcgcgagtacgggaggccgtttttaatatttggcagggagaaattgatcattgtcgctggttagatttatgtgccggtagtggttcaatgggtgcagaggctttatgtaggggagcctgtttagtagtaggaattgaacaagcaagtcgagcctgtgccattattcaacaaaattggcagcagatagcgaataatgaacaaaaatttcaattattgcggggaaatgtcctgcaacaattaaaaaaattatcaggtcaaaaatttgacaaagtatattttgatccaccttatgccagtggtttatatgagcctgttttagaagcgatcgctcactatcaacttttagatcctcaaggggaaatagcagtagaacatagtcctaattttacaccaccaatcatcccaacttgggaaatcagccgccaaaaagtttatggcaacacagcactaactttttacagaacaatggaagtatcggaaagcgagtgatatcatctacggttgaatacttatcatatctgttgagacttgtaattggtaattggtaattggtaattgggcacaattactaattagggtttgctgaataaacctaaaaccttgatatatcaaaggttagaggctgataaacacagaaattagtgcaagggttttgaagggtataccggaaaaagtgtgcattttttgggatttcaacagatggcaaagaaattttcaaatctcctcctgactcctgactcctgactcctgactcctatgccctcacggaaagactttctcagcaacccctaattaaacagctatatcgtaagtgattgggcggacatattaaaattaatatacaaacacacacgcctatatgtgagtaggggtttagcaatgctaaacccctacgagaactagctgttaacccttagccgcccaactcggtaggacgcttgtattgcttataggcagcgtaaaacagtccgctaagagtgacgaaaatcagacccagaacaatacctgagagtaggggttcaaccactgtaaatctcctctttacaaattttcaagtttcgtttcccgtttttaatcttaccaaatcccgcatcaatccagcgccctaagccgtttttggattataaatactatctaaaaattttcatctgtggttgcaggtagaatcaagaaattttaagctatgtgtagaagatgaaatatttttttgtaagaattcagaagtcaggattcaggagtcagaagatttgctcatctagcgattactcaaatagtgattgttagtttaaccgttaaaaagctgactgctgaacactgatagctgaatgcttacagtttttcgtacacctagactgtaaaagcaaactcttgaataaccagcttatcaaaactgaaacttggagtcagtggatcactttgtcgcttttgtccatactcatagccatacccgtaactatttttggtgttcagatagttcaaacctctgatccttacgtcaaaaatgttttatcactgacaggcaacccagtacagggaaaggctatctttcaaaccaactgcgctgggtgtcatggttgggaagctcatggactcgttggaccgagcttacaagctgtctcgaaacgcaaatctcaatatggattgattcatcaagttattagcggtgaaactcctcccatgcccaaattccagcccagcgcccaagaaatggcagaccttttaacttatttagaaggtctttgaataagggaacagggaatagggaaaagtgttattttatgttattttatgtttttatatgttgttatagattttgacaggctgaccagaaaatcaatggataataaaactaccactaaaagagggttttaatcctgactcctgtaaaggcgaagcattcgggcgataaattatcaatttttgtttaaggctattttcctgtaagggcgaagcattcgggcgataaattatcaatttttgtttaaggctattttccgaatgcttcgcccctacttcgtccctacgactcctgactcctggaaatttcatgtttaactgagtttaagagtacattcaagaatcaatttctggttaaccaaggaataaggttgaatttttaacgctttttgaaaagcttcaatagcttcaccatattttcctattgctgcataacacaaacccataccatgaagtgcgccaaagtgtactggatttagctgcacaaccatttgacagtcagctagagatttttgataattgcctatgctgtaatataaaaaagcgcgtctattccaagcttcagcaaaatctggttgtgttttaataagttctgttaaaactgcttcagctttggctgtttccccagcatccattagtttttgactataatcaatcttttctagcccatatatacccttttgctgaaaccagaagcgccaaattttgcgagttgcttgctcacgaactaaagcatcaggatttttcaagtcttccagtaaagaattgatagataaagaatccatgcagttgagataggtaagttgatattgccagttacttgtgcagtaagtattcaaacatcagcagtcagctttttaacaattacgccaaaaatacttatttgctcatcaagcaattaatcaaaaattctgacttttgacttttgaattcttaccttgtgcagaagattatctcctaatttatgttaatagtcatcacggtattctccgatcttgattaaaaattctggcaatattttgtattgattcatactattttttaaaaaaattatgtaggcaatgctggcgatcgctcatttgggacaacataaaaggtaagcattcagtcgtcagcagtcagcaggctgaatacttgcaataaaagtaactgttcagggagtgctatatttaagcaaccttttactgtaaattcttctgtacccaactcctaaaatttcgcattgcctgacttctgccaatagttaaacactgctgtacatactcattaactaaatccacaatgggaatattaggaaaattaggactagatggagattttacatatttcccatcctgtaacaagaaaatttctaaaccttgttttttatatcgccaaagttcaggaactcccaaaatttgataattttcaaattgagtccgagaagtaatatcaatttcaatagctaaatctggtggtggatctatatttaaatcaattcgatttttaccaattacagcggcttgattttgaatgtaaaaactggtatctggttctacggcttgcctcattctctcatttttcagagttgtagaaccaaagggttcaaaatcaacattcagtatttctaacaagattttcaccaaatcaccaacaatttctttatctttttcatgttcaggtaaaggcaccataatttctaaccatccattgctataggaaatacgtgcagcacgcttttcccccatttcttctaaaatattttctagttgctgccaactaatatctttgagtaacatttgttggcctggatgaacaataatttgttgcaattctaacaacatattacctctttaataattgatagttgataattgataattgataattagtgattggtgattggtgattggtgattggtaattggtaattatttattttctcctcttgctccttacctaatcataaccaaaatttttaacaccaacctgctcacatctcctaaattagttaaaatcaaaatctaaaacacagtgaaccaggagaaacccaggcgtgcctacactcggtgtaaatattgaccatatagccactattcgtcaagccagaaggacagtagaaccagatcctatcgccgcagcagtattagcagaattagccggtgctgatggcattaccgcccatttgcgggaagacagaagacatattcaagatcgagatgtgcggttattgcgacaaacagtaagaacccacttaaacttagaaatggctgccactgatgaaatgttagcgatcgccctggatatcaaacctgattatgtaacattagttcccgaaaaaagagaagaaatcaccacagaagggggtttagatattgtcggacaaattgctagaataggggatatagttgataaattgcaaaatgctggcattcccgtgagtttgtttattgatgccgaacctgcacaaatcgaagcttctgtcaaggtgcaagcgaagtttattgaactgcataccggaaaatatgctgaagctaaagatgaaacaactagccagcatgaattaggcttattagccaaaggatgcgaacaagctataaaagcaggtttgcgagtcaatgccggtcacggactcacatactggaacgtttacccagtagcggcgcttccaggtatggaagaactcaatattggccatactatcatcagtcgggctgccttggtaggaatggaaagagcagtacgagagatgaaacaagcaatgactggggactggtgactggggactggtgattggggatacaattttggattttggattttggattttggattgtatttcatgaatccaatctaaaatctaaaatctaaaatctaaaattctcctgactcctgactcctgactccttgatatcctttcacaagaggggttgtagctgcgtaatcctgaaaaattagagtcacattggtaacgtaaaacttttatgacttccacacagcctaacaacctacctctttgggtacaaaatagagatactgtaattgagtacagcaagcacgccgaatggcgctatcagacacccccagattatacccgttctaaagaaaatctagcccaagaaagtacctgtaatcacgcagaaggttcactagaagctattgtacagaatttagtgagaacctttgaaatggaggtatcttttaagagtaaccctaaacagtggttagctgttgtgcaggataagtttcgcgtcagtacaaatgggggacaagagtttacagccacagatgtatacacccagggtacttataacacatttatggctgattctgaacattacaaagcttcagaagaaacttttgaatcatcagcgaaactttttcatagtacctttcctcaaggttttccttgggaactgcttgaagtttactcaggtccaccagtggttacatttaagtggagacactggggacattttcgtggtccatataaagactttgcacccacaggggaaacagtagaaattgtcggtatcagtgtagctcgtgttaccgatgatttgaagattatctctttggaacactattttgacaacaacctgtttttagagaaattgacagcaggtggcaaaatggaaaatgctgccaatagtgaaaataagagtagtggttgtccttttggttcttggttcaagggcgtgaagaaaagttaacctattagggtacagtgttgctgctgtaccctataaattattagatagtgactcaaggatgaaaatgacaacatactattacgttttagctagtcaacactttttactagaagaagaacctctagaggaagttctcaaagaacgtacccgtaactaccacgaacaagaaaaagaaatagatttttggttagtgaaaaacccagctttcctggaagcaccggaaatggcagcaaataaagctaaatgtcctaaacctccggtagcaattatttctaccaattctcaatttattacttggttaaaattacgtttagagtatgtcatcactggagaatttcctgctccttcggcaacaattcctaatcctttggcatctttaacaactgtgtcttaatgaaggcagggggcaggaggcaggaaaggcaggaggcgcagagggagcaggggaggcaggaaaggcagggggaagaatattaacttttgccttttgttccttattccctattccctattccctattccctatttcctgaaataagttataaattatacaatattaggtatacaccaaatgtttttaccaaaagttcattatttaccaagtgctttattattagcagtagctccaataattgcaggtattagtcctgttttatcccaacaaaccattcctgcttgtcaacctcccagtgcgggggaatatctgttgttggttgttagtcctacggttaataatcaacagcagttacgtagtgccttaccatctgacctaaaaactgttacttgtaaatatctgaatgaaacagtaacgcgagttggtggttttaacaagattgaagatgctaaccgttgggcaagatatgttaacaacgttgttggcttgtctgctattattacgactcgaccaacagcagcaacagcaccaacaacagcaacggtaacaccagcaataatcccatcagcaactctaccaaatcagacagttagttataaccccagagttttgggagaaggttttgctgtgttggtagattatttcaaccgcccggaactagccaaaaatgtacaaagaacggtaggaggtaatgttggtttagtttcctatggacaacgcccctatctactggctgtttatactaccaaccaaacagaggcatacaggacattgcaaaaactgacggagaatggtttttttgccctgttagcagatggtagaaaagtcatgttactgcgttcagttgtcacagtaaggtgattggtgattggtgattggtgattgggacaaatataattaattacctattacccattacccattacccattacctattacccattacccattacctattacctattacctattacctattctctcttcccttcttactgtcaactgtcaactgtcacctgtcacctgtcacctgtcaccttactaataagcggctttagctaaccaggaaatggtgacacctaaaactgaaccagctatgacttgaactggtgtatgtccgagtagttctttgagacggtcttggaaaaagtctggtttttcatgaaataattcatcaatcatttgattgagtatgcgagcttgcttacctgctgcttggcgaactccagctgcatcgtacataacaatgatggcaaataccgcagctacagcaaaatctggagatgaccaaccgatagtttgcccaactcctgtggctaaagctgtgactaaagctgaatgggcgctaggcatacctccggtagtcactaagacacgcagatccactttttgatgtttgatgacttcaacgatgagttttaatccttgagcaacaaaacaagccacaagtgcaaccagtagcacccggttgttgaaaatgtcgcataagtcctgcatggttttttggttaggtgattgaataagagcagcacttgtgtgttgaggaacagttttttagcagttagccgtcagctttcagtcttcagctttcagccattagcagtataacaggtgacaggtgacaggtgacaggtgacagagtataaagtctgtatgtgtttaagttttatcatctgttcatgaagtacaaccttgaccgtcgccataacatgattgtggtggatgattttgtaactaaagtttggcaattttgtggttgtaattttaaatttgagattgtgcaatccaaaatccaaaatccaaaatccaaaatccaaaatccaaaaatccaaaattctccctagtgattgcgattgataataaagtgagcgatcgcctgtaggggtactgctttttcaccaaaactttctagttctgcacaagcttcttcaactagctgttgtgctttagcgcgtgattcttcaattccccataagctgggataggtaactttttgtgctgtaaggtctttacctgcggttttacctagttgttcttgagtagcggttatatccagaatatcatcaatgatttggaaggctagaccaatattttgagaataacgagttaatttttgtacatcttctggggatgcgccggcgattattcccccacacactacacaagcttctaacagagcggctgttttgtggttatgaataaaattcaaagtttctagggaaatatctgattttccttctgattctaaatctaccacttgaccaccaactaaaccggcagcacctaaagccttaccgagacgggcaattacttgtaaagttctttgtgtagggacattttcgggggtttgggaggctacgaactcaaaagccaatgctaacaagccatccccggctaaaatggcgatatcttcgccgtagactttatgatttgtcaacttaccacgacggtaatcatcattatccattgcgggtaagtcatcatgaattagagacatggtgtggatcatttccacagcacaagctgttggcatggacatttcaatagtgccaccgatcatttcacaggtagcaaggcataggataggacgtacacgcttacctccggctaagagcgaataacgcatagcttcgtaaattttctctggataaaccacgggaatagattgatccaaagcagtatcacaaagcttttgtcgttctttgagataggcagcgaggttaaactggactggttctgatgtcttttgaaaattatccgttgctaccataactgagaattcctaaagttttcgattgatgctgatctgtgtgacaattttacggtgtagaggagcagaaacactcacttctcgattttggattttggattttggattttggattttggattttagttagattccataaatctgaaatttgcttagttactgtttgtccgcaaatagctagagacggtattttgcagtaacatggcgactgtcattggaccaataccaccaggaacaggggtaatatattctgccacattagcagttggcgcaaaatcaatatcgcccactaaacgacttttaccactgctatcggtgacgcgatttattcccacatctaccacaacagcgcctggtttcaccatgtcggcagtgattaatccgggaatacctgctgctgcaacgagaatatcggcgttttgggtgatggttttgaggttttgggtgcgggagtgggcaatggtaactgtagcatcagcatctaatagcattaacgccattggcttacccactaagatactacgtcctactactactgcttgttttcccaccaggggaattttatattcttctagtagtcgcattactcccgctggggtgcaactgcgtaaacctgcctcacttcgcaccaaacgccctaagttcactgggtggagtccatcagcgtctttatctggggcgattttatgtaaaagacttatagcatccaaatgattaggtaggggtaactgtactaaaattccatctacccgttgatcttggttaagttctgcaatgacttcctctagttcagtttggttggtgtgggtgggaaaatgtttaccaaaagaagcaatccccactttagcacaagctttttctttgttgctgacataagctgctgaggcagggttatctcccaccatcaacactgctaaaccaggaggtcggccaattttcggttgtacttctgcgatggtggcagctaattctttctgaattttagcggctaatgctttaccatcaaggattttcgctgtttttgtttccattgtcattagttattagttattagttattagttattggggactggggactggggactggggagaaatatttacctcctgcctcttgcctcttgccttttgcctttttactgtcaccaatcaccaatcaccagtcgcctattgccttaactattttctcagattaactgcgtcaactgaaggataaagaataaaaggatgacctcaagcctttttttatcagtgcaacatagatagtactaatagaaacttgaagaaactggtaacaaggtaaggattaatgcaaaaattctctcaattgcgtgctgttcaacaacaaatacaacgtacttccttgaaatcttttcatcaaggattagccttttttttggtagtgggactgtgtagttgtgctaatggtaaacctggggaaatgaatttacaaaatctgaggattggcgcaaatgttacaccaattcaggaaattaaaccagcgcaggataatcaagctactgtttacatccaaggaaagatagaaaaatacgctcctttgctcaagcagcaagcatatcaaattgctgatgccactggtaaaatttgggttgtaactaatcaaagtaatttaaaggtgggacaagaggtagtattaaagggtaaggtaaaatacaaaagtattcctttgggtggtcaggagtttggggaagtttacttagaggaggaataatatatgaatgatcaaattccacaagtagcgattgttattctctaccaagacaataaatatctcatgcagctacgggacaatatccccaccatagctgctgctgggtgttggggtttattcggtggacatttagaagctgatgaaaccccagaaatagcactggtgcgggaagtaaaagaagaaattggttatgagttaccttattttgctaaatttggaatttatcccgatgagagagttattcgtcatgtttttgaagcaccattattagtaggattagagcaattggttttaaatgaaggttgggatatgggattattaacaagggaagatattgaaaggggtagttgttattcggcaatagctggagaatttagacctttaggtattcctcaccaaaaaattatgctggattttatagtaggtgacaggtgacaggtgacaggtgacaggtgacagaagaaattatttagaaattgtagagagaatcattatagtattttatgcaaatagtaaataaatttccccgctggttaacttttggtttggcttttcctctcatcattctgaacggatggttattaattcaggttgtccaatattttcaacctttggtaagcgttgtttctgtcgctattttgctatcttttgttttaaactatcccatcaatttttttcataaacggggaataccacgtaatttagcaattgtgggagttttactattagcagtatttattttaggggctgtaggtgtaattttagtcccgttaattttccagcaacttaatgaattagtgaatattctccctgcttggattgattcgggaactgaacaattacaagcttttttgaattgggcagctacacaacaagatttacctgtgaatattattggtatagctacacaattactggaaaaaatctctaatcaatttcaatcctttactggtaaaatcctgggtttagcatttgatactattggatttttactaaatttaattctagccattgttttaacaatttacctaattttaaatggtgaaaaattgtgggatggaatttatcaatggtttcccagttatattagcataaaagtgagagcattactaaaagaagatttccaaaattattttattggacaagcgactttaggagcaattttagcagtaacagttactttagcatttgtggctttaaggattcctttggcgttattatttggtattgcaattgggtttttctctcttttcccttttggtacgggaataggtattggtattgtgagtttgttggtagctttagagaacttttgggaaggggtagaagttgcagcaatagcggtgactattgatcaaattaattctaatattgttgcaccgagattgttaggaaatttaacaggtttaaatccggtttgggtggtaatttctttattaattggggcaaaattaggtggggttttaggtttgttggtggctattcctatcgctagttttattaaggatattgctgatagttggaaagcgggggagttgaagaaagtggataatgttgatggtattgtgggtgaagtaaagtccagtttagaggtaaggtgagatttgtttgaggataaaaaagtgtgattttttgttaatctcttgagtagaggcgcttttcgtaatgcttcatcattttatatccatgattctagggaaaaattctctacttcatgaatgcgcctaaaatcgctatcagcagaaactagagtaagattgtattgaatagctgttgctgctatccaaagatcatgatcactaaatcccagattttcaattttgaaactacgacgtttgcttttttctttgggtgcaaaataattaaaaacagatgctttgagacgactgtaaataatagctgtttcttcatccagaaaatacagatcgacttgagataaaaatttctgaactgcactaagattttgatattttagttctgatttttctgtcatatatagcagttcagaatatgttataatactcacaccaattgttaaaccagcataggattttaagatattggtaacttgaggattaccgttgataatgtaactacagtggttagtatccagtaaataagacatagatagtaataaaaattaaaactgcgtttgagaacgggtttcttcaacaaaacgcaaacaatcttctaaatcatcaccttgccaagttcccgcatactgtaacaaatcacctgcttttttgcctctttttataggagaaatacggcgtaattgcttttggtttacggtgtttttggtgaggagagagtcgagaaattcacttaataaggaaagttgttctggtggaagttgggatatttgttgttgaattttttcatgtatttctaaatctgtcatttttacctcagtttgttagtctaatgattgtatttaattcctagcataacctaaaaatggaacatttttgttgtttcataattaatgtaactaaccagtaattacctttttatcaagacgttcagcaagccataatttaattatagaatcagaagttacacctaaacgttttgcttctttttctaacgcttctatcatccacacaggaaaatcaatattcactcttttttgttcataactgggacgacgtgcttgagataagtctaaaaactcagtgatatcttcatcattatcaaatttagtatcaaattcttcagctttcataaatatttacctcttcagtacgagaacgacgaacagaaataatccttattttatcactacgataggtaatgactgctgaccaatgtttatcacctattttaccaataactaaaaatctagtttcatcggttgtgcgtgcgggtatttctacacggtgtatatcattccacagtttttgtgcttcaataaaatcaagttatgtttaattttatttgtttcacttttgttaggatcaaattcaaatttcataactatcgcctttttaaaaccctaacatcaaaaattactggttcaactaacaatgcagaatcaaaacagagaaaaattaaaatttacttgtgcaaagattttaaacatttcttaaaaacacagatggatcaacatgaaagaaatcactaagtttttcaatgtgttcaatggtgaggggttgttttcctgctataacatcagataatatagtttcatcttcaaaaattgacattaaatctgtagattgtaaattcaattcttctattaatgctttcaataattctactccataaatgtcacgaatgggataattttgatcctcatattcagatacaactaatcctaataaatgtagataatctcgttcatcaggagttagattttcttgatctaataattcatcaatgatattttgagttctggttaattcttcctcagatgtgatttttctgggtggaaaagaggtaattaattctaagtatgttttaggtgtaccaagggtcttgtttccagttttgtttatcatattctgcatgggtaaggatatggcgaatatacacttcttgatattgatagtctactaatgcaattagtcggtaattattaccactaatattaaaaacagtaaaattaccaactaaatcagcagatggaaatacttgacgtaattgaacaaagttttcccatttagctttactaacaattttataccatgtttctaaatttgattcagctttgggatgctgttgagaaaattcttttattctttttttgctgataatgtgcatattattactcatccattaaatcagcaattaggcgatcgcaaatatcttgccatagggttaaatgttgttgaaagttgagaataacagctattttttgaccttgactatcagttaaaaactgaatattttccagttcaggatattggttaatgactgtttcccaaagtgtttgatggggttgtaggtctataaatactcctgttcttttattttgttggtctgttaaaaattgaatacctggtaattgaggtaagttattattttgatatttttgataatatttacctctaactcctgtactgaaattatattcttctaacaacattcggctattttctgataaacaacattaattttcggttgagatttatccgtttgttgatttgttaccatgatttctacattttgtcccaattttattaaataacttaataaattttcaatggtaaattatttgagaataccattacttaaattattcacttgtgcaagttctaaacctaaaatttgtccagtttgttctggtgtgatttgttgttgttttaaaatatcggcaatgacagaagctaatttaactttggctagtttttcttctgcatttacaaatcctaaatcttgaaagatattgccggaactgatggtataatttaacataatttttttactgcgatttactaactggaacgccctaattgttttaataaatcattacgattattgatataaagttgatcatctggttgaatactaattgccttttcataacattttagtgcttcttcatacctttgtaaattctctaggcacaaaccccggttattccaaacttcatgatagtcaggtttaatagcaatagcttgatcgtaagatgcgatcgcttcttcgtacctttctaattcatgtagagaattacccctacaaaaccaagcatcatcatagtcaggttcaatagcaatagctttatcgtaacatgaaatagctttttcatacccttctaattcatgtagtgctgaacccatgtaatgccaagcttcataatagtcagagttaatggcaattgctttacgaaaagatgcgatcgcttctccataaatttgtaacttacataggagaagaccactgtaacaccaagcttcatagcagtcagggttgatggcaattgctttatcaaaagatgcgatcgcttctctgtaaatttggaacttaaataggagaagacctctgttaaaccaagcatcatagtagtcaggtttaatagcaatagctttatcgtaagatgaaatagctttttcatacctttctaattcatctagtgctgaacccctgtaaaaccaagcatcatagtagtcaggtttaatagcaatagctttatcgtaagatgcgatcgcttcttcgtatttttctaagtcatgtagggaaagacccctgtaaaaccaagcatcatagtagtcaggtttaatagcaatagctctatcataagatgcgatcgcttcttcgtatttttctaataaagatagggaaataccccggttattccaaacttcatgatcgtcaggttcaatagcaatagctttatcataagatgcgattgcttcttcgtatttttctaattcatgtagggaattaccccggttattccaagcatcataatcgtcaggttcaatagcaataactttatcgtaagatgcgatcgcttctctgtacctttgtaattcttctagtacaatacccctgttaaaccaagcatgagtatagtcaggttgaatggcaattgctttatcaaaagatgaaatcgcttcttcttccctctgcaaatagcatagggcaagacctcgcttagaccaagattcatagtaattgggttgaatagcaatagctttatcgtaagatgatatcgcttctttatacttttctaatctacctagtgcattacctctatcattccaaaaattaggattattaggttgaatagcaattgccttatcaaagtatgaaattgcttcttcatacctttctagatcaaataatttaactccttgttcaaaccaatattcactggactgattttgtgttaatgactgtctattctgttgtttaacagttgaaaaaacttgatttaattcttctaatgcttccttggcaactttataacgttgtcgccaatcataacgcaccattttattaataaaattctctaattgatgactaactaaaaccaaattagtccaaatgatttctccttcctcatcttctgataatgtattcagagaaattccagttaatccttcaattgccgtcatacccaaagcataaatatcactactatatttaggcttaccaaaaccctgttctggtggcatatatccatgtgtaccaacacctacagttttactggtaaaccctgatttcatggcaatagtagtattaatttgtttcacaaccccaaaatcaattaatactaacttcccatctttacgtcgcataatattgtctggtttaatatccctatgaataactctgttgtcatggacataaaccaatatttctaaaacatctcgtaaaagttgaattacttctccttcacccaactttttaccaggagatatttcattagttaaatcattaccttcaataaattcttgaatcaaataaaaatcttgaccttcctgaaaataagcatataatttaggaatttgatcgtgattttgtcctaattgatataatatttgtgcttcctgttcaaataaacggacactatctggggtaattattgttgggtgcagctttttaaccacacaaactggtttaggagtaacaggaatatctaaatctgctgcaaggtaagtttccccaaacccacctgcacctagttgttcgataatctggtaacgttgacggagaatcttaccaatcataagatgttatctttctaaccctgtttccatctataataaccgataatctctctttgtgtctctctctgcggctctgcgtctctgcgtgagaaaaaaattaaacaacttaaagcgatcgcccccattaccccataaaatcatcaactatgtttttaaataagcattattatgtaactatttgttataatagatagaaatgctatcaaaaaaacatatacttaaagattagtagtaacagtataaaccagaaacactgacatagaataaaaacaatttgatttatattacaattattaaatcactaaaatatatttggtgttaattatgctaaaaaaactcattctcgaaaattggaaaagtttccgttatgctgaacttccccttgatcctttaactgtacttattggaactaatgcaagtggtaaatctaatgttgttgaagctttggaatttttacaaagaatagctaatggtgaaaatattgaaacagctttagcaggagataaaacacttcctgctattcgtggtggtgtagaatgggctgcaagaaaaggtgaaaatgagtttatattaacaataataattgagggtgaatataaaaatcaagatcatacttacaggattaaaatacaaacgaacccagcattgaatatattattagaatgtattgatactaatacttatgagccagataatcaagacattattaactttaattatacactgcaagcggaatcatcggaaagaaaacagcataaaaataacgaacaaaaaattagtgaatatatcgaaggagaaccctatgatgtaattgcatttacaaaaggatttaaaagttcaagtctattattgtttaatgaaaataatgaacctaagtttcaaagacctcatagtgttgtaaatatagtttttttaagcctaaaaaatatattaactttcaatcctattccatctactatgcgtaattattcccgactttctgaaaacctagaaagtgatgcttccaatattgctggagttttagcagcattaccagaggacaaaaaagcagaagttgaaaacaccctatctgaatatattaaatatttaccagaaggtgatattaaaaaagtatggtctgaaccagtaggaagactaaaaacagatgcaatgctgtactgtcaagaagaatggaaaccaggagaaattacagaaattgatgctagaagtatgtcagatggaacattgcgatttttagcaattctcacagcattattaacccgtcccgaaggtagtcaaattgttatagaagaaatagataatggtttacatccttcccgtgcagcattattagtaaaaatattaaaagaaattggcagtaaacgtaatattgatattttattaaccacccataacccagctttactagatgcttttggttcggaaatagtgccttttgtagttgttgcacatcgagattcagaaaccggagaaagtaaacttaccttattagaagatattgaaaacttccctaaattatttgcttcctactccttgggacaaatgacaacaaaaggcgcaattgaacgtagtctttctcatggtgcataattgggggagtaatttaaaaaaatgagaaaagttttattaatagatacatctttattatgtgtttggttaaaagttccaggtaaagaaactgcgggtaataataaatgggattttaaaagtgttgatgataaaatcaaattagaaatagaaaaaggaacaactttggtacttcctttagctaccgttatcgaaaccggaaatcacattgcacaagcgaaaaccggcgataaatggacatcggcggaaaaatttgcagaaattatgatttttgctgctgatgaaacaagtccttgggctgcttttcgtgaacaaattgtattatgggaaacagaagaattaaaaaaattagcagctacatttcccaaccaagctgtacaaaacacctctatgggtgatgctagtatagtagtcttaggttggtattattatagtcaaaaagggtttcatgtagaatttctcacagatgatgaaaaattgaaatctcaagaaccaccaccaccaaccacacccacccgtcgcagcagtcgcagacaataacaatatctctctttgcgtctttgcgtctttgcgtgagaaataaaaactaaacatcaacaacttaaagcgatcgcccccattatcccataaactatacttcagcaggttctttcactgttgacaaccaccgactataagccacttcatcaccagcaaaagaatcaacagatacctgtctttctggcataggttgtaaaggagcattgataggtgaatatttacaataacaaataacaatcatatcaaaacccatacccacaggaatatcaggagtatacgtttctacattagttacttcccaatcactgagacgataatgggtttttgcttctggatattgtggatcagcaaactgatcaacacgaataaactctggtagacgatatccgggttctggtaatggttgatctgaacaatcataatgttcagctaaagttttagttaaagaacctgtatgagcatattttctatcttgccatcccggttgacgcttctcagcccgaaaaacaatccacttacgcattattcttactcctcatcagtgtcataataagactgtggaaattcagttttaccctcaaacacacaatctacaggtaaaatatcgttacccgttttctccatatcaaccaatttccaaccgtatttctcagacatctctatggctaacgccacgcttcgctatcacaacagtcttcatctgctgctgcatgacgagatttgttctcttcttcgtcgtaccttgattttggcatatctgtatattaattcttgctccaaaaaaatcaaactaacttatcccatagtagtaccactataaacctaagtcaattaaaagtagttttacagtagatgtatatttcacgaaagtagaacagtaaaataataaagtagcgtcagtaatcaccgtggcaaccgacaaaatccgagtatcaacctatatacaacaaaccctgaaagaagaagccgaaaaagtagccgatcgccagggtagatccttgagtaactatatcgaacaactaataaaacaagatgtagccagagcaaaaagagaaggagaaatacagtaatataaattacagagctaaattacaattttccttctctttggatcagaagcgatcgccctctttaatcaacatccagttatgatcgaataatgtaaaatttaaccaaataatctaaactaaaaatctatgaaaactttcaccgcaattattgaaagagacgaacaaacaaaactttatgtaggttatgttccaggttttccaggagcgcattctcaaggagaaacattagacgaattacagcaaaatttacgtgaagtaattaaaatgctgcttgaagacaaataacccttattaaaatcataatctttcttttcctctctgcgcctctgcgtgataaaaaaaattaaaaaaccttaaacaaccaccccacctcacgctatcatcaaaaatagtgccaaaaaccgcagcatctaccatgaccacaccagaaccccagcaaccaaacacacctctcagcgatacaagactggtagaagaccgcagcaagctgagtaaaatgtatcagcactacgtagaaatgaaggataaatacccccatgcgttgctgctgtatcgtgttggtgacttctttgaaaccttctttcaagacgctgtaaccgtttccagagaattagaattagtcctcaccagtaaacacgggggtgatgtgggtcgggtagctatgacaggtgtacctcatcacgcatgggaacgatatacaaccatgttagtagaaaaaggttatgctgtagttatttgtgatcaagttgaagacgcatcagaagcagtaggtttagtgaaacgggaagttacccgcatcctcacaccgggaactttgttagaagaaggaatgctcaaagccagtcgcaataattacttggcggctgtggtcattgcggtgaatcattggggtttagcttatgctgatatatcaactggggaatttctcaccactcaaggcagtgatttagaacacctcactcaagaattaatgaggttacaaccttctgaagtgcttttccccaccaatgcaccgaatttaggtactttactacgtccgggggaaacttccccttcccttcctcagtgtttaccacccacattttgttatagtttgcgatcgcaacttcccttttctcaagccgaagccagaagtaaaatattgcagaaattcaaattgcgatcgctcgaaggtatcggttgtgaacatctcccccttgctgtccgcgctgctggtggactgttggaatatctggaagatacccaaaaacaaaaccccgtatctctgcaattattacgcacctatactttaaccgattatctgatcgtagatcatcaaacccgtcgcaacctggaaattacccaaactgtccgcgatggcacatttcacggttctttattatgggctttgaaccgaaccagcaccgctatggggagtcgggcgttaagaagatggttgttacaaccgctacttgatatcaaaggtattaaagctagacaagatagtattcaggaattagttgagaatacacctttacgacaagatttacgaacattattaaggaaaatatacgatttagaaaggttagcaggtcgcgcaggttcaggaagggcaaatgcacgggatttagtcgcgttagctgattctatctctcttttacctgaattagctaacatagcagcagaagggcgatcgccttttttaaaagctttgcaaaaagtacctcccgtactggaagaattagcaaaaaaaatacaattgcacatcgtagaatcaccacctaatcatttaaaggaaggcggtttaattcgtcctggtataaatcccctattggatgaaagaaaagcaacagtagaagcagatcaacaatggatcgcaacgttagaagttgatgaaagagcgagaacgagtattcctaatttaaaggtcgggtttaataagacttttgggtattatattagtatttcacgttctaaatcagatcaagttcctgagaattacatccgtaagcaaacgttgacgaatgaggaacgttacattactcctgagttgaaagagcgagaagcgcggatattaacggcgcgagatgacttaaatcagctagaatatgagatttttgccgctttacgggatgaagtggctgaacacgcggataccattcgcaatatttcccgtgcggtggctgctgctgatgtattatgtgggttggctgagttggcggtacatcagggttattgtcggccggaaatggtggagggacgggaggttgaggttattgatggtcgtcatccggtggttgaacaatctttaccttctgggttttttgttcctaattctacttggttaggtgggaagaattacggagaaacgaaccgcaaagacgcgaaggacacgaaggaagaagagaaaagaagaaagaatgatacattttaccctgatttagttattttgacgggtcctaatgctagtggtaagagttgttatttaaggcaggtgggtctaattcagttaatggcgcaaattggtagttttgtacctgctagttctgcaaggttgggtgtgtgcgatcgcatttttacccgtgtgggtgctgttgatgatttggctactggtcaatctacttttatggtagaaatgaatgaaactgctaatattttaaatcatgcaactgcgaaatctttgattttgttagatgaaattggtaggggaactgcaacttttgatggtttatctattgcttgggctgtggcagaatatttagcagtggagattaaagctagaactatttttgcaactcattatcatgagttaaatgagttagctagtattattaataatgtggcaaattatcaagttacggtgaaagaattacctgatcaaattatctttttacatcaagtgcaacccggtggtgctgataagtcctatggtattgaagcgggaaggttagcgggtttacctgcggtggttatcaagcgtgcaaaacaggtaatgggacaaattgaaaaacacagtaaaattgctatggggttacagaatttagaataattaatatagatcaaattaattatgttcctcgttcccatacagagtatgggaatgtattttagaagactctgccttcaattgcttaaagtctacgacgaacaggacgagagagggcgcggcggacttcaagagtggtgaaagaaccaagaagcgatgagggtaaacggttggacagaagttcaataattttggcattgatggtattggctggagtgtcgtcgggaaggttgatgaaaattgctccagcagtaaagccttcagtccaacttctaggatcagcaagtcctctgtcacgggtgatgataatggcatcagccataatggcagcctccatcacttcagtatcaggatgaccacgcaaaccgatgtcgcgcacgtcttgtacagaaaatcctaaagcagcaatttgaggtgcaagggaacgtggcatattttcatcaactagaaaattcacagcttatgctcccaaagcagtaaattcagtgtgtctaaccaaatcagcagcatagctaagagccgcttcgacttgagttttagtgagttcgtattcttccataacttcttctttgctcatgccacctgcaagagaaccaatgataatagaaattgggacacgagtaccactgataacgggtgtgccgtgatgaatagcagggtctatgctgatgtatggtgaaatttccataaataccttcttggtgtttgctgtttctctattttgccttgagattttgccaagcgatcgcttgataaattctcttagtgatataacttataactctgcacctgcaaaaattatccttcccagtcctgactggtatcacacaaaaaatcatcagcaataatatcatcaaataaataaggacaattttcgggaaaagttcttaacggtaaattagtttcccgtaaagctaaatcaactcctgcttcaaaaccatctaacatagcttcttccatgcgagattttaaactagggttttgtcgcagatgtcgcagaatagcgcgacgttgttctctaattgttaaaaaccaactgcgagaacggttttccggttgatattcccattttaagagatgacctaataatacacccaaacgacttgctaattctcgatattcctgccttcccaaagcttgaatttcctcttgtaaatgttgccagtctaattctaaaactagcctttcttctaaagctttagcttgttgttgtgtccaacaatagaagtcttgatgatacaaagaagaagattgagattgctccatattcagataatttgatcttcatctgcaatgatattttaattatataacttatatataacttatcccaaatttctcattttcccatacaatttgttacaatcttatccacctcctatgacagcatatttatcaattgataattgacaattgacaattgataattgataattttttcatttaaggtttaaaacctccccttactagcggaaaaaagccaaaaattccacttttcaatcctccgaatttaagggagaggtaattgtcaattgttcattgttaattgtccattattgaaattcctttcttcctttgcgcctttgcgcctttgcgtgagataaaaaaacttagtcccagcacccaaaaattgctgtaattttcaattttcaattttcaattttcaattccccaaaagtttcctagctgctgctaaaatcaaacgttgttcagcacgagcgatcgcttgataagtcctttccaccgcttccggttctacagaaatagaactaataccccattccaccaatttatcaataatttctggatataaagcaggtgcttgaccacaaatagaacaaggaatacccccatctttagccattttaattagttgaaaaatcgcacccatcaccgcaggatgacgttcatcaaagatacttgctaattctccttgttctcgatccacacctaaaattaattgtgtcaagtcattagtaccaatagaaattcccgctaccccagctttaatatattcaggtaataaaaatattatactcggaacttctgccatgatccataattgaaaatggggattttcagttaaaccagcttcttcaacttgacgacgacaaaatacaaattcttccacactccgcacaaaaggcaacatcaaataaatattactataaccatttttttgtaaccttgctaaagcctgtaattctaattcaaaaaccgccgaatttttcacataactccaagtaccatgttcacctaaaattgagcttgacgaagattttacatcataattcaatgaaggaaaatcctgtgatcgccaatctaaagaacgatataaaataggtcgaggagcaaaaccaatagcaaattttttaatctcctcaaataaactttctaataattccgtttgtctaccatttgaaagccaaatatgaggattttgtccctgcaaaatattcaaaatcatcaattctgaacgcaacaaacccaccccatccacaggtaaaccccgtactgtttcaatcaaattcgcttgactaagattaactaataattgggtagcaatcatcggtaatattttagcattactcaacccataatgaggttgatttgcatgatgatcaaattgttcttttttattctcggttaatgaaattttttctccatctttcaagatattaccctcttttgaagcacgataaacttctcccctatcaccatcaagcaagagactttcaccagtttgaattaaattagtcgcatttttagcactgactacagcaggaatacccaactccctagctaaaattgccccatgactggttaatcctcctctttctgtaataataccactaacctgatgtaataaaggcaaccaatcaggagtaatagcaggagcgattaaaattactcccttgggtatttgtaaaggtttgggttgtgaaccaagaatgacatacgcagtagcagttatccgccccctagccgcccctattcctttgaggagcaagttaggaattaaagacggtggaacattaacttgagtaatgtaaagttttggggtaggaatattaattgtaattgtccattttattgttaattttgtccctatttcactaaataattgattgcctaaaataatgatttgttgtagcaattcttctggaagtgcatacttcttttgttgttcctcactgagcagataggagaataaacaattatgatctgtgattaatctagattgtaattcttcagcagtcacagatataggatcatgtacagaataggcgagaattttatttcctaattgttgttcttgaataacttcggtgttttcttcaatgtagtaaacatctggtaatacttcacccttgttaatagctattcctaatccataagttgcttctatttctgctcctgatgtatcagcttggaatgaaccagaggcgatcgcattttctaccggttgcactaataccgcaaaattaatgtgttgtaaattaatgcccacgctctgccaatatagtaaacttctagcacgaaacaactgactccaagtttgttttaaaccttcaactatagcttcctcattacaaacacaaaacaccgactccagcaacccagaaatatttcccatcacctgattaccagatgatatactcaaactcggacgcaaaattaaacatttcccttcccaggttttagcagcttggaaaatctcacttacccaataatgtggtacactaccagcaataatttcctgacgcaaacggccagccacctgttgcagttgttgccaattacttacatctaaatgtagagaagaatagggtaagtccgcaactaatgactctgaactattgagagtttctagaaattctcgccacacatctgcggagactacaaaaccaggtactacaggatagcccctttgcataattttactcaagtaaaacgccttatccccaacttgggcgcggtcttgtggtttaatgttatctaagcggtagagtttatccactcaagtgttaggtgtcatttgtgcaagttttacgtattatttgtcaattatcgacctactgtttttatggtaagatacaaacgctacatttttgattatttctttaatacactatttcaaagcaataaatataaatatcttatataaataaatattattaaaaattgagtttttacaattacattactaattcaagtaagatataatacagtttttagctcaataggggttgctgaataaaactaaaaccttgataaatcaaaggtttgaagtagtcagtgaggaactcctggaacttctgactccttgattattgtgtagtttttccgaaggtcaggtaaaatggctgaaatattgattttttcgttgcgaacttcggtcgcttactgggtaacggtttcagggattttttaccgctgttggttagttgtttcaccactttttttcctgaccttcggaaactgcctctggacactttactgggtaagggtttaaaatggaggggtccccactcgctggggatattaattgaatggaaactgctgatattgccctggtgttaaattatgcttgtacttgtccccactcgctggggatattaattgaatggaaacgattatgttggcaagattaatctcaaataatccctcaggtccccactcgctggggatattaattgaatggaaacgcattgccacgactctaaacggacgcagagacagagtccccactcgctggggatattaattgaatggaaacatttaatcatatcccaattgaaaaattagaattatcaaagtccccactcgctggggatattaattgaatggaaactagagtcctctcactggctttctagacaagcctggggtccccactcgctggggatattaattgaatggaaacacctaatcggcgttagccttgttcatgcgaatgacaaaagtccccactcgctggggatattaattgaatggaaacttccatgaggaattggaattgaccttctgccccttcggtccccactcgctggggatattaattgaatggaaactcaatgattgaaggcatctttatacaacctaaactagagtccccactcgctggggatattaattgaatggaaacctaaagattaaacagaagaaggaaagtgtgactggagtgtccccactcgctggggatattaattgaatggaaacttgagaacgtgcttctctgttttgggtcttccttcgtccccactcgctggggatattaattgaatggaaactaaagagcagtgccgtcgtcgctatgtcgagtgtgaagacggtccccactcgctggggatattaattgaatggaaacaactaaagcactacaggctataaaatccttttcagcaagtccccactcgctggggatattaattgaatggaaacacagcattgacaacttcaaaccattgcctattaaaaatagtccccactcgctggggatattaattgaatggaaacgaatcagacttcaataactatacttacgatataggtgagtgtccccactcgctggggatattaattgaatggaaacttcaagtgataaggaatggtatcgcaaccatcccccggtccccactcgctggggatattatagtagtttaacttaagaatgagacaaaaagagtataagattgaagagagaaggtatgggagtagaaatcatggcttatagtttagatttaagacaaaaagtaatagattatatagaaaatggtg

SEQ ID NO: 33 - DNA, 53521 bp, Sphaerospermopsis sp. LEGE 00249
  LEGE00249_48
aactaacacgaataactttcttccttaacatgatctcgacctcaatactataatcatagcataccacgaggagatttgtggaggttttaccagaaatgtttaggtatatagcctacagtcccaaccctcgctttttaagcagaaattggccaccagcatttacagaatggagtaccaaagctgtccgcgatgctttttttgcatctccattatttcccagactgttgaatagtgatgctgtcaaagaggccatctctcgcggtgttaaagatggaactttagcttatgttggtaaaaccagcaatggttatgaaccattttaccaccaatgcacctttacctctgcggaggtggaaatttctgaggatatgttcatcatcacccaagaaacagcagcagcttaccaaacagctttagctgcaagtgtaacagtttctgaaaccccatcaacgacaccgcaaaccgagccaactggtacttacaccccagctaatactaacagtggtactgcatctgttacaaacactgtaggagagaaacctgcaccctatgatagtaatacgaaaaaatcacaagatgaaccagaaccaacaaaagaacctgagattataaccccagttgcattacccaaattattaaagtggagtggtgtaattacaccgcaaaaatggatgaacttttacacgaaagtgctgaccaagtttgctactaataaagacttaaaattaacattaaaagtggaggttctagtagagggagaaatagctacccaaaagattgaagaaacaaaagtagctctgtctgagttggggctaaataatgatgttgagactgatatacacgaaaatcgctaaaagaattttactgtttactttcatataatggatatgctaccagatagaaaaattactgagattaacctcagatttcataaattaggttgggataaacaaaaaagagaggaatataattagggcttgctaaataaatacaaaaactccccgcgtcggggagaggtttggagaggggtttatttatacattaaaaacttttcaaacatcctcttacaggaaaatttgctactttaatgtagttactcaatgtagtaactcttctacttgatgctgactccacaatttttgatataatcctggttgttccacaagttctgaatgtttaccaatttgtacaattttaccatgatccataaccatgattctatcagcagtcgccgctgctgaaagttgatgggtaatgaaaatcacggttttctgttttgtaccgctagagagatttttcagaatttgggtagcagtttgattatccacactagaaagggcatcatctaaaattaaaactggagcatcaattaacatagctctagctaaagatgtacgttgtcgctgtccaccggaaagggtaattcctctttcaccaacaattgtttcatattcctgggggaaattattaatttcagcggctatttgagcaagattagcaacagcttctaccctttcttgttcactaatggggtcgccataacggatattatttttaatggtggtactaaacaaaaaactatcttgaggaacgtaagcgatcgcccctcgtaaatcatttaatgctatttttgtaacatccaaaccatctaaaaataactgttcctcctgaatatccaacaaccgtggtaaagcattagctaaagtagattttcccgaaccaatagccccgaccactgctaccacttcccctggtttaatagtaaagttaatatcatctaaagccggggtattagcaccagggtaggtgtaactaaaatttttggctgtaacttcacctttaactgtatttgtgggtagagaaatagcatcaggtggatcttgaattttgggaatgatactaaaaattgattctaaccgatcaatactaacttcacctctttggtaagcagtaatggtaaaacctaataaagccgtggggaaaactaaacgctctacataaatcaataaagccaaaaaatcacccacagccagattaccagaagatatccgcatagttcccaaccaaataataattagggaactaatattagctaaaccaccaatcagaggaaacagagtactgcgggttttagctaatgtcaagttggctgttaataaagcctgatttttcttttgaaaagctcgacgctcattttcttcttgagcgtaaattttaatcaaagaaataccactgatatcttcttggatcagttcgctaatatccgaaagttgttcttggacagcagcttgttgtgtgcgtaggcgatcgctaaaaaaatgcaccaacaaaaacataaacggataaactgccagagaagctaaagtcagatccacactaattgatagcattactggcagcgtcagagtataagcaaaaaaagtatttgctaaactcaataccgcaaaacccaacaaccgcctgatattgtccacatcgctagtagcccgactaataagatcaccagaagtattactggaaaaataagacggttctagttgaagtaaatgctcaaaaattcgctgtttcagttcaaattctacctgacgacccacaccaaaaatccagatgcgggaagccatacgcatcatccacattgcggaactgagggcaataatgattactacataacgtagtacctgatccaatctaaaagttgtggaaagtgtatccaccccagagcgaatcagcaaagggatataaacgcccaacccattgacagacaataaggcaataatgcccaaaacagtatcctgccaatggggacgtaagtaactaccgagtttagcaagccgtcgagattgtgccatttaagcaattttacactttgtcatcctaaatcgcaaaagtcaagaggcaagaagcaagaggttaatttcttctgactgctgactcctgactcctgtacgggcgaagtaggggcgaagcattcggaaaataacctgtgataaaaattgataattagttgcccgaatgcttcgcccttacaggaaaatagccttttcataaaattgataattggtcacccgaatgcttcgccactaggactcctgactccttgcagtcctgactccttgctctcctgatcacgagcgcccacgcaagaaaacgtaaatttgattaagataactttcccaaacttgggttgtgagttgcagagtttccgcattaggtacaaaatcttctacacgcaacccccttgtactgatagcttgaggattttgtagtagataagatgggatgttcacatcacccacaggtaagatgccagcagtcatcacatcggagatggtattggcactgttaatagtttggttaatagctggtactgttgctaccaatgtaggaggaggcaatatagctgcaactggtgatctaactaaaaagtaagcaatagcgggtgtactcgacaataacaaaattgtcaacgcccaacctaacaaatatccccctggtttttctatgccaccgcctttaattttttgggcagcaagcatcaacattaaagtggctgcgcccagaggtttgagaggaaacgagataaaccgccacagggatgccaccgcaggttcaccaggattaaaaaatgccaaagctaaaacaaccagtacaatccctaacacaaatcggccaacaaagcttactgttgggtagaatctttggaacaaagaataggcaacaacgccaattaatagccacaataagacccggctgagtaattgaaacatagattaactctctaattttcttgtgcggctagtctatgaggatcaggtatagcaaccaccaaggcggttaaaacctcagtgtagtaatggaagtctggctaaaacagggtgttactcctgaacggcagttgcttcacttggggagaccccaagaccgcactgcctcctcctgactcctttacgggcgaagcattcgggcgaccaattatcaattttatgaaaaggctattttctgaatgcttcgcccctacgacttctgactcccgctataaatgggtttattttatcgtcaaactgcaatttatcactgacttaaaaataactctcacctcacgcacacagactaccgtcgtagtgattttagagcaaatttttgacactgagtgtattatttggaatttttcaaaagactaacctaacaccagtggcataaattaattgagtagtcgtcgtcaactcgttaaaaggaacaactatgtcaacgcaaaaacccaccattttggtaacagggggagcaggatacattggttctcatgctgtgaaagccttactgcaagcgggttatcaagtgttaatcttggataatctggtctatggccatcgagatttggtagaacaggttttgcaggtaaaactcattgaaggtgatatagaagatcgtcccctgttggatcatctgtttcaaacccacaaaattgaagcagttatgcacttttctgcttatgcctatgtgggtgaatccgtaactgacccggacaaatattaccgtaataatgttgtggcaactttgacgttattggaagcgatgctggcagcgtctattaaaaaatttgtcttttcttctacctgtgccacttacggagtcccaaaatttatccctatcactgaagatcatccccaaaatcccattaacccctatggtgctactaagttaatggtggaaaggatactctcggattttgatgttgcttacggtttaaaatctgtatgtttccgctattttaatgctgctggtgctgatcctagtggtttattaggagaggatcataatcccgaaactcatttaattcctttagtattacagacagctttaggtcaacgccaatcaatttctatttttggtactgattatcccacccctgatggtacttgtattcgtgattatattcacgtttctgatttagcagatgcccatattttaggtttggaatatctgcttaaaggtggtgaaagtaatgttttcaatttaggtaatggtaatggtttttctgtgagagaagttattgctgctgcccaggaagtgacaggaataaatatatcagttcaagaatgcgatcgccgtcccggtgatcctccttctctcattggtagtagcgaaaaagccagaaaaatcttaggttggcaacctatatatcctaatatcaaagatattgtcactcacgcctggaactggcatcaaaaaaggcataaataggagattggtgattggtgattggtgattggtgattggtgacagaaaaaggcaaaaggcaagagtttattcttaccaattatcaattatcaattatcaattatcaattatcaattatcaattatcaattacccattaccctcttttcagtgttttcactacaaaaactaaaattcctatagataaaagtaaaattgccacgataattataggttgtacaaaacctataaccgcattttgttgttgattattctgttgattatcttcaattacattttctactacttgtggtgttgctattgctttacctgcggccacagtaacttgaaactttaactcaaaaggtcgaaaactctctgctgttgctggttttccactcagttgcagttcataaactcctggtttgggaaaaattatgtctgctcctggtatgccttgataccgttcagcatcaacggattttaaaggaggttcaagcagtgccggttcttctggtgcatggggttctgcataaatagccaactcacaatcacactcttttaaaggtagaactttaccacctttacgagtcaaagcaaaccaagttgccgcaggttcaccagcacggggattatcattaggttcaatgtggatagtaccgccaatatcacctgatattttgaccgtatgggcagaagcaacaggaagagatgtaaatgttataaatagcaaaagtaggaataatttgtaattcataattgaaggcaggaggcaggagttttcaattttcaattttcaattttcaattgatttgtcacctttctttggaggaacatagaatttttctaattttaaaattgaccaaaaaaagtgcgatcgcactaacaaaacacccaaagtaattattaccaataacaaagctgctaatctattaccccaagttaatcttaaagcacccaagtaatgagaaccaattaagactacatgaatagtagccaacagcaaagcaggaacgctcaacagatggatttgtcgccaacgcttacctaatgacttttgcagaaaatcaaaacttgtgcaagctgctggactcatcaatactaaagctacagcacccgcacccatcgcccattgaaattctagcggtaagaaccaaacagcagcaaaattccattctaaagagtgttctatattatgaatggtatgtaccgctgatagcacaaacgcccctactcctaaagcgcgacggtagcgcatagatgatggacaaaaaccactgagaggacgagcaactaaggccaaaattaagcaaattagggcagcgtgtccactgtagtctaccattgtatcacccgttcgcaatagggtaatgatgccaatgattaatgtcacccaaccacccaagcgaaataactgactgcgcctatctttactcatcaaggaagtggaaacacctactcctaacatcgtcggcaaagttcccaaaccaaaagctaacatggtaattgcaccttgccataaattacccgtagcagcagctttgatttgagcagcatataaaaatccacaaggcattaaaccccaggtcatacccaaaagtgctggtgtccaccattttgtatgtaaagatagtttcaccattcccgcacttaaacggttatgtaaattaccttttaacaaagggtgtaataagggaatatgcggtattaagtctggtctaacttgtcctaaaccaaaccaaattaacataataccagtaattatagctatccagcggcgtaaatcactacccacacctgctaattgtccaccttcaaccaatgccgaaccaagagcgccaatagctgcacctactagggtatagcttaacagtcttcctaaatttaacagagtatgaaattttacttgctgttgccaattttgggtttcttgttgatgggaaagggaaaaagcaactgctaaaggtccacacattccaaaacaatgtccaaaacttcccaaaaaacccaggagcgatataagtagtaaatctaacatcatctgatgatatattatatgttttcaaaaatcaaatatgagtcctatatattaattaagagttattaattcataattcataattcataattcataattcataattgtaaaggtttgattcccctaccttggtagacagatcggtttcatctggggttgaaatcctcatttgaaacctaattatcaattatcaattatcaattaccattggtgttgtttactgtaaaaatttaatgtatattgacaaatttgtcaaaagacaagctgtcaaacttgcctttattggctattggctgattaccgataactgaataattactttttaggaaaagttaaagtccagttttggggattatttagttgaaaatataaaccttgaaatatcattttgacagcaatgcgacttctgatatacctccgaattaaatgtgttcctggttctgcaaaaacatcatcataattttggcggtgtccaaaaggacgagaacagtatttgtgatcgcctggaattgataacataaaaaattgcctttctttgtattcatcaggaacttgaaatataccatatacattatgttcacccagccaaggtttaaccctcacctgtttagcttgcacgtgaaaattttgtttgtttaatttgagtacagttacaagtccgcaattagaatcattaacaggccaccagataataatcatgatcaatgaaaacaaaaaaagtaaactatagatcaagggaggacgcataaattaactacatgattcaagaaaaacaaaagccactgatttaccagaaatttggttataattactattaatctattcaacttaaattattattcacccggctattttaagtaacaacagtaattttactcctgtacagctatttcgccctcacgtctctacttacttctcaatgcttacgtttgtttacttaattttagtagtcaaacacaccaatagcaggtacaatcaattgagttaatgtgcagtataaagatgatgttaacaaagaaaagctggaaaaatttcaagatagttgcaggtgtatttagtgccatcgcatttactcaattttcgggagtcaatacttctgcacaagcagcagatcaatttctaactcctgactaatgactaataaatacaaaaaaggcttggaagagaacccaagcctagacttcactcagggtaaaatatctgatcactatatcgactttcagtaatttaaacatccatctaaaggaataaaattgaagaaagtcagtagttttactgttaaaaatatgctacctcaaccgtttatcccgcaacaactcatctatccaagctgcatctgcttttgcaagtgctggtactggttcttgactatagtctatgaccaaatcataatcataaatctcatatacctgatttaacaaggctttcaaatctattactggttcactatcacctgcacacaaaggtaaagaaaaagctggaattatatcttgtatattaaaagcatataaatctgcttgagggcggcgatttccccgacacactaaaattcgataatcactttcaatattatcaccaaacatgggcatgggttcgcctttgcgtagtaaatcaatttctactaaattactacgactacctaatacttgttgccgtttttcttgatatgcttctcttcctttacctgaacgtttattagtaggagaaagaatttcaattgtggtaattaatttctctgttccaacttctttaacttctaaatatccttctttaatattaattggcattggtacggtaactgttacagattttggtgcaggtgcagcaacagcaacctttgtatttttggtttcactgatatttttccgacttttcacgatcacatcaggaatacctactaataatgaactatcatctatggtttcataggttctcacttctacggcaactcgatatttaggacgcagttgaggtgataaaaatctggcaatttcgctaattaataagtgatgtagtccaggaaataagtctgggtgttctaaatatgggttcattccgggaaagatagaagtcatttcttgaactcctttgacaattttagattttggattttggattttagattgcaaaattccctatcagcttgtacttttcatctacattaagaaacttctgttccaaatgctatcctcagtccccaaaatacaattaaaattcctatagctacccaatcacctgtttttaattttaattcttgccatttgactcgatgttcattaggactggtaaaccctcttaccatcatagcatttgccatttgttcggatcttaatagcaaattttctaataatctttcaatcactattaaccaaacttttgcacttccttttaatcctagttttttccagttaattgctcttgtcattacagaacgtactaggttttgaatttcttctaaaactaagggtataaaccgcaatgataatgttaaagtgagggtaatttccgtgacgggaattttgaattttctcaacggttgcattaagctttccatcccagatgtaatttcttctggtgcggttgtgagtaaatataaattagtgctgtaaattaaactaaatactattgtactcaagctaattgctaaatccaaagaacgacgatttacttttattggtccttggtgaattagcacataactgtattctttattactatcttctatttctggacttactttgctatctttagcggttggtggttgagttaaaacctgttgatttgctggtaggcgtggttgataatttatactgtatccgtcagggctgatcgaaccgatcaccaataccatcaatgatagaactagcaaccagcccatttgttgccgccatactctcaggggaattttggcaaataaggtaaaaataattaacattattaccagtagtacccgccaatagttgttagcaactacatagctggtgagaaagcttaacaaccaaactaacttaactcgtggatctaattgatgtagccaagtttgcggttgttctaaatataatccgagtgggagcgatcgcagtaagtccatatttcaattttagattttagattttagattttagattttagattttagattttgcaggagaaaacttttgtaactatgaaaattttggattgttagctaatttatcctaatctaaatctaaaatcccaaatcccaaatcccaaatcccaaatcccaaatcccaaatcccaaatcccaaattccaaattttaaacgcgagttgcgcggttgacactaccaacttccatttcccggacttttttactccgccataatacgcgaattggtgtaccttcaaaacccaattgtttgcgaaactgtctttctatgtaccgacgataattgtcattgaagcgttttgcatcgttgacaaataaggcaaatgtgggcggttgggtactcacttgcgtaccataatagattttaccttgtttcccactacgtgatgctggtggggaatgccaactcactgcgtctgtgagaacttcattcactactgaagtgctgacacggcgtttgtgtgattcagcagctttattcaccaattctaaaatcttttctaccctttgacctgtcatggcactaacaaaaattgtatctgcccattcagtaaaatgtaaacgtgcttctaaactcttttcataatcatagattgtgtaagagtctttttcgaccgcatcccatttgttaacaacaataatgcaagcgcgtccatcttcaataatgcgcccagctaatttttgatcttgttctgtgactccatctaaagcatctaaaaccaataacaccacatcggagcgacgaatggctttaaaagcgcggttaatactgaaaaattcagtaccgtaatctatgtgtttctttttacggattcccgcagtatcaattaagcggtaagtttgtccatcccgttcaactaaagtatcaattgtgtcgcgggtagttccagaaatagggctaactatggcccgttcttcacccacgaaagcatttaataaactggatttaccaacattaggacggccaataatggcaactttaatttcggtattttcttctaagtcttgaacgtggggaatgtatttaattaactcgtcgaggatttcaccagtaccactaccatgaatagcggaaatagggtaaggttctcctaatcctaattcccaaaattcactggcttgaattataccttgttccggtgattcacatttatttaccgccagtaatactggtactgtttgttgccgtaaccatagcgcaatttcttcatctgctggggttaaaccggcttgtccatcgactacaaatattgctgcacaagcttctgaaagtgccgtcattgcttgttgacgaatcaaaggcagaaattccgtatcatcgttaaatactaaaccgcctgtatcaaccacgacaaattcccgatcttgccaaaatgctggtcgataagtgcgatcgcgtgttacaccaggttcatcatgaactattgcggtttgatctccagctaaacgatttacaaaagtagatttgcccacattcgggcgaccgataattgctacaattggcagtgccataaactaaactttcttgtgctgagtgttgtagatgtgctgagttatatatctacgttcttcacccagcacgcttttagagaactatttatgatatcatatttcctcaacgatagcaattgttatgtattcacctggatatatccccaacttcttcaataagtccggtatctgggtatgatatttttcaggttgagtggttgaatatttctagtgtcaactgttgacaattgattgtttatacaaatatacttcagtaaaagtatcataattaagcagaatgaacaaaggtaaatggttagaaatcagccggtatatctatttaggtttaatagtattgggaactattgctgcaactgttaatcaacaagtggtttatgcagttattcccttgattttaatcataacaaatatagcaacttattcccagtttaattattctcaatcccaagataagattaaagaagtacaaaccagtttacaaaatatcacagatcaattttaccaattcaaagaaactatgaatacatccaatgatcgcttacaaaaaattgaagattggaaacagcagctaaaccaacttattgataacaagatagaccaaaaaattgaaacatcaatgcaaaaaatactcacagaaatcaacgaatttcctcaacaaattcaaaatattaactatcgcttaaatcaattagacagttctctagaaaatttacataaacaaattcagcaacaaggtgagaaattagatattgtccaagaaatccaatctgaagttttgcagattcatgaaaaaatgcaaaacatggaaattgttaattctcaattaactcagattgaacaaactgagacatctttaaaaaattggagtgaaataagtcaacaagaattagcagaattaagagaaaatcagcaacatcaaagtttagaatttactcaacttagtcaacaacttactgatcttaattctctctgtgaaaatatggctaattccattcagcaattaaatcaatcttgtgctagacaagttgaggacttggatcaatttaaacaaaatcaaaacagtgaaaattcaagatttaatgatagttttgattttctaaatcaatccttgacagaattagatacttcctttgatgctttaattacatttaatcatttaacgagaccgttggataaagcaaataaatctaatatggaatcagtagaagattataatgtaaaagttgaatttaatctagcagttcctagcacatctacatcagcagaaaacacagaagaattattatttgtgggaactttaaaaggtcatgaatataaagtttcttcagttgcttttagtcctgatggtaagactttagctagtggaagtgatgacaaaactatcaaaatttgggatttacaaacccagcaacatcgtacttttgcaggacataaagattcagcatggacaggaggtattaactcagttgcttttagtcccgatggtaaaatattagctagtggaagtaatgataaaactattaaattatgggatgtaaatacaggaatagaacttttcacattgagaggacatgaagagaaggttaactctgttgtatttagtcccttgggaaaaattttagctagtggtagtaaagatcaaacagtcaaactttggtctttagaacagggaaaagaaatttactcttttaaaggtcatacagatgatgttttgtgtgtcgcttttagtcccgatggtaaacttttagctagtggtggaggtaggaatgatagaagtattagaattttacaattaactgaaaacacagtcaaaactttaacggtaagttctgattggtttactggtgggattaatgctttatcttttagttgtgatggtaagatcttagctagtgctggtaatgataaaactgtgaaattatggaatgtagaaactggtgaggaaatgaaaactttaacaggacattctgaagcggtttatgcagtggtatttagtcccaatggtaatattttagctagttccagtcaagataaaactgtgaagttatgggatgtagatgtagatagtgtggtggaaatttccagtgttaaatgtgctgatgatggagtttattctcttgcttttagtcctgatggtaaagttttagctgctggaagtgcagataaaaccattactttgtttccttgttaatgatttgatcccccataaaaaagtaagggtttagcattgctaaaaccctcgaaaattcaggggtaaaacctgaatatagtggtagttttattattaataaggaaagatgactctaccaccaggcctaacatcagcatggaaaaagcccttatttctacccataaaaacagcatctcctaaaccggaaaattgagaagctcttaacacatcccacagctttctaaaatctccgttcattgggatcatatctatagctcggaaatagagatgctgactattacgagcgcctccgactgctctattgactgcgggtggacgataaccagaagtaatactaatgggtgagccaaatttttctctcactggtccccaggttctcgctactctaattgcatttgctacatattcagaactagtaggaacacgagtacaatttttcgtaacttcaccccaagtcaaaggaacaccgtcaacaatatattggttagcatagactatttcgcctccaggaagtttcatagtcgcgcctgtacgtgatccggcattggtattaactttgatttctgaggtattagtttcttctttgtctcctgctgtttcttctttatcttttagttccagtaattccttagcggtgctgactcctaaacccaagggatattctaattgttgtagtgatttaaattccgagaatgcctgtttggtgatgggtccgacttttccatctgcttctattttcaggagttgctgtatttcttttactaagtctggatgagcatcagtgataaatatagctggagagttgagttttacaaactcagtgagagatgtgatatttgcgggattggatgtcataagtttttgtcaatagattttggtagttttccacattattcctatgcaactttaatctacacataaaataagcgtgattactgtggtcaattgttaattttgaattaaattttactaaattttactaaattttactaaattttactaaattttacagattgctgataagttattagttgttagttatttttacccaatcacctatcaccaatcacctatcactgatcacctgtcacctcttcagtaatggctaaataagctactttagccgcagcttgttcagcagctttaatagagcgtcccttaccctgtcctaacattttttcatgtaaccaaacttcagctacaaaacgttcatgactacggtggggttgattaacttctacaactcggtactctggtaaaactttaaattgtgcctgagtccattcttgtagagccgctttatagtttaatctagccggatcaaggcgaatttctcttgctaggtcttgaaagtggggatctaaccaaggacgaatgaggtctaaattatgagtgctgaggtaaagcgcccccagaacagcttcaaacgcatccgctagacgtgactcttgaccaacaagatcagcagtagcactaccagcaactaataagtataattctaaaccatattctctggctaacttggcgagaatgcgatcgctcaccaacaccgaacgaatagccgcaaaatctcccacagcacagtcgggataattttcccataacaccacagcggacaccaggcgcacaactgcatcaccgacaaattccaactgttcataatttgccgactcggaaacagtggcgtgagttagcgccaagtccagtaacggccacttgatggggctatctggtgataaacctaacttttgaactaaactttcaagttgccgttgacggcgaggataaacgcgggacattaaaacaagatagtaaatatgtgcaactcaatcattaataactaatagacatctggtggtaattaaatgtgtataacctgaaacccattctaaagacgttctatagaacgtttctacatagattttcaccagaggtctaataactaataaccaataactaatgactaaaaaaagagagagcaggacataagccggattctgttctcttgcgagggcggttatctatctgggatgtttgttaccaaacacctctagcggcgctcatttactggaactggtaaaagaccaaccgtagttcctccggccttgctcccaaccggggtttaccgagccaacgcctctcgacgttgctggtgcgctcttaccgcacctttgcacccttaccagggattaggtattggggattgggattgggaaatttcttacccagtccctagtccctagtccccagtccctagccctggcggtatctttctgtggcactatcctcacgatcgctcgcactggacgttatccagcaagtttggtctttcgggagtccggactttcctcaaaccagtcttgatgactgatctgcaaccacctgcgcctactctctcccctatctagtttaagctttaattgcctcttctgtgttattcagttagcaggaaatagggaatagaaggcaggaagcaggaagcaggaggcaggagttatgtattttggattttggattttggattttggattatttatttttgtcaactccaatctaaaatctcaaatctcaaatctaaaatttttctccccatttaccagttcctatcatcttttcttattccaaggtagagcataggtccagggtaatttctcgatagtgaaaggacaattgataatagagataggaggaacattcacacccggagccaaaccgacacgcaactcagatattcttaataccagttgaaaagaaaattctactttctttttaccatccataaaatctttatacaaacccttaaaaggcttttgatctttcatggcaactatatcaattaaaggttctccaggttgatatgttcctgtttctttgtccctttttaaaatatcttctgctgtcacactttcagaaattgttttcttaggagcaataatcgtaggaacttgtggtattgctaagtcacggcttaggtctggagatttgcgaatcacacggcgagattttttgctatgttcaatgacccaagaactattatcccagtcaacatatacagctaaagcctctgatttattatcaatgctaattgataattctttcaagttgtcttttaatttctccaaagaatatgtatctgttttaaaggaaatcccaattttttcatccagattttgttctttcaattgttcctcaacggcactcttttgaaaatttagcaccaccatgtcatccacagattcaatcatgcgattgaatgtgtaataaactcccaatatataaaccatcaaaacaagaagattttgatcgccactttgtactgccataaaactactaataactccttggaaaattcgcaaactttatttttgattgatttcaaatgaattgtcaagccaaccccgtctccaaaaaaagaaaattaacccactagcaattgccgccattaatcccaagcatagcggataaccccaataccaatttaattccggcatattataaggtgatttttcggtattgaaattcattccatatattcccactacaaaagttaaaggaataaaaattgatgaaacaacagttagtaatttcatgatttcattcattttattactaaccgctgaaagatagacatccattaatcctgatgctaattctcggtaagtttccaccatatccatcacttgtaccgcatgatcataacaatctctcaaataaattctcacctcctcactaattaatttactactatcacgaatcaaagaattaatcgcatctctttgtggccaaatagctcttcgtagttgtaataattctcgcctaatttgatatatttgttttagtgtttggggatttggactaactattacttcttcttctaattcggcaatgcgttctccatacaattctaaaacaggaaaaaatccatcaataattgcatctaacaaagaatacgctaaataatcacttccttgtcggcgaataattcctttacctctgtcaattctcatcctcacactatcaaaacaatcatgctcaggttcttcttgaattgtcaataaataatgtctacctaaaactaagctgacttgttcactataaaaactaccatgattgggattaggcacaaccatacgagcaataatcactaattggtcttcatagtcctcgattttcgggcgttcccccatattaaaaacatcttctaaaatcagcggatgtaaatcaaaagtttgccccaaacggtgaataatctctttgtttcctaaaccttgtacatctacccaggaaacagattctgtatccaagtaattgctgcattcttctggatgttgtatttgtttgtgagttagattagtttggttatagtcaaccaaaaaaatatttggttgttcagcatcttcatcaataatgagtgtacccggaggagttcctggttcatgatagtattcgttttcaaatggcttatttactttttctttgttgataactttatttatgactttgggtagacgacgatgttttttagccattaagtctcaccttaatatttatcttgctgaaaaacttttttcttcaggagtagtaggggcgaagcattcgggcgataaattatcaattttctgaaaaggttattttcctgtaagggcgaagcattcgggcgataaattatcaattttctgaaaaggttattttcctgtaagggcgaagcattcgggcgataaattatcaattttctgaaaaggttattttccgaatgcttcgcccctacttcgcccgtacaggagtcaggagtcaggaggaggcagtgtggtgaattgcatatcatatttttacaaaattaggatgctctcctatttgataatttactaatttatagcagattgctggtaaataagacataggatctaaattcacagccaaactcctgaattttcacataaattttcccaaaaaaagtttgtcttttggtaaagacaaactgtagaaaaatttaaaatttattgactttgattgaatttgattgatttgggcaagtggtagttagaacatacccataccacccataccacccataccacccataccgcccataccgcccatgccgcccatgccgcccatgccgcccatgccagcatcaggagcagcagctttcttttcaggcttttctactactattgcttcggtggttaaaaccatacccgcaatagaagcggcgttttgcaatgcagaacgaacaactttagcaggatcaataatacctgcggcgattaaatcttcaaattctccggtagcagcgttgtaaccgatgttaaagtcggtttctctgactttagaaacaatgactgaaccttctgcaccggcgttatctgcgatttggcgtaaaggtgcttctaaggacttttgtacaatgtcagccccaattttttcttcggcatcaaggctgtttttaatggcatctacttttgtagacaggtgaattaaggttgtaccaccaccaggaacgataccttctgctactgcggctttggtggcgttgagagcgtcttcaatccgcagtttacgatctttgagttcggtttctgtggctgctcccactttaattactgctacaccaccagcaagtttggcaatacgttcttgcagtttttctgtatcgtagtcagaatcagtttcttctaactgtttgcgaatttgggcaatacgcttttgtacttctggtttgttgtcagtaccagagacaatggtggtattttccttgtcaatggtgattttccgggctgtacccagcatttctaaggtagctgtatccaagctcaaaccaatttcttcagaaatcatctgtccatcggtgagaatggcaatatcttgtaataaggctttgcgacgctcgccaaaaccaggggatttaatggcagcaacggctaaaactccccgtgctttgttgactaccaaggttgctaaagcgtcaccttcgatatcttcagcaatgattaataaaggttgacctaaacgggctactttttccagtacaggtactaaatcttgaatggcgttgatttttttgtcggcgatgaggatgcgggcgttttcaaattctactgtcatccggtcgttgttggtgatgaagtagggagaaatataaccgcgatcaatttgcatcccttctactacttctagttcagtagttaaggattttgattcttctacggtgatcacaccatctttggtgactttctccattgcttcggccagcatattgccgacttcttcatcgttaccggcggaaacggtggcaacttgagcgatcgcacttccttctactggtttggctattttggcaatttctgctaccaatgcttctacggttttatctataccccgttttaaggcaatgggatttgtaccagcagctacgtttttgagtccttccttgactaaagcctgtgctaaaactgtagctgttgtagttccatcacctgcggtatctttggttttagatgccacttcttggatcagtcttgcaccagtgttttctaaaggatcttctagttcaatttccttggcaacggtgataccgtcgttgacaatttggggtataccaaattttttttctaacaggacgttgcggcctttgggtcccaaggtgattttaactgcatccgctaaggcgttaatgcctttttctagcgatcgccgtgattcctcatcaaatgaaataatcttagccatgtttgttttctctatctcttccattagacaatttagcactcacaagacaggagtgctaactattccaactattgaatttaacaaataacaataaaaaattgattaagattacaggtgataattattttggacattagcactaatgattgtatcgggagatgaatttagacaactcccttagatcccttggcattgctaaccctagcggctccggctggttggcggtagtatttacttttattttggcttggctggttacatggcgtttaattccgactatccgtcaatttgctttgcgggtaggttgggctgatcaaccaaacgcccgacgacttaaccgagaacctttacctaatgcgggaggtttggctatctatgctggcgttattgcggctgtggtcgttgctagtctgctacgacctattgaacttcaaggcgtattggctcaggtactcacaattttgttaggaggttctattctcgtcttggttggctttattgatgatcaatttggcttacctccttctgtgcgtttgtgggcgcagatgatcacagcccttttgttggtggctaatggcatcagtgtgaaagttacttttggtactcctattgactccttgctatcaatggctttgacagttttatgggtagtgggtattaccaatgccattaacttgatggatgggatggatggtttagctggtggcatcagttttattacagccatgagtttgttgggggtttctgctcagtttgataatcgagcagcagcaaccctggtattagctgctttgggtggtgctgcactgggctttttacgccacaattttcatccttcacggatcattatgggtgatgcgggggcgtattttttcggttatgttctagctgccactagcattttaggcaagttgcaacaaagtacaatttatgccctgataccaacggttttatttctcatgttgccggtgttagatactactcaggtttttgttaggcgacttttagccggaaaaaaccctttgagtacacctggtaaggatcacctacatcaccgcttgctggactggggtttttcccaacgtcgggcggcttttactttgtggtctgtcaccttgttttttaatgtactggctatgacggtacaaggtatgactttacctgtgatcctggcttctgctgctagtattgttctgctgttaggtgctacggttttacaaagaatacatggtaattcgtaattacaacaggagtcaggagtcaggagtcaggagtcaggagtcagaatgaagatttttctattccctattccctattccctattccctattccctattcccttctttaccaattacattaccatcccaccatcgacgttaaagacttgacctgtaatgtaagctgcggcgggatcagctgctaaaaacctcaccataccagcaatttcttctggttcaccaaaccgccccaagggaataaattgtaatatgttatcagctttgatatcgctggtcatgtcagttttgataaagcctggtgctacggcgttaacggtgataccacgggtagctagttctttggcgatggttttggtaaaaccaatcacacctgctttggcggcgctgtagtttgcctgtcctggattgcccatttgtccggctacagaagcaatgttgataattctgccagaacgttgtttgagcatgattttactgacggtttttgtacataaaaatacacctgttaagttgaggtctataacagcttgccagtcttctagcttcatccgtaataacaatgtatcgcgggtaatacctgcattgttgactaagatatcaatgcggttaaatttttctaaggttgtgtttatcagtgtatctacttgatctgcttgggaaacatctgcttggagggcgatggcttctcctcctgctgctgtaatttctgctactacttgttctgctgcggtgctggaactggcgtagttaacgacaactttcgcgccttgggatgctagttggagagcgatcgcacgtccaatacctctagatgctcctgttacaattgcgacttggttttgtaataatgtcattgaatttttctctgggaaataccgcgttaattattttatggtgatttggggatgatttaagtatttagttttagattctcagccgttgaggttaataggttttaaattgatttaacgcagatgaacgcaaataaacgtagatcaagcggtcaatgattgagcatttgttgaaaattaaatatcttggtgatcagtatttacacaactttacttatctacataatatttcaaaatttcaaatcaagcatttctatttagagatatatagaaattaattaagtttcacgattgacacggttgattactttgtataaaatacaaatataaggttaaacattaaaaaataaaattatatgattaataaagtattaggacttacgcattgacagaataacaaaatagtgcattgataaataagggtcgtctagtaatgggtatgagagaatgagagaaattactaaaccctcgacagcacaatgcaatctagacatctacaccttatttttactgtcagagccaaagtatggagggtgcagtaggttagccgagatattgggagatgtttcacatgatagtgtcaatcgctttttattgagagagagatacgaaccaaaagatttattcagcataatagagaaaattatcaacctggtaggggggatattaagtgtagatgatacagtcatagaaaagatttacagcgaccctaaaaatgcggaattaatcagttatttttggttagggaaagcccataaaactattattggcttaattaaatttaatcactattaaatcactaatttttatttcaatctttttgaactttcttaatcttaattaattccaagactcttttgtgataatcacttcagactgttaattagtataacattatcgtccgctatccggtttatttatattattttaccataaccactctagtagagccaggaatttgtaaaccaaaaagctaacggatttgttggtttaagatactttgttatggaaatattaggtgataaacaatacgattttggtacaagttttgatgtcataaacgaattaatacgtaaaggagaaatacaaaaacatgaagtgacttcaccacacacagggaataaagttcctgctatgctacttgggttattactttattgacccatttatttcccaaacttcaccctagcgttcacgaagtgcagcgtagctatcgctcttcctcataactagccacttgggttattatagagatttgaaccaataaaatcataacttgtgagtcaacaagacaagctattagctaaaattttatcaggcgcatctgatacaaatatatcctttgagcaactgtgtcaactattaatcaaattaaacaagtccgtgaagttttactcaaatatcagctaggaggtcaagatgactctacggtatgaaattattatttattggagtgaagaagaccaagcatttatcgcagaagttccagatttaccgggatgcgctgctgatggaaaaacttatcaagaagcactgcaaaatatagaaattattatgcatgaatggatagaaactgctcaagagttaggtcgaaaaattcctgaacctacacagcgtttaatgtctgcttaattgaggatgtagggagtgcgatcgctgcatttaattaacaataattaactcatcaattgatttaaaacccacattccgcaccctcaactgtcacagatcaaaaaagccattaaagtagtacataataactaaaggtaacttaaaagttaagaggcttaataagagtaaatagcattaagctgggtatggagtgagaaagtgaaacttcgtaacgggacacagagagaagattcaataggaaaaaaatgaattgataacaaaacaataaatgagaaaatcacaacagaagtaatagaggaagctgttgtgaaattaaaacctcaagaaatagaaattcagaacatagaccatctagggatagtagcaggaataatagacgcgataggaatagtagaaataataaatgaattaataggagtcgaaaagggcgaaaaagtaaatgcaggtcaagtagtaaaagccatgataataaacggtttaggatttgtctccaaaccgttatatatgtttcccgaatattttgaaacaatagcctgtgaacatctaatattttagcatactatgtactgaagaaccctatttatatgaacaggcatttagtaatttagaatttacctatgcttgtacaattggcttggtgttatttttaatcattttaggattatcacttttgcgattagcaattaatcagcaagatggtaataatctaggtgtgtaattaagggttgctgaaaattttcagcaacccctaattatttcggcacagaccaagaacgaacttgacctaaagttacaggaattctgtcactaacatcaatagtaaacagaaaaactctcttcgctctacgtccattttccgggtcaaaaaactttaatttcacatcccaacaatcactattaatgcgacagaaaggacttttttccacttcaatactatcaagctgcatccctgtagaaatagcttgagaaaaactagaagcagcttgaaaagcattagttacagaaaaatttaacgcccgatctttagccaattgtcctacattttgcaaatcatagtaaactcgatttaagaaactactcaaagcctttctcatagctatttcttgggctggtgctgtgccttctgtaattacagtttgcattgccatatctaccaaactattgactttccagccatacattcccctagtattagttagagtaattacaggcacaacttgaccagaaaataactctacagttctatctgttaaccttgcaggaatactcacccgttccacaaaatcatcactattttctggttgaatttgtccctctaacattaaaatgagagtttcatagatatctgcggcaaaaccactcacaggttctaaagcataaatgggagttagttcttggttaagagtccaaattaaaggtttagcttccgtaggatttgctgacaagtaatcaaccatttgccggctatcataggggttagcagggataattgccccgtccatattcactgctggcattaattgtttaaaagagtcccttctggcttcatcaccaaagtcataaccaatagtacccaaagcatagacaagtttagaagccgcactaggggtaatagaatcagttgaggaattaattccctggctaataactaaagtttctcgttcccagtctccggctgggaatgctgcctccaaggctctgcctgacggtatagttagaggcagagcctctgatgtagcattcccaggtagaacctgggaacgagagattgttactcccctctcctcataggagaggggttgggggtgaggttcttgtactccctggtaggagaggggttgggggtgaggttctaacctttctcccgtcaataattgaaacgcaccgggaatattcaacttacctaataaacagcgttccggttcttccacttcttcggggttacagggaatagcactatttaaaatcgcttcccgcactgcttcggcgttgggttgttcaccccgttgcaattgcatactcattaataaggcagaaatacctgtgacaatgggtgcagcgcaacttgtacctttttgtttgataggttcttccgttcccggttgggcacctaaaatattttcaccgttggccattacccctttattttgatattctccgccataattactaaatttaaacggttgaccatcatctcgcattgcacccactgtaatcacaccaggaagaatagagggaatacaccaacattcccctttatcattaccacctggggcaacaattaacatattgttatcttggcattgtttcacagcacgggcaaataaatctggtgctactccggtttgggtagggtgacaagcagcgatatggatgatatttgcaccccattgcaaagctgtattaatggcgtgggtgaggttgatgggggaaataaaatcatcaccagcgaaggaaatgggaatatttaatgctgtacataaaggagcaatccctggggcgggtgtgttgtgttgccctaagatagtgctagaaatgtgggtagcatgacttgataattctatccgtcgtctaatagcaggaggaaaggaggcaaaaaatgcttctcgttcttttttcgcttcttctttgtcgtggtctgggtcgtcttttttatctttttgttgttggttaaattctaaatgtaacttgagataataataatattcttcgttgagttcaatatcttctgaccagtagggtttaaattgactaaaatttgcaccttgaaaacaactacgttctaagtccgcagcaccgtcaaggatagcaattttaatccgggggtcgccttttgtgcgtgtccaaatttgggaaattccggggatgtctgtcaggttaggcatggttttgattgtgttgttgtaattggtgttataataattaagggtaaaaagtattctttaaaagtataattttacataaagttaatgccagctaaagatatttttcatgatgctgttaggatagggttataaaaagagggttgggtgattacagatgatcctttaaggatagaagtcggtgatgtggaaatgtatattgatctcgatgcagagcaagttttagctgctgaaagagaaggagaaaaaatagcggtggaaattaagagttttattggtacatctaatatctctcaatttcatgaagccatttgacaattttttaattatcatttggcattagaagaacaacaaccacaacgagtttcatatttagctgttccttcaggaatttattactctttctttcaattgcagtttattaaaacagttgttgagcgttcccaaattaaaatcatgatttatgatccagttcaggaggtaattgtagcatggaaaaactagaacaatatcgcaattatgtcaaacaagtgatcacagaatatgctcaattaggttcagctaaagatgaaattgaacaacaattgatttttgatacttttggtgatcattatcaattgatgtatgtgggttggaaaaatagaaaacggcagcatggttgtgttttgcatttagatattaaagatcataaaatttggatacaacatgatggaactgaaattggtatagcggatgagttagttaaattaggagtgccaaaatcagatattgttttagcatttcatgaacctttggtgagacaatatacaggttttgctgttggttgattttcatatatagcagggaacagggaacagggaacagaagtgaaagttcttctgtgtatggtttttggttaaattctgtatctcattcaagtgcataccgctataagatttttacatgaattttacatcattcttggaaatatttacattatgtcatacagtgattttaccctcagaaaagtcaagcaaacctttggcataaacaccattgaagatcaaaagtttctgccagaaatccaaccaatagctgctagtacaaccctgactgattttttagtggaaagtttaccattagctatagcgacaggaagtgaaaaagcacgttctgagttaatcattagtccggttttactagaggttcgtaagatattacaaagaaaaattagtctattctctggtacagattttactgtagattcggctttaggattgaatggagtttgtgattttgttctgagtcgttcacccgaacagttagaagtggaagcaccagcagttatgattgtggaagctaaaaaatcagacttaaatccgggtattggccagtgtattgcggaaatgattgctgctcaaaaatttaatgaaattaataatcaacccattcctacaatttatggtagcgtcactaatggtactgtttggcgatttctacaattaacggaacaaactgtaacaattgattttacagattatccccttcctcctgttgatgtcattttaggaattttagtttggatggtaactgctgctaactagataatctactaataaaattctcatgttctggacttgctaaaccctgctggacaacggttaacacttttcctaaatctcctcctaataatgctattttatctaaccataaacctgggaatatttgggaacaaattatattatctgcattgggttgaagttgaatatactccccttgttgtaacctaaaccaatcaaattgatagtcataaactcgccagattaaatattcttggacttgattacgacgataaactttgagtttttcatgtaaatcataggaagcactagaagcagcaatttctactattaattctggcgcaccttctacataatcatcttgatttattcttgattgtcctcctgcttcaattcttaataaagcatccggttgtggttcgttatctgtatctattagcactgtggcattatcggcgaaacctatgcccggtgtagctgctttataaactcccagccaagtcataatataagcatggggttctccatgacttttgattcttaatggtgatgccacgtaaactactccttcaattaattcggcttttttgagattcgccatggcatgataacgccgttcaaattcatgacgggttaatttgtcgccgttttctaggggaggaatagttaagatgggagaaattgcagtagtagatatcataaaatttgctcaaattttgcagaaaatgaaattgtcaccaatcaggatatccaggatttccaggatgttaaccaacatttcggtgattttgtgatttaatgttgttgggttgcgctgtcgcttaacccaacctacatctaaccaatagatatcattattgtcagattatgtcttttttaagttattttttgtaatatttggggttggggtatgggcttaccgatttgattatagccatacaccaaatcttctaacacttccttggcattttctagagcttcttcatagctttctccgtgggttttagcatattttccccactcaggtaaaaaggcaatataggcttgatcttcgtcagaccattgaattaaaatactatatttcatagtttatctgctttttctaattgttcaagttctttgatactttctattatatctttctcttgataaggttttgcatctttgctgtctttgccagatagaactacaggttttggtaaaagtggatgaatccagtaagaatgactaccttttccccgctttggtaataatgtaaatcctgctttttgcaacatctgttttaattatctaatttttttgggcatttagttttatttatttggacttctggaaattgcattttaatgatgttatttaacgttttggtgattttgtgatttaattttgttgggttgcgctgtcccttaacccaacctacattttcttattagtttttgttggtggttataggagaactcatttgataatacagattcaaattttctatcctcccagctattatttcattttcccgtagtcctacaattgttccctgtacaggttgttctcgataataggcatgaactcggttagctaaatcattgcgtaaattagcaataaagttattagggtcactggtacgataataaaggattttttcggggttgccttggctaaaaccaataattaatgaccaacagctatctaaaagttgtaaagcctggggtgacagaactttggctagttgttgaaatttttctttgctaatactgggataaacctcgatttcactaccaccattgaagtcaaagtcaaagccaatgacaacggaattatctaccaaaaatggttgcaattcttcagcagattgacatagggatattgccttggctaatttttggggataatcactgatgataaaccaaaatttgaggcgagaagcactaaattctcttcttaaatcaatacctactaatatctggtggactttactgaaatcgaaatcattgccaacaaaattctcaatgagatgataagttattttaacatctgtcctggctgctacttgctgaaaaaaattaatagctgtctgataatcttgccaatttggttgattacgaaataaattaaatcgagccggatacagttgatctttttggattttacaagaacattctaatccccaatgtgtaactttttgagtaaaatcatcgaaaatattcagggtgtagagatggtcaacatcaaagatatgtttatgttgattgatgtaatgtagatttttttggctacctataaataaattctcagaaatagtcatttataattccttcttgtgcctagacaacctcgaaatttacagtctggatactcttatcacattaccacccgttgcaataaccgcaaattcaaattatcacggcgggaatgtcgggaggtgtttctttatgcaataaaaaaggctttggataaatacaatttccagctttatgctttgtgcattatgtcaaatcatgttcattatttgattgcacctaaacagccagaagagttacccaaaattatgcacttcctcaactggtacacggcgatgtgttttaatcggatgttaagaagaacaggacatggttcgacttcgctcaccacaagcttttgggagaaacgatattactgtgatgggtttccttcttcagatagaaacagagtattaaatactttacggtatattcacgctaatcctaaagctgccaaaatgcgccagagttttttctatgacttcagcaattatggcagttatgaacgcttaaccgatgatggtttaactcaatggcatccggcttttttacgactgggaaacagcttagaagaatgtgccaaaaagtataaaggcttttgtcaaaagtataaacccaaggagaagaccccaacccaataccactggggtagtaagctgttggctggggttcatctcacaaatcagggttcaaccaccaaccccaaaaaatctaagtctcgtttttcacctcccccgtcgtgccaggtatcggaaaccccggaactgacaagggttgttcgtcaattcatcgaggcgaaccgtgcgccaagggatgtagaaaaagacttttgatatttttggaggtgggtgatagattaaggtgagttactccgcgtcgtcgcctgcaaatgggaagtaagagaccccttgagccgagggtgttacctgaccactttgatccttagaagtagagatggtttcccgttctacgggagcaacttgttgggggcggatgtttttcttagtcatggtgtttttttcctttttgtttgtttagatcacttcttcgatgtgaagaagactggtttggtgaaggcgttaaattgattttgaagggtaatttaacgagttgtaattcaccagaagcttttttatagtgatttaccaaatcactaaagggtagaaatcagctatttttcgatctgctgtaataatagaggcttggtttattttggcaacggctacaactactctatcaacaggatctttgtgttcccattctaatttgacactttctagccaaatttcctcatcaattgggacaatacgaataacattagactttttgagagtggcaatatagtcatcaatatctacacctaaatctaatttctggtttttacttttgatgactaagtgaagctaccttgatttcaatagtacagccaattatgattcaacgcaagacattattcataataatttcttatagtagattagagctattgacattactgtttagttgctattgcatgacgaggaaatcactgtcaaaaattttaaatactaattttaagccacagcaaaggagaaaattaacacttattaaaaccgttttttttttgacataataaaaaattatatacgttaaaatatgtaaattgagttgacatttcagccgaatcaatatgacaattacttttgtgttctggaaagcactatcgtaataaaaatgccataaaatagacatttatggcggaaaaaactatttaggcgaataattaacaaattaaatgccaaaatcctcaattaaaacggaaatccagaaattatggaacttgacacagggtgattcacaaatatgtgtagccatactcgacggattggttgatcaatctcatagttgctttaatgcagcaaatttaacaagattgccaacacttattcagggagaagctactgctaacggatctatgtctggacatggaactcatgtcgcaagtatcatatttggtcaacataattcttcagaattacagggaatagctccccaatgtcgagggttaatcctccctatttttggtgacaataataggaaactttctcaactagatttagctcgcgccattgaacaagccgtcaatgctggagcgcatattatcaatgtcagtgctggacaactcaccgataatggtgaagcagaaggctggttagatagggctgtgcaactatgcaaagataacaatgttttaattgtggctgctgctggtaatgatggttgcgaatgtctgcacgtccccgcatccttacccactgtattagcagtaggggcgatggatgaccaaggtaaacccatagactttagcaactggggagaaatttaccaaaatcaaggcatccttgccccagggtcaaacatcttaggggcaaaacccggaggagggacacaaaaactcagtggtactagctttgctactcccattgtttccggtgtcgctgctttactcctaagtctgcaaattcaacgcggtgaaacacccgaccccgctaaggtgagaaccgccttattagaaactgccataccttgcacaaccaaggataccgacgatgtgagtcgctgcttgctaggcaagttaaatatttccggtgcattgcaatatttcacaggaggaacaatgtctgaagaattagatactattgacaccgtggacagtatagaagctgctggttgtggttgcggtggcatagatacaacaaacatcactgaacccgaacccaacccggaggaatttatcccagatgaaatagcagaagttgttccggctataccagcgacaatttctgcaactttaacaactgcaactatatcaaattccagacctacaacacctacaactatgtcaaaccgcacatctaactacatcaccgccagccaagcacccagcgacctcgctgaagttaacctagtttatgctttaggtacactgggttatgattttggttcagaagccagaagagactcttttaaacaactaatgccgggagtacaaatagacggaacagcaattcccgctaacccttatgatgcgcggcagatggtagattatttaggagataatctttctgaggctaaatccttaatttggacattgaatttagaattaactcctatctatgccatagaaccaggtggggcttttgccagagatgtctatgaaattttacaacaattattatcgggacaaattcaaccagaagacagcgagaattatgtagagagagtcagtattcccggtattttatctggacgcagtgtaaaactcttttctggtcaagttgtgcctgtaattgaagttcccaacacacgggggctttacggttggaaggttaacaccttggttgaggctgctattcagacagtccaagcacaagccacagaagcccaagaagagtctattcgccgcactttgggtagtttcctcagccgtatttattatgatttacgcaatttaggtacaacttcccaagaccgggcgttaaattttgcttctacgaatgctttccaagcggcttctaccttcgctgaagctgtggctacaggtatggaattggatagtattacagtagagaaaagtcctttctgtcgtttagatagcgattgttgggatgtaaaattgaagttctttgatcctgaaaatagccgtcgtgcgaagaaactattccggtttacaattgatgtgagtgatattattcctgtgaccttgggtgaagtccgttcttggtctactccttattaattaagtagtagtaggttgggttaagcgacagcgcaacccaacacagttttgatcatgttgagttttttaatgttgggtttccttgcgtcaacccaacctacaatctaaaatctacaattgattatgagattacctaaactttccccaccaataaaaagaccggatattatttatcctcatcggtctgttgatgtgattcatggcagagttgaagatttagttcatattcgcatggatttattacatggtgctaactataatgatcctgctgcttttcaaaatcgcagttatcagcaaattaagtcctcttgtagatgtacgttttaggaattatcaaaattatgagtataccaaagaaaactcccgcaaattccagccaaccagaacctcaactaccagcagaaattgaacgcaaattattatctactggtttagaggattatggtttttggtcacaggaaatggctagacaaaaagcccagcaaactgaacctgataaacctttccgtcgtggtcgtatttggtgttaatcttcagagatgcgacttcttaaagtgtattgatatcaattcctttaggctgatttcaataatggacaattaacaatgaacaattgaaaattacctctcccttgaaaggggaggttttaaaccttgaatgaaacaattatcaattgtcaattgataatgcttgtccatttaatttcttttactggaattttctggctgtattctggattctgcgttttgcgttctgtattcttacttgttcagactcaaacatcaatattaattagtaaccatgaaaaccttaatttcttgtttagtcgtcttaggaattggtgcaactgtgttagtttctgatcagagtattgcccaatcatctaaaattgaagaatttgttgctaggggtacagaaccattttggagtgtgactgttggtagacgaggaattatttacagttcaccaggaaacagagatcaaactttcccgtatacagcaccattaacagcccaaggaagaccaaatgatttagttagagtataccgctttagaggtcgggaaaacaatatgttaattctgagaaaagttaatagttgtagtgatgggatgtcagataaaaattacccttattcggctattttgatgttaggaaatagggttttagaaggttgtgctgagaaaaaataatatcattcatttggtaattggtaattggtaattggtaattgggaaaaataaaatgattacctagtccccagtccccagtccccagttaaaatcttctttcaaactcaataattgcccgactatcatcagttaaatttgtggaagcacgaacacgaaaatcatcattaattctgtaattaataccccattgaaaggggtcactagcggttaaaattttgatcgtagaaaaggaaaatttgctagaaatatccacacctgcttctaatgctaattctatagtcgagttgcttttacctgcttcgggtttatcagaaagaatggtaggaaatatccgcagttcacttaaaccaaaagcatctccaatttggctaaatgcagcttgaaagttattgaaaacagccgaaccagcaatattaattaaacccaatgttgtgtcaccacgtccttgggtgtctacaaacccacctcctaacaaagtgacaatttctgtttgtgaacgtgagggactactttttaattctaaattctcatttagttgactagcaagacctttaactattgcttcgacgcggacggtttctaattctgataaccctgtcgaaacttgtctgctgagatcaattgtttggattccatctaacactttagcaaacagtttaatatctaactcaggatcacgaggatcagaagttctaaaagttgcagtatgtttatagttacgagctaaattgaattgggtagtaaataaatttacgccacctttggttaatctgatagttcctgcgggtataggattatttaaagtaccacttacatttaaatcaccagttgctaggaagttgaaaacaggtggacgagctatttctacactttttcctagcttgatttgcaaattatttaatctggttattccgctttcaatatcactggttttgttttgtttattatctgcaaaaattgataaatcagaacctgtttgagataaggtttgtgtatcagattctgttagtaaaacttgaccattagataattctataccaccactaattgctggttgtaatactgaacctgtaatttctaaattaccacttgcaccaccttgatataatcccttgagatttaatactaattgttctagtttcacactcaagggtttatctatttggatgttttgactgttgaaaattggtatttctcctgtggcttctattttaccattgctaaactgcccttggaggttttctactaatactttattaaaatcaaattcggcttttccagacacattggttagtttaccttgtaaagcttgggctgcaaatgtggcgttattaagagaggcagtacctttaactaatggttgttgtctagttcctctgacagctaaatctacttctccttcaccgttctcaaaagctatttgatcggtgaacagatttaataatcctaaaccttcatctttgactttgacatctagggtaatttgattgttgtctggtgttactgatgcaaatggtaatttgtagggaatatcaccagtaatgttaactggttcgtttcctactgctatgacttgactgccaaatttcaaacgtccatcagcataactaaaacctgcgttggctgactgtattggtttttgattgagtgttccttctgtgatttttaattctcctctagcttgggggttggctatattaccagctatagcagcatcaatgttgagattaccactaattcctacggggattttgacaaagttatttaatagttgaatcgggaatttttcgactgttaattttcctgattgttcttcaccaccaacattaccagtaaaggctattagtctatctttcgcttcgatgctcaaaggttgtaaccgcaaaacacctttttcaaaagcacctttagcaatgactttttcggcacgataaaaccgattaggttctgtttctcgaccccaagtaaagttttgtccttgtaagtcaaattgtgctgttagtccgttttttgtagcggtgttgatggcaatttctccgttgaaagttccctttaagtcttttaaatatggtattggttttgattctagccgtttttgttcttccgcaactagaagtgcttcaatttctgctaaacgttgaatttgattaaataaaggttgatttggtaaacctcgcgggttggtggttaaatctgctgctgtaccgtaggtgggaggtgttaaacctctttgtaaatcttggatttcaaatatttgggcaacggtgagtaaatcttgaattttgccttggttgatgttaattttggcttgtacttggggaccttgaggagtttgtttgaggttagcatcaaacaggtagcgactttgatcgttgataaattcgctgtttgtgaaggcggctaaattattgttgtattgaaattcggtggtgaagcgatcgcctttaattctaccaagttgcggtttggcgatcgcaatatttccccgtgttgctaatgtctgttgatttatttgcaaatctcccgttaacaaaccagctaatgcaccttgacccaaaatcggattattaggtaagtttaaatttaagtttaaatttaacacttgtaaggggaaattattaactttaactgcccaattttcgccttgagattgacctgtagctgatgcttgttgccactgtactaaaaaggcgctaggttgattattggcatttaatttagctgctagtctgtctcttttaccagcaacatctaaacttaaaccccttccttgcactaaattaatgttaccagttaataatggttcaaaggcaaacttttgtattttgctttgcacttgcaaattttgcaaacccaaagatccaataacattcggtgctgtgattttcccggtaatttgtcctttaaaatctgcttttccagctacattgatcgcatgaggtaattgcaaaggtaattgtttaaggtcataattttgcgcttgaacattgagatttaattgagtaatttctggtatacctggttgtttagcatcagctaaaatataaccactggcgtttaaatttggagttcttgcttggggaatagttaattgttgaccattccaagaaactacagcatttaaaggagaatttattcccggaatacctcgactaaattgcacttgaccagtagcacgaatatcagctaatttcgcagacccaacaataccagcaacttttaactgacctgcaaatttacctgataattgttgatttaaacgttttaattgtacaccagaactattaactaatgcttggtaacgaccattagcaagttgaatattagacgctgtaaatgttcccccggcaagatttaactttgcttgaccatttgcttgaatagtttcaggttgaaaagatgtaacattaccagcaacattaaactcaccaactaatgcaccttgtatttgaggtggaacatttgctaatctctgcacaggtacattttctactgcaacttgcgccttgtagcgaccattactaacttgaatatttttagctgtaattgtgccatcattaacttttaaactgccttcaccaatagcaccaaaattattgaagttgaaattttcggtattacctgcaatagtaaatttcccggcgatgggattattgaaaatggggggagattgttttaagattgttcccaatcgtacatcttgagctatcaagtcagcaataaagtttttatcttccaactgaaaacgagaaatggcaattttaccgccagcaatattaatcttggcatcttctggacgaatattagtaattttaaaattttcagaagttcctgaaatgattaatttaccgttaaatgctgcgttatttaaagagatattttctaattgttcttctttgagaaatggtgttaattttacacctgaagcttgagcgacagcttgccaactttgaggattataattaccataaacccggattatattcccagcaatattaacagcaacattacgaaaatcaactgtacgatttgagttaataattgtttcaccagtagcagcatagcttgcttggggagcttgccattttacaaaagtttgaatattgttagctgtaccaataagcttagctgtagctgagacagtgccaattttgaatgtagagttaatatgatcattataaagtttagcgatcgcatcccctggaacatttttagcagttaaattcacattgatttgcggtattttccccagggcaatttttcccgccccgctaacttcaccacctaattttgtttgtccttgaatatctttgagagtcagcagagcatcacgagttgaaagctcaaatttactactaactttctcaaaatcaacttgatcaattttagcagttttgatattagccacagttcctgaaagcacaggtttgtcaatatttcctaatatctgcaaatcggctttaaccaccccactcacagggaaaggtgattgcactttcagagtttctaaggcatttgatacacttacagcattgacacgccctgataaattaaaacctttttctcggtcaatcaaacctttagcagtaaggggaattttaccataattactaactacattatctaactctatagctaatccttgaaacctgacatttccctgagtattgcttaatagttgtgggacttggggaatttgtagagttaccccttgtaaagcagcagtaccatctaataaagtttgttgatttggtattaattgaatttgtaaatcaccatttacccgaccagcttgtaaatttattggtaattgaatcaaacgagtaatatctgcggctaataaatcttgggtttttacctttaaattaccttctaaatttgcctgggcgcggagatttccttgcaggaaaatattaccaccgttctctggttttccggctacgtcaaatttaatcagtcggttattttctatcagttgggcagttccgtatagtcctgaaaatgttacaggtattggggactgggaactggggactgggaaattgatatttttcctttgtttctctgctgcttctgcttcccctgttgcctgggttttctggtttcctactaatattaacttggcgttgcgaacgcgcagtttatctaaatcggttttaatcagtcctggttttcctagtggggcgatagtggtagtgatccagcgtccttggttatcctgttgaatataaatatctgggttaattaaagtaacatctaattttaattgacgattaacaactaactgccaaggatcaaaacccacatctaccgcttctattgtcacccgatctgtatccgtgggtgtgggggggatagctgaagcagcaaacctaactcctgtgagggaaaattctttgacttctcccaattcaactggacggttgaggatattcgtaagattttgttgtgctaggggtgctaactctgtttggataaaatttcttaaacgccaaataccaccgatgattacaattagcaaaaatgcgcctaacgccatgctaccacgactcaatatgatcaaccataagcctttgcggcttgcggttggggtttcttgatcttttttggaagtgttagacatgggtttgcactctggaaattgccggagttagtggtcaaacatcctcttataattagcacaatatttagctgtgccactggtagggtacagaccagtttacatatttccccaggtttagccagagattaccacaattagggtttgatttgcctgaaatcttgaaaaatatacctttcgtctattattggctttcccagaggcacaatctcgaactttaatagaaataatataaacgtcaagtcaaaggattaaagaattaaagatgcgtgtttttgtactactattcaatgcgggaactgataatgaagggattcactcgattcgggtgggcgatcgcaatacaatcatgatgtttgaatcagaagatgatgccacccgctttgctttaatgttagaagcgcaagatttcccgacaccgacggttgagggaatggatgaccaggatatcatagacttttgcaaaagtgcggattttggctgggaacttgtgccagaaaatagtaataccgtggtgacacctccaaaacagaacgtagaagaaactgattggaaaccagaaagtcaaactcaaaataactatgataactatagttctcagtcagaagaacagcaaatgtctgattctgaactagacagcttccgtcgccgactagaagggttattgtaagtagtcattagtcattagttgttgggaaagtagggaatagggaatagggaatagggaatagggaataagtaaagaattttctacccagtcaccagttaccagtcaccagtcatcagtcaccagtcacctgttcccttacctgctatataaaacctagacaaaactagactttactttctacttcaacgggagcatgggagcagttatccctcagtagactttcacgccttagccagacgcgattgtgttccaattaagtttctgaaaaagactaccaccatcattgcttggttttcgcgtcggcaatagtctcaattcaatacttgatatcaccgtattatatatcaagtagttgattttttcctaaaaatatattgatttttgtcaatacaagtatagttttgtctatgaaattgtcaacttaggacttgctcaccaataaattctcaactaaaataggattgctagattgctatatgcgaattttgctagttgaagatgaaccaggaatagcccaatttatcagtcaaggactcagagagatgagttacgctgttgatgtggctcatgatggtgaagaaggtaaggaatacatctttgctgctgagtatgacattatcatcttagatattatgctacccaaaattgatgggttaaagctactaggagaatttcgccagcaaaaaattaaaactccagtcttacttttaacagcacgggatactgtagaagatcgggtaaaaggattagatcatggtgcagatgattatttagtcaagccatttgcattttcagaattactggcacggttacgagctttgcaacgtcgcccaccattacaatttaacaccattttacaggttagtgatttaactatggatgtagtcacaagggaagttcagcgtggaggacgtttcattgaacttagccccttagagtttaaacttttagagtatttattgcgtaattccaatacagtagttacccgtacacaaataggtgaacacgtttgggattttgatttttatagtgattctaatgttgtagatgtatatgttggttatttgagacggaaaatagatcggggttctgatcagccactactgcatacagttagaggagtaggatattgtctcaagggaataggtgataggtgactggggattggtgattggggaaaaatatttacctcctgactcctgactcctgactcctgactcctgactccttgaaatcctgactcctgactcctgactcctgctgtatgttttctcaacgatttaatcaaagtacaattagaactcgtctaacaacatggtacatactgcttttgggctgtacgctagtagttttcgatacctatttatatattcaattaaaacatagtttacttggtcaattagatacagctttgcaggttgcagcttcggaaacttttgctgaagtgattcaggtaaatggtcatcctactttgaagatcaaacaacagtctgaaactattacccgtaagttaactaatgctggtttttccgtgcgtttggtttctccccaaggtgaaatttgggatggtatcggtagttacaaaaccatatcaccgatgatgcccgtaaaaatcggttataccagtgttactgaatacggcaagatttggcgagtttatactcaaccattatctttatcttccactgctggttggttacaagttgcccaatctctagatcctatttctgaagcttcagaacatctgctgactttgatgcttttgagttttcctttaattctcttaattgcagcttgtggaggtttatttttagcggatcaagcgttacgtcctattggtcgcattattcgcactgcccaggcaataagtcctaatgatttcacccagcgcatcggttatcaaggttcaacagatgaagtgggaagattagctatcaccttggatgggatgttagatcgcttgcaagctgcatttgagcatgaacgcagatttacagccgatgcttctcatgagttacgcacacctttaacagtgattaaaggcagactgggtgtaactttaagtagagagcgtacaccagaagaatatcatcataccttacaagaattacaacgggaagttgatcgtttgattcgtcttgctaatggtttgctttttctcactcgtttggatcaaagtgaatctgaatatcaatggactttgacaaatgttgatttaagcgagttactagaagttctcattgagcaaattcagcttttagcagcagataaaaatattaccatctgtgcaagtataaaacccttactttacattactggcaattctgatcacttaaccagtttgtttttaaatttactagataacgccattaagtacacatccccggaaggtaagattagtgtagaaacatatcgtgaaaatgaacaggtgaaagtaactatcactaatacgggtaaaggaattgcatcggaacatttaccccatttgtttgagcgtttttatcgtgcagaaagcgatcgctcacggtatacaggtggatcaggattaggtttagcgatcgcccatgaaattgttcgcttacacagtggtaaaatttatgtcaccagtaacccccatcaattcaccacattcactgtagaattaccattttgatactgccaacttaattctaagaaaattcttaatttcttctcatgcttttcttaaaatttgtggactaatttagagggtagttcataaagttttctaatgctgaggaaagaaaaaatcaatggatggcagtttaattctttttaacattctcaatccccctgtgttgttcttctttttgggaatgctggcggtttttttaaaatcagatttagaaattccccaacccttaccaaaattattttcactgtatttgctgttatccattggttttaaaggcggacatgaactagcagaaagtggcattaactcgcaaatagcaatgacgctgatagttgctattgtcatggcttctattgtaccagtatacaccttttttattctcagaatcaagcttgatcattacaatgcagctgctatcgctgctacctacggttctattagtgcagtcacctttattaccgctagttcttttctagaaaaactgcacattccctatgggggacacatggtagcagcattagctttaatggaatctccagctattattatcggcttaattctggtgagagcatttgcacccaagacagaaggtgaagaaggattttcttggggaaaagtgatgcacgaagcttttttaaatggctcagtgtttctgttaattggtagtttgctagttggactattaacaggagaaaaaggttgggaaaaattacaaccatttactcaaggaattttctacggtgcgctgactttctttttactggatatgggattagtagcagccagaagaattaaagatctaagtaaaacaggttctttcttaattggtttttctgttttcattcctgttgtcaatgctatcttaggaattttgattgcaaaagtcttgggaatgggagaaggaaatggacttttatttgcggttttatgtgccagtgcttcttatattgccgtaccggcagcgatgagattaactgttcccgaatctaatcctagtctttatgtttctatggctttagctttaacattcccctttaatattattgtgggaattcctctttacttacaaattttaaaacttgttggtgtatagctcattagtcttttgaccatagatttacaaacatgaaattacaaacatcagaaattgctgttttctgtccaataggtattagtctaggtgttatttatggaactcgttaaccgagtagaaatcattgtcagcaccctggaacaaagagaagttatagatatccttaattctgtgaaagttcctggatatacattaatagaaaattcttacggtaaaggggatagggggatttgttataacgatttggggcgagaatttagcaatagttatatttctactatttgcaccaatcaaatacaatttgaatacctgctcagagatattttacccatcctcaaaaccattggtggtatttgtttaattaccacaagtaattctctgatatcagataccttttcccccaatctaacaagtctaaatttatcaatccctattatgcaagaagtccaaaaagtagagattgttattgatacatctcacattgaagatgctctgaacattttagaaatcgtctctgtttctggatatacaattattaaagatacctctggtaaaggtgatcgaggtttagtatcttccgatattgactatgaatttagtaatagttacattatgacagtttgtaccaatcaaaaacaattagataatttagtggaaaaaatcacccctctgctgaaaaaaatcggaggtgtgtgtttagtaactgatgcaaaatgggttaatcactaaataattaaggagtcaggaatcagaatttttgatcaataagtagattattaaatttctaggatgttgcagataccaaaagaataaaaacactaaaacgaaaatcacatgaattctacaatgccaatgaaaagaattatcaaaggactgaacgaatttcaaactaactatttcacaattcatcaggaaatgttccgccaattatctcaaggacaaactcctgaaattctctttattacttgttctgattctcgcattgatccgaatttattaacacaaactaaaccaggagaactgtttattattcggaatttgggtaatattattcccactcatggaagtcctaatagcagtgaaggtgcgggaattgaatatgctgtttctgctttaaatattaagcatattattgtttgtggtcattctcactgtggtagtatgaaagcactcctacaattaaataatttatctgatgaaatgcctttagtttatgattggttaaaacgcaatgccgagtctacccgtcgtcttttgcgagaaaactatcaaaactatgatggggaaacattgctaaaaatagctgtagaagaaaatgttttaactcaaattgaaaatttagaaacctatcctgtgattcgttctaaattacatggtggtaaaatatctctccatgcttgggtttatgaaatagaaacaggacaaatttttgcttacaatgctaatgatagtaagtttgtgcctttaagttctgacgctttccctgttcccgatcctttagcttgtttaaaagcaggttaattgagaaaatatttatttaatatttattttttgatgaggtagaaaagttaaagttgataaatacataaactttggatttaaaaaatcaatttttatcaattaattcaaagtttatctacctcattatttgattttttttaggaaacatttagccatctaccatcaaaatgaaaaattacgtaaattcagatttttcagataaaatagctgaagaaaataattacctaaatatagggagtcaatggtttttacgcacaccagaaagagcattagaacaagcatataaaatggctttaaaaattaaagatattgaattagaacattttgcaggggataaagtatctagtcagtcaggtgattacagtcaaaatgttttagattgttttcagacagatgtggaaaaatatttaaagattattaaaatcagagttgtagaatttaaggtgagtcgattttttatcaaaaactctaattacgcttttttggataaactaaaattaattgatgaagttctctccagatacaaaaatgaggatttagaattatctaattctaatgttgtagcttattctcaaaaaccaactcttaccaagctagaatctcaccaacaaccaccaaaaaattcctctcaactaacatcaaaactcagtttagaaaatattgaaccagtcaccaaaaaaactggtatttttcccagatccattggtagaacatttcgtaaaattaccaatgatatgagtccaagttctgaacaggaggtattgcggaattttcaagcatcgagaaaaattaccaaacgagctattaactgtttgttgttattaattctcattcccttgttaactcaagaattgtctaaaaagtttttcatacttcctgctgtagaacattttcgcagtgttgaaagtacacctatttttctgaactgggaaatgaaagaggaagcactaaaagaattgcagtcttttgaggaagaattaaaatttgacaatttattgaaacattctcctcaaatttctgccgaagctatggaagaaaaaatttcacttaaagcagaagaattagcagaagaatttaaacataaaagtaatagtgcagtggcaaatgtttttgcggatttattaggtttatttgcttttgcagttgtggtagtcatcaataaaaaaggggtgatagctattaaaaatctgctgaatgaaattatttatggtttaagtgatagtgccaaagcatttatcattattttattcacagatatttttgtaggtttccattctcctcacggttgggaagtgattttagaaagtattgctagtcatttgggtattgccgcagatagaaatgctattttcctatttattgctacattcccagtaattctagatactatattcaagtattgggttttccgttatctgaaccagatttcaccttcagcagtagcaacactgaaaaatatgaatgaataggtaattaattgataattgataattgataattgacaattgtttcatttaaggtttaaaacctcccctttaaaggggaaaaaaatttcccgtgggttgcgttatctcgtaaccgaaattacaatatcaattattttgtaacctaaccgagtagtattgactgataacggataactgataactgataactgagaaatgacaaatttacaagaacgcggacatctactcacagaacaagtaaatcctaatagtctgaatttagaccaactaaactctttggaattggtagaattatttaatactgaagaccaaaaagcggtagttgctgttgccagtgcaaaggttcagttagccgcagctattgaaaagacggctgaacgtttacatcaaggtggacgtttattttacatcggtgcgggaacaagtggacggttaggggtgttagatgcggctgaatgtccacctactttttgcacatctccagagttggtacagggtattattgctggtggtgcgggggcgttgttacgcagttctgagggtttagaagatttagcggaagatggtgaaagtgcgatcgcccaacacaaaattaatcaactggatgtagtcgtcggtatcactgctgggggtactactccctatgttcaaggtgcattaaaagcagcacgtcaaaggggagctttaacagtttttatcgcctgtgttcccgcagaacaagttccctttgatgcagatattgatattcgcttgttaacaggaccagaaatattagcaggttcaactcggttgaaagctggtactgcaaccaaactggccttaaatatcctttctaccagcgtgatggtgaaattagggaaagtttacggtaatagaatggtggatgttgcggtaacaaatcaaaaattacgcgatcgcgctttaagaattttacaagatttaaccggtttaagtcgagaagccgcaggtttcttattagaacgtagtggtaaatgggtgaagttggctttattaatgcactggacaaatttagataaaaccgcaggtgaggaacttttagcagtgcataaaggtaatttgcgtgtggctgtggatacttatcacaggagtcaggagtaataccttgttatctcgtttatctcgttatctcgttcccagtctccaactgggaatagacctctccaaaatagaatgtattaatttgtcataagttgtaggggcgaagcatttgagcgataatttaacagaaaaatcagacatctagatatcccaaatgtattaatttgtcataagttgtaggggcgaagcatttgagcgataatttaacagaaaaatcagacatctagatatcccaaatgtattaatttgtcataagttgtaggggcgaagcatttgagcgataatttaacggaaaaatcagacatctagatatcccaaatgcttcgccctgcccccataaataggttccataatttcttttctggagatgtctaatgtctgtattccttccctgttccctctcccaaatataaaatttattttgcacgactacttattacaaattcttttttgacaatgtttcaatcttctgggcaaaatatatctcttgatgtttaagttgtctggctatttctaaccctttttcaaacgctgctaatgcttttccctcttctttcttttctaaatacatttctcccatttgatcataagcttgcatcaaaccataaaaattagtcgctaatgtttccgtttccaacaaaattctactagcttgcaaagcttcattaatttgattttgggaacgatacaacctaattaacttttgcaaagcttcactagcagtcacatactgttctaatttccaagcagtaacataagcttcttgataattattaaaagcttcttgcagaaaattgggattttctctgaccaaaaattgataattttctgctattttgatttttaaagccggaacttgagtaagattgttatttctattataaattgccgctaacttattcaaaacattgatcgcttgtcgaggttgtttacccagttcataaatataagctagttgttgcaaatatgctaattcattgtttctatcacctctattaatagccaaattgagcaattcttcgtaagttttagcagcttgagaataatcaaaccaacttaaatgtaattcccccagagtatttaaagttgctaattcagtattaacatctttttgttgtctcaccaatgttaaaatctgctcgtaagcacctacagctaatttgggaatacgcacattttggtaagcttcaccaagcgatcgccataattgtaaatctgtacttttctcctttaacatctgtttttcaatctcttgcaaccgcttagtaatatacattacctgttcacgctcattttcctgccacgcgatcgcccccacccttgataaagcttgcacctggactaaagaacctaaaaagcgccgcagtcgtaattctctattccaaatatcaaaagcagcggttttatctcccctttgaaaagtcgttatcgcttcttggtttaactcatccagtgcagttttcaactgttgcagttcgtcagtagttaacggttgttttttccatgaactccttaccagaggatcaggtgtagtcatttccaaaggactcggaggaaaccacctcatttgttctggttttttattttgtgccagtgtgacaaaactgcacagatgccagacaataatagtagtaactataaaactcaagcgtcttaccataaacaactcacttttttcttgtcctgttgaaaatagtctagaaaatttacccgtcatatcttgtaccagcatcttcttgctaatatcccagttaacatcctagactttaaccctgattatggactaagatgatcattactcacctgacatgattgagaatcataacagatgtgagattaccagcttatttgacgcacacctatttattatgtttctcaatcattcaattttagattttagattttagattttagattttagattttagattttagattttagattttagattgaatcacaacataaatccctattccctatttcctatgagtaaaataattcctgccatccgagttaaaaattttagcttttattacggaattcaaaaaatcattgaagatgtctcaatggatattccccaaaataaaattaccgcgattgtgggacctagcggttgtgggaagtccacatttttgaaatctctcaatcgcatgattgaactagaaggagaaatacaagttgaagggaacattgaattttttagtcaaaatatttatggtcgtcgtgtcaacttaaatcgcctacgtcgtcaaattactttaatttatggtaaaccaaatctttttcccatgagcatttatgataatgtaacctatggagtaaaattaatcggatggcatcccaaagcagaattagatgaaattgtcgagttagcactaaaagctgccgaactctgggaagaactcaaaaataaacttcataaatcggctttagaattatcctttggacaacaacaaaggttgtgtattgcccgtgctttagcagttaaaccgcaagtcctccttatggatgaactttgtgcaggacttgatcccatttctaccatgaaaattgaggaacttatcgaatgtttgcgttctgaattaacaattgtatttgtctctcacaacatccaacaagtttctcgtttatcagatttcacagctttattttactacaataaaaatcatattgggcagttgctagaatttgcccctaccaagaaacttatcacccataactttgattatcgcctgcgagaccatgtttttgcacgtttccactaaacctggtttctatcatatagtgatccgatttgattcatgaatttttcgtagaggcagggaacgcttaattgataattcataattgataattcataattgataattcataattaaatttatactttactcagggacttaaacattacctgtaggatacacgacaggggaataaaaccctttttaattattaattagggtttgctgaataaacctaaaaccttgatatatcaaaggttagaggctgataaacacagaaattagtccaagggttttgaagggtataccggaaaaagtgtgcattttttgggatttcaagagatggcaaagaaattttcaaatctcctcctgactcctgactcctgactcctgactcctatgccctcacggaaa

SEQ ID NO: 34 - DNA, 51136 bp, Sphaerospermopsis sp. LEGE 00249
  LEGE00249_49
caccattttctatataatctattactttttgtcttaaatctaaactataagccatgatttctactcccataccttctctcttcaatcttatactctttttgtctcattcttaagttaaactactataattaattaattaattattgactcagcactattgaagttactttaaagcaactttcacattaccaacggaaacttcctgttttgctgcttccacagctacggaagtggatgcatcgggtcttcttaaccacagtgctacagcaggtgcaacgccaagtaacacacccagcaatacagggatagagaagccagcagccaaactcatgacagtggcaaaaccaaagttagccaaataaactactaaaggaatattgagttgcgatcgctctaatttaatggggttgtttctccacaacagcgccgctactgtcataaacactgaaccagtacccatccaaccggcaaagttttgataaggcattccaaagaaagcaccaggttgttgccaataccagaagggaagagaagtttggctcattgccggatcaagtacaaagtcccaagaagtgagcaataaagcaccgagagcgatcgcccctaaatgacgtaataaactgggttttttatctacctctaaacctacacgcgccagcaggtaagaaacacatcccacataaaaccaagacaaaggaatagtaaacggtactaaacccgcaattttataacccaaaccactcaaatagctgtagtgaccaaaaggaaaacctgtgctagttcccaataactcacttgtcaaagaaatggacaccgaaggcactaaaaaacacaaagcccttcctaaacccaaatttcggtacgcatacaggaacacacccactgcacctaaaatcatataggcaacaccgccaccagccatgctccactgcatgacagtctgaccgacctcagataagctcaaaattacttcggcattaggaataaccagtaatatccctaccagtccaaacaccatggatacgatatgaccaatcaggcatacgcgctcaacaataactagttgtctcatgatcagtccttaaccttcctaaaatatgacataaggatactcgactgctaatagtttacaaatgtttaagatcataatttaactaatttttaagaaataatccgggaacattgaaagttcatttggtttcatgctcaaaaaagtataaatacccagaagtcgggagataggaaaattctttacctgttcccagtccccagtccccagtccccagtcacctttatgtcaaacttgcaaagaattccctggttttccctcacactattacttctaagttatagtgcgttaggctgggtgatatcagaaaccaaacccactttgtttgtgtggttaatagttgtatttggtatcttggtattactagccagcttgacaactccctggtctaaaatggtacagtattacagtatattgtccaaatctaatatcaggaattttggtatcaccgttttagcagcttttctattctttttaatgctcgcttggtttcgcatatttcttgatcttttacttatcctctcagcgactatcttagccaagatagactttcagtcggctgagttcaaagaaggtctaggtttttggctgacatctatatttgcactctctggtttaggcgcaggtgctttattacacaggtttatttaaatttaggaggcaggagtcaggagttattaatttttctctcctgttccctgttccctaagacttaacttgctaccgcttcagcagcgatcgcgggataaacgctgacttttttgcggcttttgccttttctttcaaaggtaacaacgccatcaactaaggcaaataaagtatcatcactgccaataccgacattgttaccagggtgaaacttagtaccgcgctgacggacaagaatatttcctgcaagcacagtttgaccaccaaaacgctttacacccagacgttgagcattagagtcacgaccgttgcgtgtactacctgttcctttcttatgagccatgatttcctcttctctttaatttatctacttctgtttattattcagcagcagcttcttcagcaggtgtgctatctaccagattaggagattctggggtagttggtgcttctgcgtgcgccaaaacttcaccattgagtttgatggagttaatcaaaagtctggtaatttcctggcgatgtccccgttttttgcgggttttcttcttgggtttcattttataaaccaggactttacgacctctcaagtgtcgcattacggtcccctctacagtcgcacctgctactcgtggctgtccgatagagactccgccctcgtgctgcaccagtaatactgcgtctattgtcactttttcatctggttcggcactcagcagttcaatgtcgtaaaaacgacctgcttcgacttttacttgtttgccaccagtttcaataattgcgtaggtcatgaaattgtccttgaagttgccgtacaggtagctggcttccatctcttgtagagacttgatttatagctcttgccagcttttgcagtgtgtctacctgatccgagcaggaataagacagacaatctaatatattatcttattgtgtgttattgtgtcaagcttttagaaaaatgataataaataaatttggctgaaaagttggacttgatgacccatttgggcaattgttagattttggcggatttttttgacctatttttgccctgtggatataatacagtgtagcgtttaataaatccaaataaatccaaaatcctcgtcaagacttttacctagaaaattcatacaattagatttctacaaatcattaaacaatgatatcaggatttatgcaaagaatcgaagtggaacaaagaacaatttttattggtttagcaggtagtcacggatatggtttaaatcgccctgattcagattatgattatcggggtgtatttattgcacctaaacgttactatttgggttttgatagtatagaacaaaaagatagtggttgggatgaaccaggaatatttccgtttatagatggtaatcaagatacagttatttatgaattaaggaaagtattacatttattagctggtgcaaatcccaatgttttagaattactgtggttgcccacctatccgattttaacagatgtgggacaacatttaattaaccatagaaaaatatttttgagcaaaaaagttaaacatacttattctggttatgctttcgcacaaatcaaaaaaatggaaactcatcgcaaatggttattaaatccaccggggaaaaaacccatcccctcagattttggtatcgaagatgaagcaccattgagcaaagatgaactcaatgcttttttagaatatctttatttattaattcgtggcaagatagaatttttagaagaatccgagcaattatataaattgctgacagcagatattgattttaaaggaatattaaaacaatatgctttaaatgatgaaactttggcatatactcaaaatttaactcatggacgtaaagattttattcgcttattgcaaaaaagtcaaagttaccaaattgcgttaagagaatggaaagcttatatatcctggcagcaaaatagaaatcctgctagagcagaaatggaaagaaattcaggttatgatttaaaacacggaatgcactgtattagattactgcgtagtgggttagaaattttacagagaggagaagtaattgtagatagaagaattgcgggggatgttgatgatttaaaagctattcttagaggtgaatatacttatgaagagttgatgaaaatggcagaaaatttagttgctcaaatggatattttttatcaacaatcaactttaccacataaacctgatttagagcaaattaatgatttatgtatggaattagtagaaatgcagggatgggaataaagggagtattcagcgttctgtttttaccttgtaggggcgaagcatcggacggaatatgaactggtttcagcgataggttatcgcccgaatgcttcgcccttacgattaatgaatcggtgttctagcgaaatgctgacaatttgaattaaaataaaatataaaattgttaaatctgtaaataatcagcaatgaaaggatcattttttagtcgtaacaccagattaatcagccaaagaattatagcatcctggcattcatttaatcattggtttttcacaactccagaaagagctatactagaagcttatcaagctgctcaagctattcacaagatagaaatagagcaatttggaggtaaaaaaatttctgccgaatcaggtaattatagtgccaacgtgatggctttttggcgcggagatttaaatagaaatttgactattattaaagtcagactagcagaatttaaattaggtcttaacattgctgatactgccgattcaaacttattagaaaaactcaattttattgataaaattatctctaagtatagtacacaagatgaagcaattacagaaacgttaagcattaatcttgaacttaaaactgttaccaatcaggcaaattcagaagaaactgagattattaaagaaccatctgcaactcaaaagaaaggtatatttcccagatcaattggtagaacatttaataaaattgccaaggattttacaccaacagcagaagaagagtttgttagaaattatcgaacttctagaacgagaacaaggagggcagtgagatttttattactgctgattattataccacttttaacgcaacatttttctaaacaattattattaaaaccgatattacagtattttcagagtgaaaatacaccaacaatttttttgaactcagaaatggaggaaaaagcactgaatgaattaaagagttttgagagaaaattgcaatttgaaagactacttcgtcaagcaccagaactttcaccagaaaaaattaaagctgaagtaaaaaacaaagctatcgaaatatcagaagagtttcgctatcagagtagtagtgctatcagtaatgtatttgctgatgtgatatcactaatttcttttgcgatggttattgctttgagcaaaaaagatattgtttttattcagtcacttctagataaaatagtctacggtttaagtgacagtgctaaggcgtttttaattattttaattacagatatattcgttggtttccactctccacatggttgggaagttcttttagaaggtgttgctcaacatttaggtttaccagcgagtagaaatgccatatttttgtttattgctacatttccagtcatattaaatactatatttaaatactggatattccgttatttgagtcgcttgtcaccttcagcattagctacattaaaagaaatggatgaataatttatcaatcataagtcaagatccacgacttctttgagaagttgggtatctggatgatctgtggatgatctgagtttggtgatcttagtaattttgtcaagctcccaacaatttttcatgaatacataaaaagatttagtgcataaactccagttttctgctaataattgaggtgaataattgctttggttttgaaaaaaagtgattattcatacagttaaatgttaatattcagcattaactctaggataaaaatcaatttagaagtgtagttaccgaattaggcttatgaatctcttattcaatcgtaaattccaacttttatcaggtatttttgctttcttgctagttattttcacgcatcaaaatatatatgcacaatcagaaactcagcaactaatatcacaacaaacaaccacacaaaatcaacctaataaacaagatacatctatattttattctgtcattgatgaatggcaaaaatataaatatagtgttaatggtaaacacattttaaaacttgtgaaattaccaacagctaaggtgaatttcaatcaaaatgatttattaactgttctcactaatacgagaaaatattttcaagattacaaggaaaatgatcccaatatttctcggaatggattattattaagtcaaggtgtaacagtcgaagacgtgatcaaaaccttagattttatgattactgttttagaggaggatattagcaagaatcgccagactcggttacaagatcctaattttatcaatgctaattttcgtgtgattaaatggtcagcttataatcccgaaaacccccgacaaaaacaactgagaattacaaaatatgctgtttttacccatactggttctcataccaaaacagctaaatataacataccaatttatagcttaaaaaacgatttagctggtgataaattctacaccaaatatacaaaacaagatgttttatcggggatttatgaaccaggtggtaaagaatatggtaaagtcgaacctttggcttatctcacccgtgaaggtttagaagaagcattaatgcagggaacaattttgattaattttacagatggaacaaaggcattttttaatgtagacagaaacaatggaatttcttatgttagaggattaaaagccacagcacaaaagcgttattggtattttcgacaagttgatgcaattaaaggttatggatataagattgatgcgaaaatttccattaaacctggtgtaacttttgcgggagatgtgctaaacattggcttgggaagagttattatgatggagtataatcaaggtggaagtaagcgactacaaatgggggtaatagcagatacaggcggcgcatttttacccaatttagatcaattagattacctggcaggtatttttaaaaatcaaacagaatttaggcagtatattcgcaaattacctgaatatgctactgcatatattttggttaagaagtgaaaaaagttaccagcatttagttataagtagtcaaaaagagacacaaaaaaattaaatacaggacttacgcaaaagggaacgaaagtaggggtaattcatgaattacccctacgcaagaataaggtttttagtcatatcttgcgtaagtcctaaaataattgacaattgttaattgtccattatcaattgatatcgctatggcagtgctaaaaccctaaaaaatatatgtagtttttcttgctaatttttaagatttgttgtataattataacagttaatatactcaaagccactggctaataaatcaaaaaactgaaataaactgaaataaattttatgtatcaatttttaaaacctgttgcattaaatttgttagcactgactattgttttgatattgcaaccagatgtagtttttgcacaggaaaatgtgaatatatctgctttcaatccccaagctattttaaaagatgctttacaatggattgatagtcttggtacagtgggagcaatagcttttattgctatctatattatggcgactgttgcttttttaccaggttcgattttaactttaggtgcgggtgttttatttgatgttttttggggttcggtttatgtatttatcggtgctactctaggtgcaacagcagcatttttaataggacgttatttagcgagaaattgggtgattaaaaaaattgcagataataaaaaatttgctgctattgataacgctgtagggagagaaggtttaaaaatagtgttgttaacgcgactttctcccatatttccttttaatttattaaactatgcttttggagttactgctgtttctcttaaagattattttcttggttgtgtggggatgattcctggtacaattatgtatgtttatattggttctttggctggtaatttggctttaattggaacagaaaatcaacctactaattctactctcacatgggttattagaattgtcggttttattgccactgttgctgtcacaatttatgttactaaaatagctaagaaagctttagaaataattgataattgacaattgataattttttcaaaaatgttaaatacacaactgacaaaattttctgaaggctatatgtattgtaaatacaacaccggattaaattaaaacgacaatcacaagataatttatactacatttttagaggcaatattaatgtctaatttagaatttgaaagaatcacagttttaccaatggatgaatataatcaaagattggtagctaatgtacatcctgaaaattgggtaaatccccaacctgcggaatgttatgatttagtagtaattggtgcgggtactgcgggtttggttgttgctgcgggtgctgcgggtttaggtttgggtttaaaagtagcattaattgaaaaacatctcatgggtggagattgtttaaatgttggttgtgtaccatctaaagctttaattcgttcttcccgtgtagttggtgaaattggcaaagctaaaaatttaggtgtgaatatttcccaaaattatgatgttgattttgccacagttatggctagattacgtaaaattagagcaggtattagtcatcatgattcagcagcaagattcaaaaatttaggagtagatgtttttttaggaagtggtaaatttgctagtaataatactatagcagttgatggacaaattctgaagtttaaaaaagcggtaattgccacaggagcaagagcagttaaaccagaaattagaggtattgaagaggcaggatttttaactaatgaaaatgtattttctctcattcaaaaaccagataaattagcggtaattggtggcggtcctattggttgtgaattggcgcaagcttttcggcgtttgggttgtgaagtgacgttatttcataaaggttcgcatattttaaataaagaagatcgggaagcagcggaaattttacaaaaagtttttagtgatgaaggaattagattagttttaaattgtcagttagaagaagtggtgacagtaacggaaggcaaacggctgtatttttcagctaatggaaatcgagattctgtaactgttaatgaaattttagtaggtgcaggaagagcgccaaatgtggaaggtttgaatttagaagcggtgggtgtagagtatgacaaaaagcatggtgtcaaggtaaatgattatctacaaactaccaaccctaatatttatgcagcaggtgatatatgtatgaattggaaatttactcatgcggcggatgctgctgctagaatagttattaaaaatacgctgttttcgccttttggtttaggacgttctcaactcagtaaattagtaataccttgggtgacatataccgatccagaaattgcccatgtgggaatgtatgcagaagcagcggaaaaaattggtttagaagtggcgacaattaaaattgattttaatcatgtagatcgagcaataactgatagtgaagaattgggatttctaaagatttaccacaaaaaaggaactgatgaaattatcggtgcaaccattgttgcgagtcatgcaggagaaatgatttcagaacttactaccgctattgttcataaaattggtttaagtaaattaagcaatgtaattcatccttaccccactcaagcggaagcaattaaaaaagcagcagacgcttatcgtcgtacactactaacacccagaactaaaagacttttgaaatttttaactaagttttcttgataggtagaaatttaatcaggagcgtctatttttttcctgttattaaaattattctcacttctgactcctgtaagggcgaagcattcgggcaacaaattatcaattttctgaccaggctattttccgaatgcttcgcccctacgacttctaacttttttaaagttctgattctgtttcaggagcaataatttcaccagtacccattcttaaaatcatatcctggtcagtaatcagttcattcaattctttaacttttaaattcatcagttcacaagctatgcgtaattcctcagcaaatgttttaatatcatcagcatagccacagtgataagcagcaattttaatgccttgtttagcatttgctctagcacaatctactaattctgtaccatgtaattgtgttggcgataccatagatttagttattattgattatacaattttccctaaatagattatcaatttctgtattttaaatcatccctctaatggtagaatatagagaatataaatacccaacttctccaacgaagtcgggtatctaggaatgagtgattcaacaatggacaattaacaattacctctccttccttacctggaaatgaaaaaagagataattttaaaaccggcaatgaaaaaattgtcaattatcaattatcaattgttaattatcaattactaaaaataaaccttggatggaaattatcgatccaaggtttactttttgcttacgctcccactagtctttggcaatttcagacttttataccccggatatttgcaaactaatatttgcaaaatgcgctcatttatggcaaatgggcgcggatttttaagcttcctcctcacatctcacacgctcttaatccaaccactgaaaacaagtacacaactctctgttgatgcaggatttatccttgacatctgctcttaatttaactattctctcctggttgtttatcgttcccaagaaataaagaaaatgttaattttatcaaccctaagatacagggtaagctcatctaatttggtataaaataaacttgacaaaagaaaagggatgtagaggaagtgcgatcgctgttttgggttttggagggagtgcgatcgctgttggggttgtggagggtgcgatcactttttgaacccaccttccgcaccctaaactgttacacaacgaaaaatggtcatttggggatttgagattggcgaactgcttgcagcagcgcttcgctatcgctacctaaactttagaccattttgtattaaaattatcctcaaaggtcttcaaaaatccgaaattaccgattgtgacactggggggtgcggaatgtgggttacatagcgttaaaatttattctgtatccagtcccgtctgcttatactcacaaaaaattctcctttggatgattgatacatacacccacaggagaaattgtacaactgttttatttattttccaacttttttatcatcctacagcaaaatatcaactattccaccgttactgacttcgctaaattccttggctgatcgacatctaaaccctttctcgccgcaatatgataagccaacaattgcaacggaataactgtcaaaataggcgacaaaatttcctctacatcactaacaggaattaaatcattaaaaatttctgctgcttctccatcattcacagatgtcactcctattaaccgggaatctctcgcttttgcttcttgggcattagaaatcactttttcatatacacttccaggcatggcgatcgccactaccggaactttactatccaataatgcgatcggtccatgtttcatctctcctgctggatatccttccgcatgaatataactaatttcttttaatttcaaagccccttctaaagcaataggaaaattaattcccctgcctacaaaaatgaaatcttttgtttctgtaaactcatgaactaactgttcaatatatttttcctgagtttctaaaatcgcctcaatttctatcggtaactgccttaaaccagcaataatttctgttaacctttcagaagaaattgtttgccgacgataagctaaatctaaagctaaaccataaaacgccatcaactgagcaataaaagttttcgtcgccgcaacaccaatttcaatccccccatgagtattaataatattactcaccatttgccccaaagtgctttccgggcggttagtaatccctaaaagtcgcgcttgatacttagcttcttttccttgtctgcggtctttttccatacttaaagcagccaaagtatccgcagtttctcctgattgagtcaccccaatagttaaagtattagcagtcaaaggtgtaggcgcatagcgaaattcagaggcatattgtatttgagtcggtatttttgccaattgttctaataaatacttaccaactaacgccgcgtgccaacttgtaccacaagccacaatttgaatttgttctaaatctgcgtaaaattcctctgctaaattcaaactaacaggagtttccccacttcccggaaaataagcttctaaacaagctctaactacacccggttgctcataaatctccttgagcatgaagtgtttaaatccctgcttttccaccataatgggattccaattcaaagtgcggggatgcttctttaaacgatttccagcaaagttgtacacctcaacccccaacggagtcaaacgggcaatttccccattttctaggggcaatacagcgcgggtatgggcaacaattgccggcgtgtccgaagcacagaaaaactcaccttgtccaaacccaattactaaaggcgcttgctgacgcactacgatcaattcatcagcgtagtcagcagaaataactgcgatcgcataagccccttctaactttttcaccgcttcccgcaccgcttctaaaaacacagaagccgaattactatcttcaggaatatgctttaaacattcagcgatgagatggggaataacttctgtatctgtatctgaacgaaattcatgtcctaatgcttttaaattttcccgcaattcacgataattttcaataattccattctgcaccaccgctatccgcaaagcagtatcctgatggggatgggcattatattcttctggtttaccatgagttgcccaacgagtatgaccaataccaatttgagcagggttttctacttgttccagtttagaacgcaaatttagtaatttacccttagcccgcacgcaatggatatcaccttcccatatcgtagcaatacccgcagaatcataacctctatactctaacttttccagtccagataataaaatatccgttgctgcttgagtgcctatatatccaacaattccacacattttttatactactccggttattagttaacaattatcagttaacagttatcaccataaagcggtaattatatcaaatcaaaaggctggggactggtgactggggactggggaaatatttatctttctcctgcctcctgaactcctaaaaaatattaagtgctgaaaactgagagaagaagcaagaatcgtgttagttgatggatttcttgtttctccctagctcagtcttcagcactattgtactgagtattttaaaataccagctttgttagtatgctagacccatgctgcgagttgtttcagcacccaaataaacgcggatgctcaaaaagtcggtggggcaagctgtttcacagcgtttgcagcctacgcagtcttctgtgcggggtgaagatgccacttgagcagctttacagccatcccagggaaccatctctaaaacgtcagtgggacaagcgcggacacattgggtgcagccgatgcaggtatcgtagatttttacggtatgagacattgaaaaaactgctcctttcgagttctcttctttgggaaggaatcataatcaacgcatagtttaccgcagtgctggatgggctgtaagtaaaaggctacataacttcaaacaatttaataagccctatgaacattttatttgccaaaatcgctgctattcagctttaatcagcaacaggggcatcaagtgtttactctattgactgtctccaaatatggcaaattgtaaagatgtgtaaatttccgagcaatttctcagggttatctatagtacctataaattggtcgctggtaactctcaagttcgatcaatttgttaagaagtattaactaattagatacaaaattgcacaaaattaaatgcgctgcaattttctatcaatcatcaaatatgctatgtttttttgacttattttacgtaatattattgtaaagtaagatcaaaattttatctcaggagatcaaggagtcgtaggggcgacgtaggggcgacgtaggggcgaagcattcggaaaataacctgtgatcaaaattgagaatttatcgcccgaatgcttcgcccttacaggaaaataacctgtgatacaaattgagaatttatcgcccgaatgcttcgcccttaaaggagtcaggagaaataattatagtaaagtaggaattgtgcgtcgctatctatctctgttacacttcaaaacaaattgttaaattttttattaagatgcaaattgctcaaaaatatagtaaatcattaatgataatccagccctagtcacctatggtagaggttaattcaccgattacgataccatttttaataatgtaaatcccatcacataaactgattatggaaccagactctttaccaactgagttgattttaacaaacccgcgtcagtctcttggtagattacaacttgattggacaccccaaccagggaactatgttgattttgaaggtaaaacctatgcagtattagagcgtcgtcataggtatcagttgaaagcaggacgctaccgtctacataatatcgctatttatgtccaaaaagctaaacgaccatcagaaaaaagtttagtagctggacgttgggttataggtgatgctagttgtgattacaatgctcattcagaaatcatccgctgtgcagtcaacccagatggtccttgtgagtcttgtcggttctatgaaagttcaggtgacaggtgacaggtgacaggtgacagtaagaaggtaagaggcaaaagtttattcttcccaattacccattacctcccctatggttaaacgagtaccattaacaaagtcccatcctgactggagacgtttaccagttggttgaacttctcttaaccataacaacccttccccagtttgaacaattgctcctatacctttggcaatgtttactacttcgccaggttgggtagatacagttgacaaatctggtaaattgtgtattttatctcgtaattgttctgggagttcttgaatataagcacgttcaagaggaactgtagcagtgattttcaaaggttgattgcgaaaagttgtgacgcagttaggataaaagcctctaatttgattatgtaatttaatggcactttttgaccagtctaggctatagtcttctttttgaatcaatgacgcataattggccagagaatcatcctggggaataggtgtaatttcctggcgttcccattttaataaagtttccagcaataaatctgcacctataaccgctaatttatcggctaaaacttgggcattctccagtaaaccaattggtgtatttgcttttaatagcatatctcctgtatccatgcccacatccattaacatggttgtgatgccagtttctttttcaccgttatagatacaccactgaataggagcagcccctcgatattggggtaaaatcgaaccatgtacattgatacaacccaattttggcatatttaagattttcttagacaaaatttgtccataagcaacaacaacaaacgcatccgcatctaattgttgtagttggtttaaagtttccccatcttttttaactttctcaggttgccatactgggagattgtgagcattagcaagtgttttgacaggagaaggtgttagtttattcccacgttctcgtcgtttatccggttgagtgacaactgctaaaacttcaatatctggataattcagtaatttttctagagtgggaacagcaaactggggagtaccaaaaaatacaactttcattattaatttgttgcgagtttttagctaggatttactagtgaatattaaatgcgtcacgattcactgacaactgacagcccacaacggactaaatcacaataaccgtgaaaaagacgcaaagcaattttgctttgagtacattaattttcgctatttaatggtagaatgtttattataggtgctacaaaaagttcctgaataaaatacaacgacccaaccagtaggttaaccaagatcaatcactgattgtatctgctgtttacaggttctaatcttttgtattatctcatggcaagacaattaagcatctactcacccagcttatctgaaataatttaccaaattcactttcttgcagttgagcgatcgcaatggatattttatttgattgcaagctaatttgtaactgctgaatttggtagagataaaggtgaggtttttgatgttgacccgactttgccaaaattttaaaggaataaatcagttttagacttgacactctgcgtcctaaaggagcggagattcttgattcaacgagtccacttagactagatcccttgcagtttctaatccagaggtggttctctcctcaagcgttacttagggaatgccctttcctagttggatgattccaaattttgtttgagtttaaattctgtgtcgtgtttcgactacttcgactacgctcagtacaagtgcgctcaacagaagtctagctcccatttagccgcgaagcggcttcccgaagggtagattttacctattcctagtaaggaactagaactatggaatagaacccaccaatcttcagttgtcaaggtatcgattgccgttaggcagttatgtttttatacaggttgattaccgttcctgttaaaaaaatctaccatgactgcccatgaaggggcaatccgttcgcctacatccactgttccttagtacgataaagtatcaatgccttgctccgatactttatctcggtagttttggctcacttgattttcttatcaacctgaaggaatgaattagctcttgctaaaacatttttatcagaataaatgaatttaggcactagaattagtcacccaacagcgtagtttatatcctgtcggaaactcctatatttggttatacctatattgtggtctacctaaatataggcagtttttagatataaatacttatttagagaatccgaaaatgattaacgtcggtattctctgtgattatattcacctaaaaaaactaagttatttaaagaatgtaaaggggttaattgatgattagaaaacttttgtaaagtgatgcaaaatttatccagataatctcgttagagattctagtttgttgttatacatataatcatagctttttctcttcctgcatagacattgctcctcacacagccactgccccttagagagtccaatcatgctgaaatcccttttgctgtcaggatggttccgcgtacaaccattttttaagtacgttatcgttgttatattaattgctcccttggtaggtgtatcaattcactctagcatagcgaaacaatcacatttaaaagtaggaaagattagtacaggaattggccaatctgattcaaattcccaggtaacggctatagctgggaaaaatgatttaaagataggtaaagtcaactccttggaagcaaaatttgggaactttggatcagtaaacaagcctgtgagtcaagcaaaacaagtattacaggctgataaaattaattctggggcagtcagcgatattttagcggtagtaaaacaggaaaacttagcaaaaatacctactagtcagagagatttaattcaaaaattaaaagatgttaagagccaggctttacagggtgaggtaaattctttagaacgtgcgagtttagagaatgaggtattaaaaacatctgcaagcacatcaaatattagagaaccacagccatccacaatgatggaaatacccgtaaatgaacagcaacagcagtacgatacagtaccagatgatcccataaatagtcctcatccaattccttggaaatggatcatgatgactcaagaagctataggtggtaaagggggttctggagtgcggcactatcgcagtataccagtggtttctcctgatggtaggtatgcggtttatagccgagtgcaactggaaatacaaccggaaatgcacaacagccgagttaccagcttgttgtttatcgaagatcggcaaaccaagagactgcgggtgatgtcaaaaactgctgctgttggcgatcccctgttagatcaacagatttcagatcaagctgatacccaagggaaaataggggtattagttccggttagttggtcagaaaaaggcgatcgctttttagcccgcaaatttgtaggtatgttcaacacagcagacctgacagatcatgcagtaatttgggaacggcaagaaaatcatactcaaaccgttgctcctgcccaaggagaagatgagcatgagaaaatagcaatcttgttagggtggagtaaaaaacaacctgatcacgtgctattccgtgcgggtgaactaggggaagaaaattggcctttggtacaagttgccagtgatggcaaaactatcaatgtcagcaacgacggtgatcaacctgtgacttttgggacaagagatagacaggtttgggcagaacctcaagttgcgtctagatagttagtcaggagatcaaggagtcaggagtcaggagtcaggaggcagaagaagcaggggggaagggggcagggtgcaggggagaagatttatcccccttgctcccgctccctgctccttgtcttattccctgttccctgttccctgttccctgttttaagctgatttaaaaaatctaataatttcccgcacatgatccagaaattgcccatcagtagaaagttgagctatagcatttctggcttctctcgatattcgttcatgttcagtatggtttatcgcccttaattcttctaaactagcgacaacacgcgctaattctttacgggtttcttcactaaacctttggttatttgctactaaagaatagggttgttctgggttaagttgatcctctaaagattgaactttttgttctatttcagcaaaacggttacgcaattctaaaatatcttcacgggcataagtaaacccttgacgaatcattattaatcgagcatataaatattcgtaggcactaatagctggacgcagtaaagttaataacaaagctgcaccagaactgatatatcccacagcactaataccagtagcagccaaaatataaagagcgactgctgaaactaagtgtaaagcaatagccagccagagtgatcgcttggctaacccggatttctcacaagccaaaaaaaacattcataaagagcaaaacaaaggaagtttatttgctatataagtagggaagatgaaaaaaggaaatctcctaagtatagatttgatagattttgttaaatatcaagaagtattcaggtaaaatatactgatataaataattgagtattaaaattagacatgacaaaaaagagttaagaaaaaaacttttatccccaccctaaattaaagctaaaaatgagagtaataatcgtcacaaaagaattaaccaggatttggtaacaactgcaaacaacggtaagcagtagcataaatatgctgatagggacaagaactattaattgcaattaaaactcgccgggtactcacagtaatcaaagctcctaacttcaacaatttggtacggatagtcccaacttgagcattctgtaattcagttttaactaaacatttatttcgcaaagcattcattaaaacataagctatggaagagaaccacaaacgtagttgattaccagcaaaggtatgggtactggttctatcgctaaatagttctaattgttgttctttaaaacgattttccatctcacctctaggacaatatttctgggtataaacttcacttggaggcatattattagtaggaattgaggtaacaacaaaacggatattagttccctttgccccatactcaactttagttactacacgacgactacgactccaagatttatgggtttgatagtcaatagttttataccaagttgagttttctatcagatttgatgccagttcaggaagttcaatatctggaacaaatagagtttctaaaaaggaaactaccgtggatagcttttgctcaaactcttgcttggctttactttgagttagagtggtcatctttattaaacgactgttttccggcaacccaaatacataatctactttgatttgagactcacaccattccataatatcttctcgggaataggcgctatctccacgaactaaaatctctacattattccattctacacgtatttgtttaatgactctctgtaattctgataatgctccctctgctgggtctacattggaagccctaagtttagctgctaataaatgttttccacagaaaatatcaagtgaatgttaaataaatattaaactttaacttgttcttttgaagtttgcaaaattcttttaagagaattttctttgactatcatggcagcgtgattaatatctaaccatatcctttctctttgagatgcttctggccagtcttctaatacttgatctactggcaaccaaaataaatgaacccagtaaatattaccacgtttacgatatttataagcaccgatcttttcagtatttacccgaccaataacccctgcttcttcccaagcttctttagctgctgaatcaggtggagtcatccctttgcaaactcctcctttgggaattacccaactttgccgtttacggttagtgattaataaaacttctacttttccatctcggacccgatatggaatcactcctgattgtttacaaattttattggtttttctgctcatagaagtacattcctgatacattaacttctagattgtaattactgccatatctacaaggcgatcgctatggtcatgttgacaatttttactatatgtctttggttacatctttcacgctgttaattggttattccgtataatttttcaccaagtttgactattgctcctttgtgatggtatttcatatccaattaacaggataattatattgtcatgaaagcaaagccttgaacgtattactcgattatcttaattaaaaccaactccagaggaaagccatattggcaataaaatagtgtaattatagtgtcagttatgcaaactcaactgccaacattttggttaattgaaccagaaaaaccgccattaaagcagattatcgctgggggtgtgattttgccagatggacaaattgcgatcgtttgctgtttaccaaattctagtcatgctactttcccatctttcaattcttttcagcagttacaagacaaaagaggtaggcaaatcaaatttggtaatcactctttagatggatattatctcaatacttttaaattagtcagaaataaagatgttacaggtattagcggtactggtatagttgctgtaggttgttattttcaaagttttggtggtcttgctgtgatgcaatagatatctccagaaaagaaattatggaacctatttatgggggctgggcgaagcatttgggatatctagatgtctgatttttccgttaaattatcgcccaaatgcttcgcccctacaacttatgacaaattaatacattctattttggagaggtctaatggttaacagaatttgcttcaactgcttggtatattggcggttggaaatagaattaattcatggacacaatggtaaaactcaaatggtgatggattagcgaatttgtaagcattcatctatcagtaatcagtaatcagcttaaacctacgttaatttaacacctttcattgaagattggtatataatataaatcagttttttaaacataactaacaacataaaaactttcatggcagatttaatattagttccgggtgcaactggtggtgtaggacaacttgtagttagcaaacttttagaaaaaggtttgtcagttcgcattctcacacgggatgcaaacaaagctgcaaaaatgtttaatgacaaagtagaaatttttgttggtgatatccgcgaacccaatacgatctcaccagcaatgttaaatatcacttctattatctgttgtacgggaactactgcttttccttctgctagatgggaatttgattcatctatcaatcccattgaattagggttagctttttttgatcctaaattactggaaaataaagctaaaaatacacctttaaaagttgattttcaagctataaaaaatttagttgcagcagtaccaaaaaatttaaagagatttgtttttgtttcttcctgtggtattctcagaaaaaattattttccttttaatattcttaataaatttggtgtactggatgctaaacaagcaggtgaagacgctatcattaattcagggataccctatacaattattcgccctggcaggttaattgatagaccctatacgtcttacgatttgaatactttgctgaaagctacaacaaatggtaagttaggtgtaatatttggtaaaggtgataaactggctggcgatactagtcgaattgatgtagctgctgcttgtgtagaaagtttgttttatccaagtgctgctaatcaggtttttgagttacttaatcaaggagaaagaccaaatgtaattgattgggaaaagcttttttatcaattgacaattgacaattgataattgtttcattcaaggcttctgccgtgagcgtcagccgatagcgtagcgtggcgttagccatacggtttaaaacctcccctttccaggggaaaaaaacaaaaaaaatccgctttgtcattgtcaattgttaattgtccattattgaaatatccccaaatccttgattttttctgagactttgaggatatatggattccaatactgctcggttaaggattttcgtaggttgggttgaacaaagtgaaacccaaagaacccttgtaaatgttgggtttcgttccttaacccaacctacataatttatttttttgagcttaaccgacaagtattgatatggattctagttttcaacgaatttcaaagaatctaatcttcctaaaactgccatatcttcagcatccaattctacaggtataccactacgaattagttctgaaaagtcttcattaggaaccataattgttagtgtgtaaagacgatttttacctgtatttctaatcaaatgagtgccatttggtggaactaataaactatctccggccttgacaggtacttttttaccatcacaaattgcaactccttctcctttgagaataaaaaacatttccactgcccattgatggcgatttggtggagtttgtcccccaatatcaaagatttctacacaacaagttaaggaagtatttgcagttgtggaatcaaagataattgctaaccgatttgtatcacggggattgatacggtatgcttgataatcttggggagatttgataactggaattacacaacttgtagtaaccatatatttggtaattggtgattggtgattggtgattggtgattggtgattggtgattggtgattgggtattaatcaatccaaaatccaaaatctaaaatccaaaatctaaaatctaaaattatgctgactactgactcctgctataattgccgaagaatcagtaacaaaaccaaagcattgtttaacgttgtacaaagttgctaaccaacaatattctggtgaagttgtggctgtacaatcttggactaaaatgcagtcgtatcctaaaaaattagcatcacataaagttgtgaaaacacattgatcagcattgacacccgcaaataatattgtcgttattcctaagtttctgagaatactatctaagggtgtatcccaaaacccactcatgcgatatttatcaatgcaaatatctgtctcaagttgttctaattcctctactaccgccgctgcccagctatctttcatcagcacctttgcaccgtttttaggtaggctatcacctaatcctacaccttcaccggtgggattataaacatgaagcaaacctgcactaatattgagtaagtctggtctattaccccaatttaaccaaattattggcacattaacagcccgcaattgtggtaataagttttgtaaaggtactattggttgacgtgcgggggtgacatccacaccaatatgcgctaaccagccatcaggatgacaaaagtcgttttgcatatcaataatgataatggcggtttttgccaagtcgatacgcacagttttggtttctgttgttaaaataacgggttgtggggttttttgcggacgagtaatatctgcaaagctttcattgacttcccaagcgttggggtaaaatcctagtgttcgtaagggtagattcataattgttggcacccaagatcattgattcttttgtaacttgaaataatcataattgtgcaattgcttaatcaacgttaaaaaaggtgaaaatcatgaactttactattaaaaaagctttaattgctgttacagatggttacacaactttagatgttcaggttgttaatggtatcatcgctgctattggtgaagatttggatgtgattggtactgcaattgacggtgaaaataaactgctgctacctggtttttttaacgcccacacccattcttcggaaaagtggcaacggggaataattccacctttacctttagaattatggttggcgcatttgtatgatttttctcttctggatattgaacaagtttatctcagcgccttgggtacggctgcggaaactttgctgtctgggggaacaagtgttgtagatcatttggtattaattcctggtaaagagttagaaactatttctactgctgttcgcgcttatcaagaaataggaattagggcttttattgctcctttaattcaagatgaatctttaactgcggggataccagaaggtaaatttttagaaaatcatcaaccttattttcgttctcctgcggaaacattagcaattattgaagaatctgttattaagtttcatcgtccagaggaaggaataaatattttagttgcaccgacgggaattcaattatgtactgatgctttatttacgggttgtattgagttgagcgatcgctacaatctttgtcgtcattcgcacttattggaaactaaagcccaggaaaagttagcattagaaaaatatggttgtagtgcggttgaacatttaaatcatatcggatttttgcatgaaaaaaccagtttagctcattgcgtttggttaactgatgctgatattcaaattttggcagaaaccaaatctactattgttcataacccgttaagtaatctgcgtttaggtagtggtattgcaccgattttaaaatatctgcaagcaggggtaaatgtaacttttggttgtgatggtgcttctagtaatgactctcaagatttgttagaagcgattaaaataggttctattttacataatgtgactgattttgattataaatcctggattacaccacgtcaagcggtagaaatggctgctttaggtggtgcaaaaggattagggattgatgaaaaattggggtctttaaatgtgggtaaaaaagcagatttggtactttatgatttaaccagtttatctttgcttcctcgtacagatcccattggtttattagtattaggtcgtcctgtgaatgttgttaatagtgcttgggtaaatggtaaacaaattattgataatgggaaatttacaactattaatgttgatgaattgcgaaaagaattatttaaccgtagtcagtgggtaagtaggggaaaatcaccaactttagaacaaattgaggttcattatcgtcgagtgatgggcttatcaattgataattgataattgataattgtttcatttttttaaatcctcttcctttcagggagaggtaattatcaattgttcatgattgaaatattttttttgtaagtatgtcaaccttaaaaaacctcatatccagatcccctacttctttaataagtagaggatttatacaccttcctgttttacgtttaataatataaaacaatgcggcttttgggaaataaatcaaacaacaacctgacattttttaaaacgaaaaaactaaacaaggcgttgtaaaattaaatgattacgctcagttaatattgctttccagttttgttcaactacaattgtgctgattttttccacaattatcgcagcaccatttatataatctcctggttgtaaatcttcccgacgataaacaggtgtatcatgccatttttgggcagtaaacatttggactatttccacaggttggggtgtttcctcttgtgggcgttgacgaataattacaggttcttcaggagtatccattttttggatgacttctacagaaatggattcaactattaagggtttttctgtttgaataaaaccataccttgatttatgttccttttcaaaattatgttgcattaatgccacatctaaggtaaaatctactgtaagaattgaattattaccctcatattttaaattaacttttttaactactacttcttctaggttcgtttcttgttgtttatttaactcccttctggattggtcttctaaagatgccattaattgctgtaagtggggaattaatgattgatttaaagggtgttctactcctgttaatttggtaactctcacatcagctaaacccataccataagcagaaagtaccccagcaaaagggtgtagaaatatctttttcattcctaaagtatcagcaattaaacaagcaacttgtccacctgcacccccaaaacaacaaagtacatattgactgacatcataaccacgttggaggctgatttttttaatagcattggccatattttcgacagcaatagaaataaaacccgatgctacttgtgcggaagttcgataatttccagtgagagatgcaatatcttcagctaattgtgtaaacttctgaattactatttctttatctagggctaatttcccttcactaccaaaaactgcggggaaatattgaggttgaattttccctaacatgacgttagcatctgtgactgttaatggtcctccacgtcgataagaagcgggtccaggatttgatccagcagattctggtccgacacgataactagaaccatcaaaaaataaaattgaaccaccacccgcagcaatagtattaattgctaatacgggaactcgcatccgcgcaccggcaatttctaaatctagttgtctttcatattctcctttaaagtgagcaacatctgtacttgttcctcccatatcaaaggtaattactaaatcaaatcctgctcttttgctagtttgaactgcaccaacaataccaccagcaggaccacttaaaatactatctttaccttgaaattgttctgcatcggttaaccctccatcagatttcataaacattaatctgacatggagtaaatgactagctacttggttaacatagcgacggaggataggagttaaataagcatcaacaacagttgtatctcctctactcacaagtttcattaagggactgacttgatgggatactgaaatttgtgtaaagcctatttcttcggcaatttgggctatttgttgttcatgttggggatagcgatcgctgtgcatcaaaacaatggcacaacttctaattcctgtgttgtaaactttttgtaaatcctgtttaacttgtgctatattgactggtattaattcattaccttgggcatcatatctttcatctacctcaattacctgttcataaagcatactgggtaaaataatctgacgagcaaagatatttggacggttttggtagccaattcttaacgcatctttaaaacctttggtaatgagcaaaacaaccctatcaccatgtctttctaacagcgcattggtagctactgttgttcccattttgacaacttctatattttgatagggaatctgttcattaccggatatgccgataatatcccgaactccttgaataactgcatctgcatattgttcaggattttctgataataatttatagactattatccattgctgattaggcaaaggaacaattaaaaaacgttctggacaatttacaagtcgatctattattgtttgattactggtgacagcgacaatatctgtaaatgtgccaccccgatcagcaaaaattttcaacattaccaaaattcctcaataatatataatatatatagcaatacctatgccaattttccaaagataggtctgaaacccaataaaatcgttacgatatcaatagggtttcagagttttggcgaaggtattgatatagcaaattcgtttttatttctgaagagattggtgtgggcgggaaattttagatgttagattttagattggatataacaaaaacaatccaaaatccttgcatcgaaaatctaaaattaagaactcctgcctcctttccttagtaataatacggtgagttcggggcggcatgaccgtacaaataactaaattacggatagttcattagatagcaaataatctaaatttaagtattattactgaaagagtagcaactaataatgagctagattggttaataacaaacaactgtcatatcatccaaggatatttgttcagtcgtctattaccaatagaagaatggaaaatttttctactagataaaaactaaaattctatacaatcactcacttagtcatttttagtcatttttaatcatttccagcaaggaaagtaagatgaaaaaaattctcataatcgaagatgaaccacaagtaagaaataacatacaagaaattttagaattagctgatttcgacaccttagtttctgagaatggtcaacagggtttgcaattggtaaaagagaataaaccagatttaattatttgtgatttaatgatgcctgaattagacgggtatagtctattaacccaactgcgtcaggatatttctactgctacaattcctttaattttcttgactgctaaagcggaaagagcagatttacgtcgagggatggagcttggtgctgatgattacttaactaagccttttcaacctgatgaattactgcaatccattgcggctagattacataaacaagaaatgcttgaacaagaaactcagcaaaagttgaatgatttacgcatttctattagcaactcactaccccatgaaatcaatactcctctcaatcatattataggaatgtccaatttattgattcaagagcaaggaattatttctactactgacagtttagaaatgctcgaatcaattaataaagctgctctaagactgcatagactgatgattaattccctcatgtatgccaatctagaactattatcatctaatcctgagaaagttgctgctattcgcaataatgtggacaagtcttttgtgcgtccaactttagaaaaggtagcttttaaaatctctcaagacgcaggtagatcatctgatttaaccatagaaatctccgatgcaatggtcaatatctcagaattgaaattgaaaaaaattcttgaagaaataattgacaatgcttttaaattttcccaaccaaatacacctgtaaaaattataggttctagcagttttcatggttttaatttgtatataattgacaacggtagaggtatgaacaaagagcaactttctagggttggggcttatgtacagtttgaacgcaaaatgtatgaacaacaaggttctggtttaggattatccattgctaagaaactggtagaaattcacggaggagaattttcaattgagagcttacctggtcaacaaacgattgttcgtatggttctacctcagtaaaaggtgcagagttaagaatctattgatctatggcactaaaacgctttattatagaaatgggtatgggtgtttactaactgtttgtaagtaactcaaccttaaaaaatttaagacccagatccccgacttctttaagcagtcgggtgtctatacttttcaaccttaaatttcaacggtatcactcccccagcaatttgtaatttcgcaacaactttgtattttcagcagtcaataattcccgcaaactatctacctcatttaatatatcgagttcctgggtgtatgcttcctttaaaatcaacagatatttctcccgctctttttcattttttgcttgtttaagcatataaattgccatgttaatactagaaagcggattacgtaagtcctgggagattgtctctaacaagtttcctcgaatttgtgccagttgctgagagttttgcaagtcagtgcgattttttttgatttcctgctgtagtgtttccgttttttggttttcttgcagatacgcctgatgggatagtgaatgtctttctaaacgtgctttaactgcttctaagatttcaaacgtctcaaaaggtttggaaatataatcatcagcccccaatcccataccttgacgtaaatcattgcggttggctttagcagtgagaaaaatgaagggaatatcagcacatttaggatcttgtcgcagttgtgttaacacttcatagccatctacttctggcatcataatgtcacagataatcaaatcaggttttttgattttagctaactttaagccgatttttccattttccgcagtaatgacagagaactctgctagttctaaaatctcttggagatttaacaaaatttgagtttcatcttcaatgactagaattaaactcatagcttgaaaggtatcctaaatagggtttgctgaaaaagtcttgtcgtggagacagggaactcttaacagggagcagtttcaagagtttgatgggagcgatttttcctttgtgtagaaattaaatgcaaggtttttgagttcccacctcgtaaactaattgtaagggaattgtcacatcaaaggtcgtccctaaatagggtttgctattttgtgaactgaaactcttgatttatcttcgttttcggtttatatgatttgcgcttggcgttagccatcagcaagccctaaataaataggtgatacttaacgtaagcatttagctaacagcagttagcggtcagccgtaaaacccttttattgcaaggctctgtgatgaaaatttttatcttatttacctacaatatgctgtattactaattaacaatgaataataaccaactaccaattattaatcaccaatcgccaatcataaggaagaaactgtgaaaattttaactaaccatagcactattttagtagttgacgacaatcctattaatttaaaacttctggattataccttgagtgccgcaggatataacgtcaaaatggaagcaaatggactaaatgtgatacagaaagttgatgatattatgcctaatttaattctgctagatattatgttgcctgatattagcggatttgaaatttgtgagcaacttcaagccgatcctcgcacacagtcgatcccgataatttttatgactgctctggctgatactatggataaggtgaaaggtttaagtctaggtgctgttgattatattaccaagccatttcaaaaagaagaattactagcccgtgtacgtacgcatttacatttacagagtttaattacatctttagaacggcaaaaccaggaactcagacaactgacacaacgtaatgaggacttagaacagagagtggcagaacgaacagcagaattacaagcagcactagaaaaagaaaaagaattaagccaattgaaatctcggtttattacaatggcatcccacgagtttcgtacacctttagccattatttcttcatcatcgggtattttgcaaaaatttagcgatcgcctgagtgcagaaagaaaagagcaacatttccaaaccatccaaaacaccattaagcatataacccaaatactggatgatgtactgatgattaaccgcgccgaagccgagaaaatagaattacatttagaagcatcagatattatcgctttctgtcgccatctcaaagaagaaatcgaaactacgagtaaccaacatacaattaatttctatttagatttaggcgaggaaattatggaaaattatctgattattcagtttgatgaaaaaattttacggcaaattctcaccaatctcctgactaatgctattaagtattctccgtctcacaatttggttaattttagtttgactaaaaacaataatcaaatattatttaaaattagcgatcgcggcattggtattcctgaagcagatcaagctaatttatttgaaccttttcaccgagcatctaacgttggtacaattgcaggaactggtttagggctgtccatagtcaaaaaatgtgtggatctgcaccaagggaaaattaacgtagaaagtcgtgcgggagaaggaacaacatttacagttagtcttccttttttcaaaggataattaatatcacgtctagttaaacaattaacatatctgttgacactggtaattggtaattgataattggtaagtaggtaggcacaaaaaattaattgtcaattatccattatcaattgatcataatgttattatcactggggaagcataattttaataatagtttctgctcctggtatactctcaattaaaaactttcctccatgcagttccactaacctcttagcaattgataatcccagtccagaaccttgttgttcatacattttacgttcaaactggacataagccccaactctagaaatttgctctttggtcattcctctaccgtggtcaatcacatataaatgataggaattattactactataaccgataatttttactggtgtattaggtagagaaaatttcaaagcattatcaattatttcctcagcaattttactgagtctgacaggagaaactttgactattgcatcagatatttctatactcaaatctgctgttctatgtgctttttcagcaatttgtacagctacattttccatagttgatttgacaaaacttttgactccattattacgaagccgttccactttttctggatcagatgctattaattccaagtctgtatacatcaggaagttaatagttagtctatgtaacctcagagcagcttgatgaatggatcctaaaatttccagattttcatgggaaaggttttcctcaagcatcaataaatttgagaatcctaaaatatgattcagaggagtattgatttcatggggaagtgaatgactgatagaactgcttaaatcatttaattttttttgagttcgttcatctactattgcttgtttatccaatcgagtattaattgcttgtagtaattcatctggatgaaaaggcttagttaggtaatcatctgcaccaagttccatccctcgacgtaaatctgatttatccgctctagcagttaagaaaattaaaggaatggttgcagtagaaaaatcctgacgaagttgagttaagacactatagccatctaactcgggcagcatcaaatcacaaataattaaatcaggatgtttatctttagccaattgcacaccctgtaagccattttctgcaattagtgtatcaaactctgagagttctaaaatttcttggatattgtttctgatttcaacttcatcttcaataattaaaatgtttttcattttttgtttccctgatattatttggtagatggattaaaaataaggataacaactcagattgccttttgctttaatcttgatacttgattatgactaattgtaagctatttgcgcttcgtgataaatgaggaataactgacttaatataatttagctgatcctactgtccacttagaaagtcttaccgtagatatacttacagtatatcagtaggttgcagggattgaagggattgaatattcaacttacacaagttaggacttacgcaatattgtactaaaaatattgtactaaaaatattgtactaacaacctgattcttgggtaggggtaattcatgaattacctctactttccttctattttgcataagtcttgcaactgtgaatgtgaacaatttacgaacaatttacagtccaataattttcacatcttcaaccggactagggctaaaaataatagaattaatgactaatataatatctgccaaaaatgcttatgagaatttcgttttttaggtttttgctaacttctctgtggttgatggttgcctttttagctacaaatttgcaaaataggaatacagttttagcggaagcacccccagaagtttctcaattagttaatggtaaacagattaatgttagtaaatctgaatttggagtgagaatagtagactcccaaggtaaagctaatttttttcccaccaccaaagtacctttaaaaaaaggtgatgcttatggttggagaatgacactacaaaattaccagggtaaagtcaaatggcgggaagttttacgtttaccaaaagccccagaaacttgggctacaccggagaaagatgagaatttttccctatctgcggatggtagtacagccatcacaacgcggacgcaaacagttaaaaatggtgtgattgaaaattactggaaaatcgctcctggtgatcctcttggtaaacacagaatagaagtttatgttgatgatcgtctgatttctatttttgaatttgaaactgtagaattttagtaaaatttttccggtcttctcgttcccattttctgtcttatcaatttctcattcccatattctgtattttctcgttcccatactctgtatgggaatgaattatagaaggctctgccttcaataaaaaaacagaggcagagcctctgtaatagcattcccagtctgagactgggaacgagatcaaagaaaatagggtttttattcagggtttttattcttcgtctaattccatttcttcttcatcttcttcttcattagatttagaaacagaattagcagaaactactgcgccttgatctaatttcccgcggacttgttctttaattttttctgcaaaatctggtttttcttctagatatttaatggcgttatctcgaccttgggaaatgttatcaccgttgtaactgtaccacgcacctttccgcagtaaaatgccggtttcttctgctaagtccactaaacaaccaagggtagaaactcctttaccaaagataatgtcaaattcggcaattctaaagggtggtgcaactttatttttggcaactttcacttttactctattaccaaattcatcagagccttttttcaaggtttgaatacggcgaatatctagacgcacggaagcgtaaaatttcaacgcattaccgcccgttgtggtttctggactaccgtaggtgacaccgattttttgccgtaattggttaataaatataactgtgcaaccagatttaccaatattacctgtaattttccgtaaggcttggctcatcaatcgtgcttgtaaacctacgtgagcatcacccatatcaccttcgatttccgcacggggtactagggcggctacggagtcaatgacaactatatcaacggcggcggaacgtactaactgatcaacgatttctaaacctgcttcaccagtatccggttgggaaaccagtaaattttcaatatctacacctagtgcagctgcgtaggtgggatctaatgcgtgttctgcatctacgaaagcagctatgccgccatttttttgtatttctgcgatcgcatgaagagctactgtagttttaccagaactttccggtccataaatctcaatcacccttcccttgggtaaaccaccacccaaagctaaatccagtgttagcgcccctgtggaaattgtttctacacgcatccgggtagcatcacctaaacgcataatcgcccctttaccaaagctgcgctcaatctggttgagtaccatattcagtgctttttgcttgccagtatccgctgtgttggttgccattagagcctctaaatataggatttaagaaagttgcgttgggttcttgattagaacagatatactattttaaccagaaaaagtacaattggtaaggtgtgggaaaaaagttttatgggaggagtcaggagtggtaggggcgaagcattcgggcgactaattataaatttttgtccaagcctattttccgaatgctgatgcttccagcacgcttcgcgaacgcgcgtacaggagtcaggagaaagataaatatttcctgtttccccaatcaccagtcccctatcaccaatcaccagttaccaatccccaatttaatactgtggcacagaaggatctacttccaaactccaagcattaatgccacccttaacgttagttcccactatacccgcttctttgagaatagccagagctttggcagaacgtccacccattttacaatgggcaattaaacggtgtccgttaagtaattcttttacctgagtaacaccatcaccattttcaatctctggtaatggtactaagacagaaccaggaattttcgcaatttcatactcgtgggggttacgtacatccaacaggacaaaatcttgcgccccactatcaattaatgcttttaattccgtaacggtcatttcttgaatgtccatttgttgcttcgcttctgctgcttttgcttggggaataccacaaaattcttcgtagtcaatgagtttttcaattaccggacggatggggttaggacgtaatttcaactctcggaatttcatatccaaagcgttgtacaacattaaacgcccactgagagtagtacctttaccaataataatttttaccgtttccgtcgcttggatcacaccaataattcctggtaaaattcctaacactccaccttctgcacaggaaggaaccattcctggtggtggtggttcgggatataaatcacgatagttaggaccaccttcgtagttaaagacggttgcttgtccttcaaaacggaagattgaaccgtaaacgttaggtttgtttaataatacgcaagcgtcgttaactaaatagcgtgtggggaagttgtcagttccatcaacgacgacatcataaggacgaatgatatctaaagcgttttccgcactgagacgagtttcgtataagtcaacctgacaataggggttaatttcgtgaatgcggtcttttgcggattcaattttgggtttacctacccaggatgtgccgtggataacttgacgttgcaagttggaaaaatcaaccacatcaaagtcaacaataccgatgcggccaatacctgctgctgctaagtataacagcaatggcgaaccgagtccaccagtacctatacataatacactggcagctttgaggcgtttttgtccttctagacccacttcgggcaagattaaatggcgggagtagcgttcgtagtcgtctttcgttaactggatttcatccagattaggatttagcatagtaagaaaatgcagaatctcagagtattaatattaactcaaagttggttcagtttatgagttctattttttttgctgggggaattatatcacgttggggactgggaagggggcgatcgcattttttggagttgaatgattttagctcatgcaaagacgcaaatacgcaaagaataaaaaattgttaataagtctaaattaattgtattatctctgtgttctctgtgcctggagtggttcgttatttcatgaatctcagttaaatttctgaataattggttataaaatcgctatttgcattttttacatcctaaaatcttggatatgctcagatggctcgctatcagacaattatcttgtaaaatctcttatttaataaccgatgactatactgttgagtaggtataaaattattaagcaaatcggtacaggtgggtttggagatacttacttagctgaagataccgcattaccaggtaatcctaaatgtgttgttaagcacttaaaacgcaatcctgatccgggtgtattggcaatttctcaaagattatttgaaaatgaagccaagatattacaagatttaggtaaaaatgatcaaattcctggactttatgcttattttgaagacaagggggaattttttctggtacaagaatttgtagatggacatgatctgaatcaagagattgttgttggtaaaaagttaagtgaagagaaagcaattaaactaatacaagaaatcctagaagttttatcatttgttcatcaacaaaatattattcatcgagatattaaaccatcaaatataatgcgtcgtcatgatgatggtaaaattgttttgattgattttggagcagttaaagaaatagccgcttttacagttaattctcaagggcaaactagcttaactgtagggattggtacacctggatatatgccttctgaacaggcaaatggtagaccgaaatttgctagtgatgtttatgctgtaggaatacttggcattcaagcggtaacgggtttattactagcacaacttgaggaagattcgactactggggaaattatttggcgaaattatgcccaagttagtgatagatttgcagaagttttaaataatatggtacgtgatcattttagtcaacgttataaaaatgccactgaagcattacaagcattaaataaaattgaaaataagagagattttcctactaaaattttggttggttttggtgtagcagtagctgttagttttgctggtggttatgctatgaataatgtattatctaatcaaggtgatccaaaagtagctgcaacttctgaaccttctgtaaaacctaaaagttctccaaaagcaacttcaactcctcaacctcctgtgaaacctaaaagttctccaaaagcaacttcaactcctcaacctcctgtgaaaattacaactaataaagctgaatttcgtaatttagataaacttttagcagctaaaaaatggaaagaagctgatatagaaacctataagataatactgaaaatagcgggtaaagaaaaagaaggtaatttagattttaactctattaaaaatttttcctgttcttcgctgcaagatatagataaacgttgggtaaaagcatcaaatggacgttttggttttagtatccaaaaacaaatttggaataatattgcgggtacagtgggctataattctgataactttaacaagtttgctgatcgcgttggatggaggagagaaaataactggttgcgttactcagaccttaccttcaatattaatgcaccaagaggacatttaccaaatacacctccagaatatactagcgttagttttcgcagaatgatacctctgatttcaccttgtaagttgtaaattttaatcaatcaatttatcgttgttttaaccctgtatatcctgatttataaaacctctattacttccctttgaaactgatgattttcatctaaacaaaaactatttaattcacccgctttcccttgtgtaactgatacaattatataagaatattctggacaagcatagattctatcccactctgaaggaatagcaggataatcaggatgggaatgaaaaataccaatgatatttaaattgcagtttctcgcttctttttgtatttgtaacatgaaaaagggagcgatcgcatatcttcttctggtactatattcttcctggttttctgaaaaattacccctttccctattccacacattttctgtaggtatcacttctacaacagttttcactccattactaatataacccaatattaacccacaacattcatcagggtaggttttttcagcatgaatgttgataatttgcaagtgttcagagagaatcttgagaatattcatagatatagatattgtaatcaaacgcaaatttatttattaatcccatactttgcaaatatgatcaatactatctcccagaaattttcatctttcgcaagttagatcaaataaactactcaaaagatagaagtcaagaaaatacaataaaatatatagtttatagtttatagtttataaactggagtcagggaaggagaaaaggtagctgtaacaggtgttttgcgtccatttgtagtggcagacttagaaagagattatgatattacctgggatttagatttacaaagaaagctagaagctgaatatcgtgataaacctgttttagtagctactgatgtttatccttccgctattccccagtaagctgaatgcttaaataaaattgactttaccagtgtcaagatcgtaaaaagcaccaacaacgtttaatctacctgcgccaattaatttagctaatactgctgaattattctgcaatctttcaacttggtattgaatattattaatgatagcattctgttcataattactatcattaatatcactaatatcacttgttctttgttgaatttgaggtaaagctggtctaatttcatcaacaatagaaccaacgtttccaggaactggttgatttttcatagctgctttcaccgcaccacatctttcatgacccaaaacaataattagttctgtacctaaagcagtagtagcatattctaaactaccaatagcttcatcactagcaatattaccagctacacgcacaacaaataaatcaccaagtccttgatcaaaaattaattctggtggtacgcgggaatctgcacatcctaatattgctgcatagggatattgggttttagaaactgattgtaagcgtctttttgattggttcggatatcgacgactttgattgacaaatcttctatttccttctactaatctgcgttgagcttcatttgcactaactgggttaggattaggattagtgtcaggaataattatttctgagcgattagtaattatttcattacaagcagtcagactactaatacttaatgtagttaaacctgcgatttttaagaagtgacgacgacctacaaaaccgttaattctactcataagtctccctgaaaacttctgcatggttttcaagaagatatcagatttgacaccactataagagtacctgattacacggtttaagggttatttaatcttttgcttaaataccaaacaatatattgaccgtatggactatacctaccatctgcatctttgctactaagttcttccactttctttttcaaagcttcttgtgaccatgttttattaggaaattttctatttaaagcgttaatcacaacatctaaagctattttacgattttctctgagagtttgataattcagatttaaaacttcatttaattcatgattaatagtttcatcatcacatatagataatatttttccagtagaactatatttgatctgattttcacaattcttattactatctactggattaagattcattgtataatttctatgtgttccttcataatctccttttcttgcgttacaatgtaaattcttttttccttgacctctactacctgaacaagaagctattagatttttatagtctagttgtaaatgtggattatcagcttgaggtttattatgttcaatttccatattatctatagatattcgttgcatacaatagcaacaaatataaccttgttctgctaataatgccctttttaaaggttcttttggacgataatcatcatagtttgcgtcctgtgtctgacgatattttaaaagacaaggaggttctgttcctttaataatgcgtttcattctaccctggttaaaaaatcaataagtgtatgcgctttgactatatctaaatcattttctcccaataaatcagataattcttttagtttaattttcgctgcttctaatctcccatcatctattaattcaaaacattgatctattctttcctgcatttttacaggtcttttttctacacccataacttcaaacaaaattgagttactgtctctaccaaatgtgtggggtgtcaattctacaacttttccatcttctaaaataaatacgttttctctgtttactccactcaaaacttgaggtgaatgagtagtaacaataaattgacaatttggaaatgttcttctaaaactaggaatgactattctttgccattgaggatgtaagtgtaaatctatttcatcaattaatattattcctgttccggtttgcagtatttctgaaggatcagtaatactaggatttaaaattgccaaccttctggcaatgtcaactactatcatcaataaggttttttcaccatcggaaagttgctctagtttaaaaatttcaccatttttttcgataactaatgaaggactattaagacgatgactacttaactctttactactacttacacgagcaatatgaaggtttacgaattggctattggggaaagattctaaaaatatttctatagcttttctaacaatttcaagattgctatttctaaagctattattttctcttaatcgaatttcattttcatattcctcttcttctttaaaccaatcaaaaaaatctttaaaatcgttgatattgtttgaaaatgacgatttataagcatcaaactgattaggtttactaataactctttttccaaaaccagagtttataactattcgctgtgtttgataataaactaataatggtatggataaattaggttgatattttaattcttgatgtacgtgagaaacatactgattaatttctgttttctttgttatagatttaaattcatctctatctctggaaatatcccaagacatttttatatctgagtaaattacaatgcgaatagattcttgtgttctatgtgcatttatatttatatcatcctctgttaaatcaaaatctaactttttgtaaggtttcttgggcagtaattcaaatataaatcttgacaaaagtatagcaatactatctaaaatggaagatttgcctgaaccattagatccaatgaaaacagctaaatctggaggaagtttcaatttcagttcttgaaaacctcgaaaattctgtaaatgtaattcttcaatgtgcatagttctgactcctgactcctgactctttatttaatgtcctcccgcacctaaatataattctcccacttttggatcattcaataattctctcccaggtccagacattgcatcatgtcctgattctaacacatatcctgtatcagccatttctaaagcttttctagcattttgttctactaaaactatcgcagttcccgcttgattaatttgtttgatttgttcaaatacctgtgttaccaaaatcggagataaagccgcggaaggttcatctaataataataaactaggttctaacattaaagctttacccatcgctaacatttgtctttctccacctgataaagttcctgcacgttgacgacggcgatcgctcaatctgggaaacattgcaaatatattatccttcaaaggtttcaggggaacattccgcacaaaagcccccatttctaaattttcttctattgttaatgatggaaaaacgttggcaatttgcggaacataacacattccctttttcacaatttgatcggattttaaaccattaattttttcccctttaaaggtaatcgtacctgtgtggggtgttaaaagtccaaaaattgtttttgctaacgtagatttaccagcaccattaggaccaattacagttactaattctcctcgttcaactcgaaaattaataccctgcaatatatcgacatctttaatatatccagcatggacattttcaacttctaataaatagttattagtcataaaaaatagggaacaggaaatagggaacagggaatagggaacagggaatagggaatagggaacagagaataagtaaacagtaaaaatgatttactgtcacctgtcacctgtcacctctctacctattctgaaattttctgcaattcagggcgttcttctgctaaaattgcgttttctactgggcaaacttgtaaacagatgccacagtcgatacaggtagcaaagtctatccagtaccaatctgtacctttaacgtttttacctggtccttcatgaatacaagctacaggacaagcacttacgcagtcagcaaccccttcacaaacttccgttactattgtatgtggcattttctcgttcccctctcttgattgaatcagcagtttctaagttaacaatttgtaatattaacgcaagtaatcagctttcagtgatcagctttcagcttttattaatcaacgaataacaggaaaagaaccgcaaaggtaaagattaagattagctgacggctgatagctaacggctgatggctgtattacctgttaactaactgcttcaattgtgggtgtaccatcagagttaatccaggctatttgggcgatagagcgatcgcgtgcatagttccgaattgcttcggcatcccttccccccaaatccatttctacccgcactaaatgggcagaatctcgtaatttttgggcataagcaaaagcagcagcatcagcattttgatcttctggaactactaaccagttactcgcgggtatactctgcggtaattgctgactcgatgctaaaacttggtataaatcatcaatgcttaattcaaaaccaattccaggaatattttgaccttggggatgatatagccctaaaagccggtcataacgaccaccacgccctaaaactaacgcctgaccttcagtatcactaactacttcaaacacaattcctgtgtagtagtcaatagtttgaatcaaactgagatccaaaatcaaagaaaatttaccttctgattccagtaattctatcagggattttaggttatttaccgctgcttgctggtcagcatctaaatttaaactgctgactttttgcagcacatcagcacttttaccacgcaaatctaacatgattctagcgcgttggtgcaattcttcactcagaggtaaagtatcgagagttacacgatctaaattagcgatcgcatttctcacttcacttctgatattagccggaaaagcatccagcagagatttagtaattcccgcctcacctaaaatcaactgccatccacgcaaatctacagcttctaaacaattagctaccaacaaaagcacttctgcatttgccagtaaaccgtccgcacccagcaactccaccccagcttgataatactcctgctgctgattatggcgcttttcccagttgcggcgaaatacattagcattgtaatacaaccgttggggataggttgcttcagccatgcgagtaactacagtccgagcaatagaagcggtgagttctggacgcaaacccaattcctcatcttgcccattttgtaattgtatgaccttatggcgctgaattgcttcacctgccatcagcgtatccatccgttccagcgttgaggtgataatcctgtgatatccccaacgatgaaaaacctgttgtaatctatcttcaatccagcgtttttgagccacatccaagggtaataaatccctagctcccgctgctggttgatacaccattattttttcttcccaccaaacaaaccaccgaacaaaccaccatttctagacttatcgggttgggtatctccattattggcaggtttccttccctgatgagtaccagattgattttctaaaactttatcaagtttaggcttccattccaaagctaatttgtcatttggatctaatttcagggcattttcaaagtaaattttagccatttttagctgattttggcgtaaatatatcattgccatccagctatgacagtgactatttttaggagcaagcttcaaagcatcttgtatttccactattgcctgagcaaactgctcattttcaatcaaagtttgagcgcgacgcagatactgttctacaaccgcatctgtttttggtgtaggaggagggggtgggggagggggtagagtgctagaagtaccagaggctttaatagattggggcgtagtcatcaaccgtcctgcacgccgcatcaggtaaactaaattcaattcgctaatttgggcaataaataggggtgtttgctgtaaatcaacaaattgaatttcggcaattttagccaattcctgttgatacaatagttccatattgggagcgatcgctaattgcttggctgcctctgtagtcaataccacctctactggttcttgtgccagacgcttgccaatttgcgacaaaattaaagtatattcggctctattgcgttctaatgacagtttttcataagcaggattaaccagtttagataataattcagtggctatctctttttcatgacttttgatcacagcagcactatctgggtgcaagcgacgggcgattttgagatagcgtttacgtacttccccggcactagcgtcaactggaacacacaaaactgcgtgatgatctacaaaatcatatttgaataatccaccatctattttgaaagacatagagaaatattgcaacctagcagcaattttttatagtttaccctgtcagtaatattgaattaacagatattagtaattttcccatattaccaagctgacaaaggcgaaatttgcattagtttctgactcagactgttatgaatataaccgttagtacccaggattctgccagaatcaatttgtaaatctccaccattataagctgtcacctgacccccagcttcttgtactaaaattataccagcagcaatatcccaaggtgcaatacctctttcccaataaccatccacacggccacaggcaacataagctaaatctagagaagcagaaccgccacgccttacgccttgggtaagatgggtaagatgacaaaattctgcatagttattatccttggtttcccagcggtcataagcaaatcctgttactaacaaacttttactcagttcagaagtttgagaaaccttgataggtctgcggttgcgtgttgcacctaaaccagcagcagcccggaataattcattatggaaaggatcataaattacaccgacttttggcactccctgaatcaacaaaccaatggaaacagcaaaacagggatattgatgggcgtagttagttgtaccatctagagggtcaatagcccagagatattcactggtttgatttcccaattttcctgattcttccgcgaggatggaatgttggggaaagtgacggttgataatttccaaaatcactttttcagaagctttatcagcagcggtaactaaatcaccaggtctgcctttttcggtaatagcatcctctactttacctaaataatcttgcaaaaccacaccagcagataaggcagcttcggtagcgatatcgagaaaaatttgtaagttagtcatgagaaggagatcaagaagtcaggagtcaggatttctaggagttcaggagttcaaggaattctaggagttcaggagatgggaaggattaataacccaatcaccaatcaccaatcaccagttaccagtccccaatcaccaatcacttattcatccgccgatattcaccaggagtttgacgcatggggttatctgggttccagataccttgtcccatcagtcttgcccaaagttgggcattttctaggcgttgattgtatttgtgattaggcgatcgtcccacaaatagagcatacccttgtttgatcacttgttcattcaaaaacacctgatctttccacccataagcccaggtttgcccaaacctgtttttggtttccaggtcaaactctaacttgagagattttttcccgccatcaccatcattaattaacttttctaaaagtgctttagcatcctcgccccaaggacgctgacgtaaatcaggcgcatctaaaccgattaagcggacttgggaagttatatttggttgttctcccaatcccagcacttctaaagtttgtccgctgacaacccgcgctactgtgactactgtgggtatgtttgctggctgatttttgccttgacaactgaccaacaacaacaaacaagataaaattgctactttttgcgcccacataaccaaataggatactaatacggcaattttagcctgtaagtagctgcgccttgggacagtcttcattgtttattatttgcctctaatcttcatctaaaggtaaaccggctttgactttgcctttaccaaaaaagcgcccaaattgaagttcataaacttcgtcttcgtcttgtgtttctacttctaaatcagaacgagcataactcacacacaacaaagcgtaaccttgtcggcgtaaatctggggataaaccaatagcttctggttggtaaatttctcctgagattaccctgacagcgcaggttgtacaagccccattccggcaagaaaaaggcagttctatgccatgattttcccctgtatgcagaatataacggtcttctggaacttgcagggtatgtgatacgcctgtttggcggttgtgaactttgactgtatgggtctgaaccatcttgatttttgctagagaatgtgagattgtagatttattgtaaaaatctttgatctaatcattgcattttttacaagtttggtttagaatgaaaattcatgacacctggagaggtggccgagtggtttaaggcgcagacctggaaagtctgtttgggggaaacttcaacgagggttcgaatccctccttctccgtttttttttcaagataatgaccaatgaatttaagtatattatttttcataaaccctatggtgtcctgagtcaatttacccaagaatcgcctaaacacattaccctgaaagactatattgatgtgcctgatgtttatcctgtggggcgtttagactgggacagtgaaggtttattgttgttaactaatcatggacagttacagcatcgtcttgctaacccccgatttgggcataaacgcacctactgggtgcaggtagaaaacattcctgatgcagaagctatccaaaaactatgcacaggaatagaaattcaagattaccgaactcgccccgcccaagttaaactattttcagaagaacctatagtgagtgagcgcaaccccccgattagatttaggaaaaatattcctacagcttggctggaaatgactctcacagaagggaaaaaccgccaggtgcgacgcatgactgctgcggtaggatttcccactttaagattaatcagggtgagtattgctcacttacaattaactggtttacaactaggtgaatggcgcaaccttacaccctcagaaatccaaggtttgaaaaagtcacgaatttaactaattagacctctctgaaaaagaatgtagagatgttgtatgcaacgtctctacaaggtttagggtgcggaaggtgggttgaatgctaacgcttagtgtgctgtaagcataaaagtttagatgatcgggaaatcaggtaaaatggcaaaatgtcatgaaaaatccatcatccaaatataactataattctaaggttatccccgttctgaacacgatcgcactaagtgaactgttttagcggggggaatgaagttaaaaataagtaggttaaagaaacggggaaactaacgtgagttctggatttgattacgatttagtgattattggcgcaggtgtaggtggacatggcgcagccctacacgctgctcattatggtctgaaaacagcgattattgaagctggagatatgggaggaacctgtgttaacagaggttgtattccttccaaagctttgttagctgcttctggtaaggtgcgggagttacgtaacgcccaccatctcaagtctttggggattcaaattggtggtgtagaatttgagcgagaagcgatcgctaatcatgctaataatcttgtctcgaaaattcaaggtgacttaaccaacagtctcaaacgtctgggagtcgatattatccgggggtggggaaaaatcgctggttcacagaaagtcagcgtgatgacggatagtggtgacaaaactatcactgctcaaaatattattctttctcccggttctgttccctttgttcctcccggaatagaaatagacggtaaaacagtctttactagtgaccaaggtgtaaagttagaatctttacctcagtggatcgctattattggtagtggttacatcggtttagaattttctgatgtttacactgctttgggttgtgaagttaccatgattgaagccctggatgtgttaatgccaggctttgatcgggatattgctaaactggcagaaagagttttaattactccccgtgatattgaaactaaagtcggaatatacgctaaaagggtaattcctggttctcctgttgtcattgagttagcaaacttccaaacaaaagaagatttagaagttttagaagttgatgcttgtttagtagctacaggtcgcatccccactactaaaaatctcggtttagaatctgtgggtgtagaactggataaacgaaattttatccctgtaaatgatggcatggaggtattgtcagcaggtgaagtagttcctaacctctatgccattggtgatgctaacggtaaaatgatgttggctcatgccgcttcggctcaaggtatcattgctgtagaaaatatcctgggtaaaaacaaaacggtagactatcgtagtattcccgcagcagcttttacccatccagaagtgagttatgtgggtttaacagaaacagcagcccaagaattaggtttagcagaagggtttgaaattgctaccagtaagagttactttaaaggtaattctaaagctttggcagaaaacgaagccgatggtattgctaaagtaatttatcgttcagatacaggtgaggtgttaggtgtgcatattttcggcgcacacgcttccagtttaattcacgaagcatccgccgcagttgctaaccgtcaatctgtaaaagatttggcttatttggttcacgcccatcctacactatcagaagtgttagatgaagcctacaaacgagcgatcgctagttaggtgattggtgattggtgattgggaaattaatcctttaaaatctgtgcttactttgatggaaaagaataaatcttcccagtccccagtccccagcgatgcactgagcttgtcgaagtgtccccagtccccagtccccagtcc

SEQ ID NO: 35 - DNA, 50638 bp, Sphaerospermopsis sp. LEGE 00249
  LEGE00249_50
gtgaagaaagcaggggaagcaggggaagcaggggaagcagggggagaatattaactcctgactcctgactcctgactcctgactcctgactcctattcccatttctgaaagaaaatattacaaagtattaagagcagtaataaatgctcaacataatgccggagaatattttgcggaaggataattaagtttttcaacttatgtacttttgttgagtaaatgtgactcactttgtactaagatgcaaaacagttatcaatcaaatcaaagtcttaccagtttcaaaactggtgtcattagttttggaggaatccattaatgagtatcgtcacgaagtccatcgtgaatgctgatgcagaagctcgctacctcagccccggtgaattagatagaatcaaaggttttgttgctggtggcgcacaacgtctccgcatcgctcaagtattgaccgacaaccgcgagcgcatcgttaagcaagctggcgatcaactgttccaaaagcgtcctgatgttgtttctcccggtggtaacgcttacggtaaagaaatgacagctacctgtcttcgtgacttagactactacttgcgtcttgtaacctacggaatcgtttctggcgatgtcacccccatcgaagaaatcggtatcgttggtgtacgtgaaatgtacaagtccttgggtactcccattgacgctgttgctggtggcgttgctgctatgaaagctgttgcttctaccttgttgtctgctgaagacgcatctgaagctggcgcttacttcgactacgttgttggtgcaatgtcataggttacagctaattaactgctgaaactgaaaactgttgcaatcaatctggaaataaggaaataacaacaatgcaagacgcaattacctctgtaattaattcctctgacgttcaaggtaaataccttgataccgctgctttagaaaagctcaaaggttacttcgctactggtgaactgcgcgttcgtgcagctacaaccatcagtgctaacgctgctgcgatcgttaaagaagctgtagctaaatccttgttgtactctgatatcacccgtcccggtggtaatatgtacaccactcgtcgttacgcagcttgtatccgtgacttggattactacttgcgttattctacctacgctatgttggctggagatccttccatcctcgacgagcgtgtattaaacggcttgaaagaaacctacaactccttgggtgtacccgtaggcgctaccgttcaagctatccaagctatgaaagaagtaactgcaagcttggttggtcctgacgctggtaaagaaatgggcgtttactttgactatatctcctctggcttgagctaggagtaagtttgcacttactgcacttataatttaggtgcggcttgattaaggtctggaaatcaaccatgagttctaggtcgttctattgcttactaaacatgagtattagcggtctagtgttgatgtttgatttccaggctttgaaatgtaaggagtcaggagtcaggagtcaggagtcagaataatatttaatttatttatttatttattttggcttggtagatggagatttgacaactgacggctaaatcatttaaatccttacagataaattaaagatttgcactcaagatttttgagataaaaaagtttttccaaacaaacacggagtttagaaaaaaatggctcgtttatttaaagtaactgcttgtgttcctagcctaagtcgcactcgcacccagcgcgaattacaaaatacttactttactaagttagttccttatgaaaactggttccgtgaacaacaacggattcaaaaaatgggcggtaagattgttaaagtggaattagcaactggtaagcaaggtacaaatactggtttggcttaatttctatacatacatcagagattattttggtagatttttcaggggtcagtgatggcctctttttttatagctatcagctatcagctatgaaactatactgacagcggaaagttggttaagatgcaatttgcaatgtgttaggttcagggatagattcaccttctgcttcccaagcttctaggtacatttcaattacttcttctccatttttaattgcttcttcacgagtttttccgtgagtacaaggcatgattacaagatgactaaattcgggaattgtaactaggaaaagttggtcttcctttgaccattgaataatcatactgtattgactcattaattttgctcctctcctaattcttccagttcagttaataactttgttaattgcttttctaagtaaagtggaacatcatctccatctttacctggaattgttaatgttttcctcagtaaaggatgtttccatctttcatgactgcctttcccacgctttggtagatacacaaaccctttacgtgcaatctcggcttttagctcccgaatttttctgggcatttattctagatatttatttaggggttgctgagaaagtctttccgtgagggcataggagtcaggagtcaggagtcaggaggagatttgaaaatttctttgccatctcttgaaatcccaaaaaatgcacactttttccggtatacccttcaaaacccttgcactaatttctgtgtttatcagcctctaacctttgatatatcaaggttttaggtttattcagcaaaccctatttattcttggtcttaactttaataagctaacatcatttcggcaatatctacttcagaaaatcccattaattttcccacttgtttaatgtacattttttccgttatgtgaaaatctccatcacgcttggcaagtgcgatcaaatcaattaataaccctaaagcatcatcgggatatttagctattaatgaataatctatttctgttctctgggcagataatgaatttttgatttccttaatttcttccactgttaaattagcattggtaataattgtcttgagatattctttttcttcaggttcaatactaccatcaactttcattaaattaatcagggttttaatctttaataattctagtctttctcctgttatattatttacttctaggtcagatgcaggaagaagatgatcagtatattcaatgctagattcacttaatgattgagtctcatctaatatctcaatttctttttcaaatatttgaatagccttattacctacctgtttagttgaataggcagaccataaacccatagcagtagaaccaactccaggcaaccatttactaacaattgatttccctgcactcttgactacatttcctgtcaattgatgaactatacgtttaaatatggacggggttaattttttagtgataattttactagcttcgataacaataactctatttgctcccgtacccaatgaagaaatcaagacacctgctaatagttctttgtttaaatattgctgtttatcataagctacacctacatcataaatcatggcaatttgatttcgcattactgtgacaatttctggagcaactgctaacattcccaagggacctggtactaaattagctgctgctgatatccctccattagattttgcatagccattgacaattaaattaactgattctatggaaggtttttgatgttgataaggatttttagcaaaataattacttctatcttgtgcaaccatatcaaaagaagtgattattttttcaccaatttggttttgtagtttttgaataacgttattacttgtatcttgttggttgatcataataacataaactctcattcaattttgaatcaagctgattacagatataatagatatattggatacaaccttttcccgcttgtatcttaaatatttatttatccagtataattttgcagtataattttactaagtgtcaatatctaatagtagcaaatttacaaaagtttaggtattagatcaagtatccatgatgagctatacctgcactcatgatagactaaagtaaaacaagctaaaaattatctcaactatgttaactgctactaatattggtacattaataacttgttctcccgatgtaggtaatggtcatcccataattgcagggactagaacctctgtaagtcgggtagttgtgctttataaacaaggtgcaaatgctgaagaaattacccgtcggatcagtcacctcaaccttgcccaagtttatgcagctttagcttactaccacgctaaccgtgatcagatagaaaatgagttagcacaagcagaggcagaatactggactttagcagagttacacagccagaaagataaaaaagcagatgaataagatccggctttatattgacgaagactctatggatgaagattttgttcaagctttgcgttcccgcaatgtagatgtattaacggttgcagatgtgggaatgttgtacaaatctgatccagaacagctaacttgggctagggaaaacaaccgagttatatttagggtttgctgaataaatgtgaaaatattacaagtaaagggtcttagcctgctggaagttaaaaaagtgcaagactttacgaggtgggaactcaaaaaccttgcatttaatttgtacacaaaggaaaaatcgctcccatcaaactcttgaaactgttaagagttccctgtctccacgacaagactttttcagcaaaccctaattaggggttgctgttatagtcaattatccattctattgtgagcgatcgccgatacaatcaaaactcccattcaatcacaccaagaatggcagcagcaatttctaacattgtaacgttagacacattacccaatttgcgaatgaatctttgtaaatctacacccctctgttgagttcaatcctgcgtaagtcctaattattttagactaaatgaaaccttaaaacctacaatagcttatgttgctattcctgtaacttgtgaatttacgccaattcatccctatttttgataattccgttgccagttgggctttggaagcgcgtttattgcgctggttaacctttctgtggctgtttgttggtttagttgtacttttttctgcatcctatcccgtagctgatgtacgtcaggatgatggaatgtattattttaagcgtcaaataatttgggtattagtttcactaatactatttaacgttattgtgaatctgcctttacggaaaattttggcggtgtctcattggtttttattcctgtttttgttgttaattttcgtcactcttattcccggagtgggaaaaaaagcatttgacgcagcacgatggatagcgatcggtcctattcccctgcaaccatcagaattgattaaaccgtttttagtattgcaaagtgcgaagctgtttggccattgggaaagattaacgtgggaaattcgtttttcctggttaggtgtgttctgtctggtgctattgggtattttagctcaaccaaacctcagtacaactgcactttgtggcatcacagtttggttaattgccctagctggtggaataccatacaaatacttaggaggaacagctattggtggatttttattagccctattaagtattactatcaaagaatatcaacgccggagggtgatgtctttcatcaacccttgggctgatcctaccggagatggttatcagttggtacaaagtttattagcagtaggtacagggaaaacttggggtgtgggttttggactttctcaacaaaagcttttttatctccctattcaagatactgattttatctttgccatctttgctgaagaatttggttttgtgggtagtatgctatttttgttacttttagctgtcttcgctaccttaggattaattgtagccatgaaagcaaaaagttctatccatcggctggtggcaataggtattactgtggtgatgattggacaatcattattacatattggtgtggctacgggggcgataccaacaacgggtttaccattgccaatgtttagttatggtggtaattctatgattgctagtttggtggcttctggattattaattcgtgttgctagagaaagcagtgaagctgaggttttgtctttaccaattaatacaccagaaactaaacgtagaaaaagaatttagatttttcttggtgggtaattcccaccagattattaatatatagggtttgctgaaaaagttatctgtgaggggtaggagtatggctaacgccacgcttacttcgacaggctcagtacaagtcgctatcaaggagtcaggagttcaaggagtatggctacgccacgcttacttcgacaggctcagtaccagtcgctatcaaggagtttttttgatttggaaattgtgcaaacactaacaaagtgcaagctttcttaggttcacattgcctaaagcctggtacaattttaattttcatcatcctcaatcccttaatttatccaggttttacatttattcagcatcccctatatagtgatccgatttgattcatgaatttttcgtggagacagggaacagggaactgggaactgggaactgggaactgggaactgggaacaggaaagaaggctgtcagtatttatggtgagcgaagccgaaccatgtactgagttctgttcaaaaaccaaataggagtcctatagcaatcccaaaccattgataataaattgggcaaacatacataacttttctatataaaaatttataagcagtttaagcatttacgccataacagtttcatcattaggcaaagatattataacatttaccaagctagtgaggtacagagttttttggcgttagagaactcttaacaggcaacagtaaataaattagggtctacttcatgagattgagaaaagctatatgaaaagatatattaatttttttcagtaaaaccattagaaaagttaaattttggttaacaatgaaaaaaatgtaccgatgtgcggtatttaaaaataaggataataaaaagttgtgcatcacacattttcgcaccttggtagaactcaagataatacaatgcaaacaattcccaggctgaataacttagcatctactgaaatacccaagctagataattgtagtacccaaaacctacttaactattttgaaaattcttgggaactagaagcaaccctactcaaaagcataactagcacagatacattttaccgcagtcctgatcctttaagaaacaaattaatcttttatctgggacattccgcagttttttacatcaataaattaatacgggttggtttattagaaaagcgcattcatcctcaatttgaaattttgtttgaaattggtgttgatccagaaacaccagatgaactagaagcagcaacaaaagatatagtttggcctgatatagatcaagtttggcaatatcgagaaaaagccaaaaccgcaattacaaacattatcaaaaatacccctttaaatctgcccattgatcaacaacatcctttatgggctttattaatggcaattgaacacagtcgcatccattttgaaacttcatccatgttactgcgtcaattacctgttgatcaattaaaacgcccccaaggttggaattatgcgccgacaaatgggaaaattcctgaaaataaaatgatcgaaattcccggtggcgtggtaaaattaggtaaaaaagcaaatgatttaactttcgcttgggacagtgaatatggtagtttagaaattggagttgaaccgtttttagccagtcaaaatttaatcaccaatggcgaatttttagaatttgtgaaagctggtggttatgataatttagaatattggatgccagaatctagggattggaagaaactctataatgtgcaacatccaaaattttggatacctgattatatagccaacaataatggtaaataccgctatcgtaccacatttgatgaaatagatttaccattagattggcctgtggaagtcaattattatgaagcaatggcttactgtcaatggaaaggtggtaatactcggttaatgacagaagcagaatggaatcaagttttacaattttctgacggtgagggtttagaaagtgactataatctcaatttaaaatatgtttcaccttctcctgtagggatgttttccaaaaataagaaatcaggaatttctgatctacgtggtaacgtttgggaatggtcatctagtacattttaccccttaccaggatttcaaacccattatctttatgaagatcaatctgcaccattctttgataatagacatcaaatgatgttaggtggttcttgggcaactaatggtactatggctttaccatgttatcgaaattggtttcgtccttttttctatcagcacgttggttttagaattgctgaaagtttgaattagttgacaggtgacaggtgacagttttaaatttctgaaaaccaaaattgtaaacagttaatttacaggatatttaccatgattgcaaaaacattgaacccacaaattttaacagttttagatcatcattatcaagagttagctattgatggcaaagatgtgattgagggattaagtaaaaagcataaaactttatcaccaaaatacttttatgatgatcgtggttctttgttgtttgaagaaatttgtgatttacctgaatattatcctactcgtacagaagcagctattttacaacaatatgctgatgaaattgcggcaattacaaattgttgtgagttgatagagttaggaagtgggagttctacaaaaactcaacttttattagatgcttatcaaaaaatagctgataattgtcgttatcttcctattgatgtcagtgggggtattctcaaaaccagcgttttacagttacaagagaaataccctgatattgcaattcacggtttattaggaacttatgatcaagctttggtgcatttagaaagcaattatttacagtcacggatgttgttttttctgggaagttctttagggaattttaacccagaagaatgcgatggttttttaaatcaaatttccaaaaccttacaaactggtgactactttttactcggaattgatttacaaaaacccaaggatattttagaagcagcttataacgatagtcaagatgtgactgctgcttttaatttgaatatgctttctcatttaaattggcgttttcaaggtgattttgatattagtttgtttaaacatcaggcaatttataatgaggtagaaaatcaaattgaaatgtatttacattgtcaaaaaagccattgggtaactttggaagcattagatttaaaagtgttttttgaggggggagaaagtatattaacagaaatttcccgcaagtttgatttaacaaagatgtcacaacaactagaaagcaaaggattaaaaactatcaaaacttggacagatgaaaaaggatggtttggattgattctttgtcaggttgaataaggctgatatcagcactcagaaatcaagaatacaaatatatagatgtatctgtaatttttgtaaagttttgagtgttgagaatttatctatgttataaaattaaccgactcaaatatttatccaagatttaacttagccaaaagaggtacagatggaagctgtattgaacgcattaaaaagtattgactactctaatattcccatagggaaaatagctgctgttattgtcatactgacgattacacaaacattaagacgatttgtgttagcggttataattaaaaccattgaaaagttcacaagcaaaacagaaactacccttgatgatgaattaattgcgattattaagccagctttaaactggctaattctcattggtggattttggttgattaaggaaattctttccgaggaattaggttctaaattaacggatactattggtaagagtctgaacctaatagttatttttattgttggctatgttgtttatcgtgcttcgtcaattttaggtcaattaattgctaatgttgtcctgcaaaccgagactgaacttgatgaattactcagacctttgatgccgaaaatttttcaatcggcggcaattatcgtattagtaattaaaatcagtgaaatatttttaggacaatctgcggcggctttagttggattacttggtggtgctggtatcaccttaggtttactgttcaaagatattgtttatgattggttttgtacagtgattatttactctgataatctgtatcgtgaaggtgactgggtaggaatatcaggggtagatggttttgtacaaatactggagattggatttagaactacaacactgcatatagttaaatggggttctatcatgaaaatgcccaattctcgcatgatttctggaattgtagaaaattggtcacaaaatccaggggaagaattaaagtggggattgaatttaattctcagaattgatggtatttctgcaaaacaaactgcaagaatttgtgatgctattcaacaaatgccaacagctattcctggtttgtctcctaagtgtacagtgcgtttcaaaaacattgaaaaaaatgcccgtgtaattgagttgatggcatttgtaaatgatgataacctctattttgatgctgagaaaaacttaaatttagccattttggagcttttagaacaagagggtattgattctttgtatgtagagttgagaacagaaccagaaaaatacaaaccgatgcaaaatagcaacaattgaaaaaaatatttatggatatacccgaatttttcaaaaaatttgggtatttggacatcatgaatagaataataataaaattacctgatcatgaacatattaattactttagctgaagtttgcattttaataattgtttttataatatgcagatggcttgtaggtaagctatttaagctattggttagattatcaatattgaagggcgacgatataaaaatcaaaattctgcgccgcaatattactggtttattgttacttatttgcatattgttgtgcgttttcattgttggttttaatggttttatgacctatcaaggtgaggacttagaacaatataaaatagcactgattcgccgtattccatcaggattttggctggcattaggaattggtattactcaaagtattagtgttataattgctgcggcgatcgctctaaaagttattaaatattggttaaaaatagctagtaatcgcgctaagaacttagaccaaagtaccgccgatgatgaaagtatagatgctttttttacctccctcaatcaaaggattagaggtggaatttggttatgggtaattattgcttgtacccaatttcttaaattaccagatgtagtttccgaatatctatatattggactccgaatctatctgattattgctgtcggattactcattctcaaagcagtggccgcaattgttgatactctagatgttctgagtgtcagatattccagtcctgataacctgctgagattttatgatcgtctccaacacctgattccctttttgaagcggtgtttggaatttgtgatttacgtctgtacagtcacattagttattcagcaagttcagttaatagctaaactggctacctttggtctcaaaattatccaaatcatcgctatcatcttcttcagtcgtgtgatgtttgaggtggtttacttactattagaagaggtgctgttaaaaaatcagaatttgactgaaacccaaagaagtagacgtttaactttgattcctttgtttcggagtttgttgcaatattttatctactttagtgttgcggtttctatcctctatattctggatattaatcctactcctatcttagctggtgcgggaattgtaggtatagctgtgggattaggcgcacagacattaattaatgatatagtttgtggcttttttattctttttgaaaattactatttagttggtgactatattgaagctgggaaagctgaagaaaaagcagtagagggtactgtggaagcgattgaactgagaaccacccgtattagacatcctaatggtcaattacatattattcgtaatggggatattggctcaattactaattattctaaacagtatatatttgcggttgtggaagtgaatgtaccttgtgatgctaatttatcacatatatatgaagtaattggggaaataggacaacaattaaaagccagtgatctagatgtacttgaaccaacttttgtagaaggtgtagaaagtttgagtgaatctcacttgttattgcgaaccttaactaaggtaaaaccaggaaagcatttgcatattcagcgtgttcttcgtaaactttatatggataattttcaaaaccaaggtattttactgccggcgactattcccaagagtgaagattaatgttttatgttatgtacatatcaaatcaaaacatcatctttaatcaatttaggtaagttaggcagttagttaagttttgtttttgtgagtcttccctagtatgaaataatgataggctacagaaacttcataaaaatataaagttcactgttgcgaaactcggttatcaataattgaaactagcaaggattaacagaggatgattatgaaatcaaaaaaacacagcatcggattagtagaagttcccgctttgggattatatgacgaagaaggacataattggacagcattatatagacgcaataccttattaagtaaacaggtattaatggcagatttacaagctggtggttttgatgctcaacttgtgaatttgaaagctggtgattgcaaagaaccctttggagaagtaacttggaaagggatgaacttgaccaaagcctatgtaggtcagagaatttatgatatagatccagaagcttatgatgcttggggaataactgttaattatacccaagagcgccaagtaacttgcatggcgatcgcccattttgccagtaaaggaaaaccagtagttgtaggtggttcagatgcgatcgccgaacctcgtcattatttagatgcaggtgcaacagctatagtaattgataaatctggagcagctaactggccgatttttgactatgtactcggtaaaactcccagagaaaaactcacaggagtaatattagccgatggtacttatcatcccacacgcccacaagccatgagtcccgatgaatgggcattaccatcggtagaagtagccagacaatgtttaggacaagaatattcagaagaaccctttgtagaagacttagtacccataggttcggtatatcctgacattgggtgcgatcgcaaatgtgacttttgccaaacaccaacctacacatcaggttatcggcgaatgttaccccaaactaccatcaattggattgctagacaaaaagaagccggcgcaaaatgcacagtcatgggttcagatcaatttctcggccgggtattatttccagggggaaaagaagaaattatcgaaattaccacagcagcgcgagaaatgggaatgccacttttatggcctaacggtttagaactcagaaaagccacattaggaagaggacgcaactacgaaaacacagacctcacacccgacgaagaactaatagaagcactgtggggatgggatggcaaagttggcggatttttaggttatatacccgcagaacgtcccgttttcggtacaggatcttacaaaaaactcctcccttggcaacaacattgtgaaatgatgcaagctattgtcagagtaggtcttcccgtcatcgtttatggtttaattattggtcttcccgacgacaaccacgacagtttacttcgtctggaagaagcagtttcagaactccatcaacaactcagagaaattaacccagacttagaatttcaagtagcttcctatgctatttctcccatacctggaacaccccaaggagaaaccattcgtcaatcaggactactacgttttgatgatccatctatagttggtggtttatggactcccagttgtgacacacaccatctcagctatgaagatatatccgaatggcaatttagactagctcaaatcggtaaagctgaatctaaaatcatcaactatcatggaggactcacaaaaatagctgctggtgtaaattagtttgtcacgtgcgtcggatatcaaaaataaacttatttgctttgcaaaatttatgcaatctgacgcaccctactaattaactctatttctctctgcgcctctgcgtctctgcgtgaataaaaattatcccattagttcaggaaataaatcatgatcagaccacaacctataccaccaaaaccaggacaagaatcagtttgggactatccccgtcctgctattttacaagataccgacaaacatctcaaagtaatttgcaatggtattgttttagcagaaaccaccagaggaaaaagagtcttagaaaccagtcatcctcctacatattacttccctccagaagacatcaaactagaatatctaattgaaacaccaaagaaaaatctctgtgaatggaaaggtgcatatcagtattatgatatcaagattggtgataagtatatcaattttgcatcttggcgatattttaaccccacaccagattttctacccattcaagaatattatggttttatcgcagctttaatggatgcttgttatgtaaatgatgagctagtaaaaccccaatctggtgatttttatggaggatggataactgcggatattgttggaccatttaaaggtggtccaggtacttggggatggtaaataagttttcgtaggttgggttaagcgataacgcaacccaacaaaagcatatcaatgttgggtttcctaacgtcaacccaacctacttttctgaataaaaacttaaatcatgaaaatatcagttattaaaattgacagtttcaaaattcacgaacatcatctagaaattatctacagtgcagataaatttcaattttccaccaagattttctatcatgatgtttccttttctggtttaatacaaaaatattctcaacccttcatccagaaaattgtcgctcacattgccttatttgaaggcatgaaattttgttctttatttcctgcatattatgatatttctgtcattgcggaatatcttgaacctgcggttttagatttgtttgtcaaaatctatcaaggtgtatttggacaacattggtatgaaaataatatcaccgactatcaacaaccagaaattatcacttcccaaaaattaggaatcagtcaacctggggaaattttaggaaataatcaaactattctcgctggttgtggtggtggtaaagatagcattttagctatgaaaatgttagaagaagcagatattccttttgcttccatgcagtattcccatagtttttatggaaaagctgattttcagcatcatttaatttcccaagttttagaatgtgttcaaccaacctctaaacatcgaatatctatttttgataatttcacagaatttccatttctgaaattatattttcctgaaaattcgggtattactgcaccagaaacaccagtttctatttttgaatctttgattttaatgttagataagggatataattatttatgtttagcccatgagaaaagtgcaaatactggtaatttattttgggatgaaatcggaaaagaagtaaatcatcaatggggtaaaggtttagcagcagaacagattttagatcaatttattcaaaaacacctattaaccaacttcaaatatttcagtattttacaaccaatttacgattatcgcatttttcaaaactttagtaaataccctgaatttatcccaaaaatacattcttgtaatatccaaaaaccttggtgtaagaaatgtcctaaatgtgcttatgtttggttaggtttaatggcattttcccaagcaagtatagttaatgaagtttttaaaaacaatttatttgatgatgtagatttacttcctactttccgagaaatggtaggtttgggtgaacatacaccatttgaatgtatcggagaaattgaagaaagtaggttgttgatgaaaagatgtgtagaaagaggtttaacaggtaaagctttagatatgtttactgaagaaattttagcagatagtagaattaattggcaggaaatagaacagaaatataattctgtttatagcacagaacacgctattcctgattggatatttgagaaaatcaaggaacagttgtaattgacgatattggactatgctaattcttttttgttgatataataaaattgcgagttcagttttaagcatataactataagggatgatttcagtcatgaacaaatcacagcttaatctgatattgcaagaagttaaacgagctttgcaaaatctttatcaagatcaattatcagcgataatactatatggttctcaagcgagagaagaagctaaagaattttctgatattgatattttgatagttctcaaatcagaaattaacccctatcacgaaattgatagaaccagtcagataatatctgaaatttgcctaaatcatgatgtggttatttcccgtcattttatatcttctgcaaaatttgaaaaggaaaatactccctttaattataatgtcaaaaaagagggtatttttctatgaagaatgtattaatattcactagcagttgttaaaatatgattgtagagtttgggactaattctaaatcctgctatatttattaaatcatccactatgggtttaatattgttaattaatcccctgtgtttaacgattaagagaactcctaaaattcctgtgacttttaatcctaaacgagaagctacaactctacccttatagtcatctataattattctatcagcttttatttccatcgctaatgctattgcctcagcttcaccaggatcaatttctgtttttaattctgcaactaatgtagaattgctcacgggttgaacttgaatccatgctagggttttaacttcctttgttcctggaacttcataacttaaatttgacatttcgtcataaacagcttgagggataataatagtatcatagattttttccaatatatctattctctgaatagctgctaggttggtaataggtgaagtattgctgacaacaatcataattcacctaattctttcaatgttctgatatcatcctcaaaatcttcaacaccataattaatgcaaattccccgacttgccatttctttttgaaattgaattaagtgcattcctgctaaatggcgagcttgacctatgctaattcttttttgttgatataataaaattgctagttcaactttaatatcatccgttgagatttgagcagattcaagaatttcatcaggtatagtaatattcatactctgctatcttgtttcaaatacttactgataatgcacaagtgttgaatcctgcaataaaactttacaatcttttcgttttacccaggtaaaatccattgtctattgagaatagagtcattaattgctcaaatttggtatcaccaataccaatgcacaacttggacaaaatcctcaaaatcttaacattcaacacttctgctgataatggtaacacaaaattcatattatttctcatatttttttagatttttttagattttaaccactcctttaccacctcttccacaggttgagattgattatcaacttgataattcatctgctgtatttctgctgtagaaattttacccgctaatttattaatagtttctactaactctggatatttttcaagaatttcttgattgaaaacaggtactgcttcataaggtggaaagtattttttatcatctgctaacatcactaaatttaaaacttgaattaacccatctgtagaatttgtagctatgaaatcaacttgtttttcttttaatgcttgatacatcacccctaattccatttgtttaatattagcaaactttaaaccataagtttttgagaaaccaggataaccgtcagcacgttctaaaaattcataaccaaaacctgcttgcatttgcggagtatattttgcaatttctgaaagggttttaacttgccatttttttgcatcttcagcacgaataagcatcgcataggtattttcaaaacctaaaggttgcatgacggttaaattatatttttcttgatatgcttttttagttctttcataaacaacttgcggatctgtaatggttttttcttttaaaactgctgcaaatgcagtacctgtatattctacataacccgctatttttccagcttttactgcttcatgggcaataaatgtaccacctaagttaaactttctgtctacttttaaattagtattgttttctattgtttgtgctaatatttcacctaaaattacttgttcagtaaagttttttgaaccaatagtgattgtggctgatgtttgctgagagttaaatacaaataatccagatataataaaggcaattattcctaaaataactgccatttttggtttatttcctgttggtttattaagggttttttctaaaaaacctaatccaaaatctgcacctaaagcaattaaagctgcgggtattgcacctgctaaaatcaattcattattaactgtagaaatacccctaaaaataaagattcccaaaccaccaccaccaatagcagcagcaatagtggcaattcctacagatataacagtagcaactcttacacctgctaagataactcctaaagctaaaggaatttctacttgaaataataattctctatctgtcattcccatacctatacccgcttctttaatggcgggatcaatgccattaataccaatataagtattacgaattatgggtaataaggcgtaaagagttaaggcaacaatagccggatttttacctattccccccaaaaagggaacagaaattaaaaaaccaaatatggctaaactgggaatagtttggatagcgtttgctaaacccaaaatcggaggtgcaagttttggtttacgggtgataaaaatacccaaaggaataccaatagaaatggccactatcatggctatagctactaatattaaatgttcgccactgcggaggataatttctgaagcatatttaaataaaaacatgatttttgattgttatatatttttaattgatgtatctgaagtattaattcagagttaataaagcgtttaaattcaaccttactccccactcctgactcctttcttaattaagttcttcccaatgttttaaagcattcaaacaagataaaaaagccagtgcttcaggatgctgggatttaataaattctcttctcgttcctaaagcaactaaatttccttcatacattaaaccaattctggaagctaaaaagaaagcttcttgaatatcatgggtgacaaatatcacggtttttcctaattgttgttgtaaatattgaaactgttgttgtaattctaaacgagtaataggatctaacgccccaaaaggttcatccattaatagtataggtggatctgcggctaaagccctagcaactcctactctttgacgttggcctcctgatagttgatggggataacggtgagcaaactttttaggttctaaacctactaattctaacatttcatggactcttgtttgaattttatttgctgaccatttttctaaagatggtacaattcccacattttcagctacggtaaaatggggaaataaacctgtttcttgaataacataacctatgcgtcttctcagtttaattgcatcccattgggtagttggttttgactgtactaaaacctgtccttgggtgggtgtcagtaaatgattgattaattttaaagttgtggttttaccactgccactacgccctaataaaattaatgcttctccttgataaatactcagatttaggttagataatagaagacggtgattaatttcaaaactgacatttttaaattcaactgctatttctgatcgtagagacataaaagtttaataaaaaatccaaggtgattttctcgttttctcgttcccagtctccgactgggaatgctatcatagagtctctgactccaattttccctaactctaattttactacaaaaggcagagcctttaacaattcattcccatacagagtatgggaacgagtaattatctctgataactgataaatatcaaaatttgatagttgcagcagtaatagctaaagcaacccaacctgccattaatgcaattcctcctaatggtgcgatcgctcccaaggattttataccagaaaaggtaatggcatacaagctgccagaaaaaatcacgacaccaataataaataaccacccactagctaacagagttgtaggtggagtttcaaagcgactgatgatgatagccactaacaacaatgccagggcatgatacatttgataacgtgcgccagtgtcgaaaatttccaacattctttcactgactttttcccgcaaagcatgagcgccaaacgcaccagcagctacagataaaccaccgaaaatagcgcctacagtcaaaaaaatctgcgtcattataacctagctgtaaatgagcaaagtgacattaaacatcaaagtgatatgatacccctcctgcttcattgacttgaaaattagcattaaattctttagctttttggtctaaatattctttagcttctgttgctggtaactgtgactgcatggcaaaacttaacaatgtgattttgccattatttgcttgtaacatttgataaaattgagattgcaaattctgatttttttgttgtgtcaacgcttttttatcttgtcggctttgcttgtataatcctaatgctaaccatccacccaataacgccgtaggaacaccaaacatgatcccttgggctgctgtattatcaagttgatatagcgcctcgtgattgataaaatctttggctagtgcttcatcttctatccctggtaaaataggcttgaatgtggtatttttggcaattaccgctgttactgatgtcgttaaaaacatgaatccgagtgtaagcagccaaccagcagccaatttttccgccgttttcatagttttacttctgagttagactttgcttgcgattttaacctgacttgcttttatgttccactaatattatctcgttcccagtctcccactgggaatgcgatgaacaggctctgcctctgatttaatcgcagccagagtctgctacaattcattcccatcattcccatacagagtatgggaacgagaaacaagtaatttttaccttgtagcttctaacaagcgggaaaaatagaaacgggttctagtcatggcttttctttgtattttaaagccatttttctccagaattttcactacatctgcttcacggtgtaaataagcacgagttgttttacttggtcctgggaagaaagtacctatttttttgaggatagacagaaaaaaggtttttggggcaaaactaatcatgatgcgtgattgtgccaaagaacagaggtgagaaatcatttcatctgctttttcttgggggtaatgaatcagcacatccaaacaaataactgtgtgataatcgccacttaaagattctaagtcttgtactgtaaaatcaggattaactgtattttttaaagctaatacagctctatcctgtgcttctgagaccattttggcggaaatatcactagcataaactttagcaccttcagtagccaggggaatactgagactaccaacaccacacccagcatcgcagatggttaactgggataaattgttatcatcttttaaccagccgatgacggtatctacggtttgttgatgtccagtacggatatctagctgtactttgttgacctcaccatctccatagatgcgtctccaacggtcaaaacctgtagagttgaagtattcgcggactattgttttatcgtcggctgcgttcatgaccttaatttttgacagttaacaattcttaaaattataataaaataatgtcagaatttagaagtcaggagtcagaatttttgataatttttgataaattgatagattatcaaatagtgatttttgccttaacctctcaaacattgacggctgaaagctgatagatatttcatgatctgccaatttttatttactttgtaaagtaatgatagtcacttctggcggacaaaataaacgtcctggtaaataagtacctaaaccgcgattaatatatagttgatttttgcctattttatggaaaccttgtgaccattcccaatgattaaatacagggtgtttttttctgaaaaatggtaggaaattttgtaatattttgggtgttattctgagaattttatgttgaatcattaatacaggacccaacccaggaataacgatttgtccaccgtgagtatgaccagataattgcaaatctacccgccatttttgcaatatttctgctgtatctgggttatgggataaaactatgcaaggtgtatcagtatctagttggttcatcactggtgtaggattaaattcttttgagtaaaaatctgctagtcctacaattggtaattcttttcctaatggataggaaatttgattccaaagaacatgaatacctatatttgttaatgtggttgtaacttcagtttgggaatttttataatataaatcgtggtttcccagtacggcataaataccatgacgactttgcaattttttcaggtattttgctagttgatcaagggttgcggtgctggtggtgatgaagtcgccggttaataaaattaagtcgggttttgcttggttagcgatggcgatcgcctgacttaacattttatctgataaccgtacaccatcatagtgaaaatctgacatttgcaccagttttttaccttgtaatgatgcaggtaaacccgcaatttttaccgttaatttttctgtcgtcaacggtccagataataatctgtgcataatgattttgatgattttgaatagtgttatttataagttaactgaaaactttcgggttgtttgtaggaataagataacttttagaaaattttacaaaatttgtgtatttttacgtgtttttatttaaactttttaaacataaactttagtttttttcaaatccctgagttttttacgaggatgtttaaaaagtagtaaagtttacagaattagggcgggcaagacttgtactgagcttgtcgttcgcgtagcttgtcgttagccatagtatgcccactccacaaaagctaatgtcaaccctaacaaagcggataaattctgaaaacctactctaaaacaggaggtagagatttggttaaattctccccatgactcaaatttcccccttgaacctgggaagttaaaacctgttccaaaacctgcatgaaaattctgggatggaaaaatgccctgggaggtttgatcatgttgattacttctaaaaacaactgatgaacttcgccacttttgctttgtaaaaccagcacttgttctaaatatttttgcatcattttattaattaaactgggttttcctccctcggtggtagaccaacggaaatcttcacctgtagcaatcatccaaggtatactaattactttgttaagttgtttttgaaaccgtcgagatagaccagttaaattttcttgcttacttaaacattcatccagagttacagcacctaaagcagcggtagtcataccttgaccgtaaacaggattgaagctacaaacagcatcaccgactactactaaattttctgggaatctagacagtttttcataatgacgcagacagttttctgtgcgtttataggcgtaaattggtgaaattggttgagcgtttttgatggtttcgtaaataataggcgatcgcaaactgcgagcaaattccaaaaaaccaccctcatccgtaggtggataatctcgacctatacccaccaatgtcacaatccaccgattaccttcaactttataaatcacacccccacgagtacctggtggttgtgctgttatatacactgaatgccaatctatttgcaaatctgatggaatttgataccaccgactagcgtagcctaaaaaagaattaacaattgtttcctgggttggttcatagcccatttcttgcaaccagtagggtgtgcgcgaagttcgtccagttgcatctaccactaaatccgcaaatatctctatttccggttcattaccagtgcgtatctgtacaccagtaacctgagttttgtccgcgtttgataaaaagctagttacctgtgtacctaacctcaattttacacgatcatttgccaccaaacgccggcggataatccactctagcaaattccggctacaggtgtgggtagctaaatgagagtgaaaacggggacaccatccgctagaacccaaccaaggaacatccgctgtccaatttacaaaaggtgtacctgactctgctaattcagcaagtataccaggaaacaattgttctaaaatctgttgcccccgtatcagtagggcatgaacatgaaaagattggggaacaccagggcgtttttctggttgtgcagttgaccctagcaagtccttttctacaattattacacggtcaaaataccgagtcagcacctgagccgccaacattccggcgatgcttcccccaatcacaacagcagttttttctgtagatgtggaattatttgaatacatcatttcaaaatagactgagttaaaacaaatttatgttacatatcagaattttatcaaaattttgtggtttgggcatggttcgacatagttcgactccgcacttcgacttacttcgactacgctcagtacaagtcgctcagtacaagctcactaaccgctgagtacaagtctttcccgacctaaatatacaacttaaattatccaatttttgctgatccaaaatcaccattttaaaacctctttcctcatctcctctatatctaaataatcattgacaaatgcttttcttaacaactgatcaggaataaactgatcatatttttgtaatttcggtgcttctgcatgactcactaaatgttctgctgtaattctttgctcacataaaccaactatttctgaataaacagcagaaaacttatccttacccactttcaaagtcaaataataaggatttatcccaccaatactactaatctctaaagattctcgacaaaaacaatttaataatctttctaaagttcgataacctaccgtacccatccaaggaaaaatacaacatttatttttatctaatttgatcatattacttttatctaatcctgattttctagataatttcctcacttcctgcaaacgcaattgagcatttttttgtaaataactatattctgtatcttctaacaaaacctgacgcattctttgtaaaattctcccatgaatattcccacttccaccacgccaatagatattatcttgaccattagccttaccttcaacttgtttaaccaaaatcacctgctttttaaaatcaacttctaacacttcccaactcttaccagctaacccaaattgattacccacagcaggaggtgtagcaatactacctatttctgttgtcccttgtttcacagtatattcttgatagtcagcaaacacagcataaaactgaaatttattaactactttttcccctgctaaaccaataattaatttaccagtttccgttttttgaatgtgattaatatcaattaaataacgaagtaaggttttataattatcttgggaaatattagcaaaaggtgataaattcaaaatttgttgagctaaagcagcaggtgaaattgctcccgttgctgctaaaatactcatagtttgatgataaagtaaactaaaaggatatttaattggtgtaattggttctatccaacgttcttctaaataaagttgaataatagcgatacactgtaaaagttgccagggaatttgatctggtaaaaaagcttctgataatggttttgcttctgcacaaataaaacgcatatccgcagtttctccccttctcccactgcgtcccaatctttgtaaaaaacttgcaacagatacaggtgattctaattgaataactctttctaaataaccgatatctatccctaattctaaagttaaagttgccgcagtcaccgcaggagtattagcttctcgcatagcattttccgcagtttgtcgtaagctggcagaaatactaccatgatggacatgatatatatctggaaatcctgcggtttgtgctatattccgcaaagaagaaataacagattctgtttgattccggttattagcaaaaatcaaacatttacgagatttggtaaggttaaaaatatatttttcataatcagattcatcaatatcttcattaatgaaaaaatgttctaaagctagttttaattgtcgctttcctgcttcaacatttggagtaattactggtttatctgttcctgaaattaaccatctttccgctactgaataatcaccaagagttgcggataaaccaatgcgtctaggttgaattttggtaaatttggctaatctttgtaattgacaaagaatttgacaacctctttctgaacccataaaggcgtgaatttcatcaataataataaaacgtaaatcagcaaataatctgcttaattcctgatgtttattgattaataaactttctaaagattccggtgtgatttgcagaatgccttggggattttttaaaagtttgtttttgcgactttgagatacatcaccatgccaagaatatacaggaatatctgcggtttttaataagtcattgaggcgttggaattggtcattaattaaagctttgataggactaatatacaatacacctatagtagtagatggtttttcctgtagtaaagttaaaataggtaaaaacgccgcttctgtttttcccgcagcagtggcagcagcaaccagcaaatgagcatcagtttgaaatataacttcacaagccgcaatttgtactggtcttaattctgtccaattgtgaagataaatgtattcttggataaagggagcaagtctagaaaatgtgctgttactcatagatagcaggatattcacagaatgttggatacagaattttgtgttttatattagttgctgacttcagtaagcttacagtaagctagtaacaagaagtcaagtgatcaatttaatgaagttgtaaaattaggaaaatgacaaatcaagatgcaggtgatcttaccaaagagaagttattagaacgctatgaagtccagcaacaactaggtaaaaaagcaggaaggaggacactgttaactcgtgacttacaaacccaagaactggtagtagtgaaattactaacatttgatgatgattttcaatggcacgatttaaagttatttgagcgggaagcagaaaccctcaaatcactttctcatcctgctattcctcaatatttagattattttgaattagacacaccaaactacaaaggatttgcactggtacaaagttatattcctgctgaatctttggaaatgcaactgaaagcaggacgcagttttagtgaaaaagaagttaaacaattagcaactgcattgctagaaattctcaaatatttacacagtcagcaaccaccagtaattcatcgtgatattaaaccgagcaatatattattaacaaatcgctctggtaatagtgttggtgatgtttatttagttgattttggttcagtgcaaactattgttagaagtaatagtaccatgactgttgtgggtagttatggatatatgccacctgaacaatttagtggtaaagctagtcctgcttctgacttgtatggtttgggtgcaactttaatttatttagttacaggtcaacatccagcagatttaccgcaacaagatttagtcattaaatttgaagaagctgcaaatattagtcgtgattttagtaattggttgcggagaatgacacaaccgatgttgagtaaacgttttacttctgcggatcaagctttacaagctctacaagtacctattaataaaattcctgctccagtaaggacatctaatttgattttagaaaagccttttggtagtcaggtgatgttaaataaaaatgctgagtttatagaaattctcattccccccaaatcaggaatgtctaaggtaggggtgatgtttgtttggtattttacgactgttttaccgctttctattgttttttccattttttcacctatatttggtatcctttcacctttgctacctacacttaatatattcctattgatttttatcgttctactgtctttatttggcaaaaaaagactgtatatcaataaacgagaaatttctttatgttatgacttatttggtatgaggcgctatcatcctcttcccagtcacagaaagaatattattcgtttggagcgtggtagtatatattataatcttgctcctcatccctgtttaattatctgggcggggctgacaaagtatgaaattaataccagtcaaaataatatgttttctgttagtaccatagaattagattggttagcacaagaacttagtgaatggcttggtttaccaattacaaaagagtaagttatcaattgataattgataattgacaattgtttcattcaaggtttaaaacctgtaagcattcagctaacacctatggcttgcgtgaagacgtaggagtcatacggtaagttacgctaacagtagtcagctttgtaacagtcacaccatcgaaaaaaacgaaataatcataaactaaattcggcagcatcatcatctaaatagctatctttacctgctaccgtaagttgaaaattatcaccgtgaattaattcagagaatttaatttctgggttttgataaagaacatttaacacactaataaaatcccgaattatttcccctggtgttaataaagcttctgcacctaagcgagtcacaatttcttggacaaattcttttaaatctgtctcttttaatcttggttcataaccaaaatttaaggcatgaatttctgttaatctttgcaaaagtgtaagtatttctgtttccgttaaggggtgcagacgcatcacagtcccgatgtattcttgtacattagcttgggtaacaaatcggctttctttggtgcgtctgcgccaagctggatcggcaaaaagtccccggtttgggtcttctaaaaattgagtagttccaccaatgaaaatccccagattttcggctttacattgcatggtatcgttaaacattcccaagagtctattatagttcttttcacgagtaactgtagtggatatttgatataaatttacggcttcatctagtaaaattaacagtcctttatagccgatttctgcaacgaatttagctaataatttaatataatcataccaagtttcatcatcaataatgacacgcactcctaaagctgctctagcttcagttttggtgttaaattctcctcttaaccagcgtagggaggcgttttttaattcttcatcatctaagcgataactgcgccaataagcaataatgacactaccaaaatcaaagccatgaactaagtcttcaatataattaattacttcccgaattttggtttctacttggtcatcaaaacctgcatcattgggacgcattcctgtttctttggctacttcttgctgaattttattaatccatccttctaaaatggaaattaaagcaccaccatcaggacgggtttttgtagctaaacgactcattaattctcgataggttgctaacccttcgttgttgcttccagctagtcttcttccagaggataaatcaacatcagcaactacaaatccttgctccattgcacggttacgaatcatctgtagcatgaagctttttcctgaaccgtaattaccaatgataaaccgaaatgcagctacaccttctgctatatcattgagattttgtaagaggctatttagttctttttctctacctacggctatatgttcaattccggttctgggaactactcctgcacccagggaattgattaaagctgtggatactttttttgatattttctgtttgctcatgtagtttggattagtatttgttattaattgattttttcttcaaagtatatataatatattatatcataaaagtacaattttttctattcaatcaacggttaaaattagtttggttaaaattagcttggttaaaattagcttgtaaatgtagcttgtaaatgagggctatttatttctctaatcttcatgaattgctataattttttggacattgagcagatgttctgggtaaatttccggtttgtcttctgctgtttcaataattaattcaccaatagtatttttggcgatttcattgatagcatcaattaataaattaggcatagtgatttgtgcttcggcaatttgtttaataatagcttggggattatcatgttcgattatggcttttaatacctgaatttgatgggttggcatttgtgctaaaaaattcctccattctgaaggtagcttttcttctataggttctagtaattcatcaaagggaaataattcaacttcattttcctgggtattatcagataatggttcttgattgaggttttctatgttttgcaatagttcccaaacttggttttgtaataagtctcgctcatcttgtaataaggaaatttgattgtgtaattggctaatttctgcctgttgtgcttgtttttgattttgtaaatttttcagtttattttctagattttcttgggcgttaattgtctcttttaataagttatttttagtgaagactttgctttctaagtcttggatttctattctcagttcatagagtttttcttctagttggggtttgagtctattggagagaatcaggtgattttcgatttcttctttttcttgcttgaatgcttctatttgggcttgtaattgggttatttctgaacgggatacgttacaatttagctctaaacgacgtttttctgccgttagttcagaacaagattttttgagttctattgtgctgccttctaatttgtctatggcattttttatagtattaatttctagctccaaatgctttttttgtccagcaaaattacctatttctcgatgtaaattatctctttgattacgagattctgcgatttgattttgtagttgctgtgattctgtatagagaagaattttatgttgttgtacttgttctacttctctggcaatgcgatattttaagccttccaattctctaatttttctatagagagaacttaaaaccatcagttcataatttctacgtcttttatccacaaataaggcggctgaataggtggcaagtacggtaatgattccagtaactaaggcttgagtaaaatcccagttgggaacaagacttaaaccaaaacttacactaaaggctgatacccctaaaatcactttattgcttactattcctgattgcattttgctggtttttagcttattaatctggtgagaatcagtagttgttaaggtcattattgttcacattttattgaaggtcagggtgtgttacagcaggagtcagtggttcggcttcgctcaccaaccggagtcaggagtaaaactagcttagtgtataggtttcaatttagattctgtacctcatggatctgcaatctgctgtatttaaaaatttaatagtatagctgtcgctaagttaagagttttaaaagctgactgctgattgctgtaaattaattacaggctattaattacaggctgtttttattattaccatacacagctaaatctgcttttaagaagtcaataaactgccgtgctgtgcggccagaacggccattatgacgagttgcccattgtaaagcttgaaattctaaatcttcgggtttaagattaacgcctgtttgtactgctaaatgctgaacaatgtgtaaatatgttttttgatctgcggcttcaaaggttaatgttaaaccaaagcgatcgctaaaggaaagcttttcctgcattgtatcccaagcatggacttcttcgttatccttgggggtaggtctatcactaaaatactctctaatcaagtgccgacggttggatgtagcataaacaattacattttctggtctagcggttaagctgccttctaaaactacttttagtgctttaaaagcatcatcatcttcctcgaaggaaagatcatcgacaaagataataaatttttgcggcactcctcgtaaatattcaacaatttttggtaagttttgtaattctgattttgccacttcgattaagcgcaggtttttgtcgctatattcgtttaataaagattttactaaagatgacttaccagaaccgcgactaccgtatagtaatacgtgcagtgctggttgtcctgacaataaaaacagggtattttttaacaaagcatctttttgccaatcgtaacctactaatgtatctagtttaactggatcaggatagagtatacctaaaaactgcccatcttgccacctaaaagcgcgatattgggcaaataaaccagtgccatgctgttgataataagcggctaagtcttcaacagcatcagcccaagtatctaattgttgtaaagtgctgattaaatcagtatcaacttctactgcttggggttcttgataccagacgactggggaaactggcaaatgagataccacttgcacccactcacttaaaacagcactattacattcatataaattttgtaaggcttgtaaatcatgctgggctgctgcaattaaggctggtggtaaatcagtaaattctcgctgttgagctagtctggtaaaggggttatccgcaatgagaatttgtttaattaagtattcttcccaggtttgtttactggctgccaaagcttgaaaataattaccgtaagcttggagacagtcgcgcccatctgcgtcagtgtaacgtatagcttgcagcagatcaagaaatgcgatcgctacttcgcctttaagaactgattggtaaattaaaagagacgctgcttggcgttggaagaattgaactttggtgtaagacgaagtatttacggtagacattccttgatcatccatcaattaactgtatttgtctgctcaatctaaaagtaaaatccaaatcaacacaggctgtaacaatgaatttaggtatagttgccgcttttggctacggcattttagcattattaggcggaatcattggctacatccaagccaagagcaaagtttccttaattagtggtataattagtggcttattcattatctttgctgcttactgccaacttcaaggacaaagctggggtttaagtgtagcagcttttgttattggtgtgttagtatttttcttttccattagattggctaaaacacggaaatttatgcctgggggattgatgattatttttgggatcgtgacattagtagtcatattgaatcaaatttaacgaaggcaggaggcaggaggcaggaggcaggagtcaggagtgaaactggcgaatgtgtctaggtttcaattttgattctgtacctcgttgatatgcaatctgctgtatcagtaaagataaaagttagtgagtaaatttggtctttacaggcgaattttcgcccagatgaccacaaatactgttaaatttgaaacatactgttcctagtaagtctgattttagtacaattatattataaataaaggcgtgatttttatgacacattgagggtatggataaaaaaaatccttgagagcaaaggatatgaactagcaattattaaattgttagtaaaaattacgattaacaagatttaaacaaagaactctatatatactagagttagtattatcaatagtgtaaagattttatggtatcttcagtatactttaaaggaaaaataaaggtaaatttgccatattggcaggttttcctgaaataaataggatattactagatagtagcaatctttattaatgtttgcgctattgtagctatctacctaatcctaagcagaggaaatcaaggcatacctaagtaattctttcagcaatttaagcaactaggaaattaatacatgatattatcactgtcttctcaaaatgttatccagtatctgcacaaagcaggtctgtgtagctcagaagatggcgcattatatgaatctgatttaccagaaagtggcggtaataatcggaatttactggtgaagctggcagataatcgtaaacttctggttaaacaagaacgatgcaggaattttgatagcagtccccatgaattttttaatgagtggctgtttcatcaattactggataaatttccagtgctggggaatatttcggcgatcgcatcattattggtccattttgatgcagaaaattatatcctggttcgtagttacctcagcgaatatatggaactggggaaattttacgaaaataacagtattttccccattgaaattgccaccgccattggtaatacattagcggtgttacatcgttctactttccaaaaacgagagtatcgtgattttatggatactgctccccaaggacagtttcgctatcactattacaacccagcgcaaggaataggatcaataaatcaagatatttttggcaatattcctacagaagcactcaaattgcatacactctatcaacaatatgaaagtttagaatcagcgatcgccgatttagcttatgaatggaaaccttgttgtttaactcacaacgatttacaattaaacaatattttggtgcattcccgttggcaaaatctagataactgtttggtaagattaattgattgggaagcttgcacttggggagatccagcctttgatttaggtactttactaggaagctatgtcaaaatttggctttctagtttagtagtagatcccagtttaaatttagaagaatctctaaatttggcaatcattcccttagaagttattcaaccttcaattttggcagttatccacgcttatcttcatgcttttcccataattttggattaccgtcgggactttattctgcgagtgattcagtttacaggtttggcactaactcaccaaattcaaaacatgattgagtatcacaaatactttgataatacccacctgtgtatgctagaagttgccaaaagtttgttaattatgcctgaacaagcagtattaactattttcggcagttccgaagcagaaattctccaatcagtaaccggattaaacaccaaagctaaacctgaaaaagaaaaacaactactacggatttattacgaaaaaactcgcctacgtggttgttagtattttaggtaatattttaggtagtattttaggtagtattttagatgatattcaaatttggaggtgcaatttcttcatgttagataactctactaatcaaattctcaattctttatttgatattgccagcaatattcagattgccccaaacttttgtattcaacatcccaattatcaaccttttgcattgccagcgacagtagcgaatagatttaaacacaattcaccagatttacaacataaatatctggctttactattgcggaattttctccacggtatttattataatggttcgctgcaaactgttttatcagtcaatgccgaagatggtaattactcacaacagaactcacaacagaaaagtttagagcaaaattataatgtgggtattgattgggatttttatgagcaattacaccaaaataatcatggtataggtaactatgattctaattgggaagtattaagacgagaaccagataaaactctagcagtaactaaaaatgggttaacattatatgttgaaccagaatgctatctcaaatcaagtaaaaagtcgataaaagtaggtgatttaatagcaatttggatgccaaaaaaccgtttacaaaataactgttatgtggcggttagtaatttaggacaacaacgccaaaatacatccgagactaatctaggagtagggcgaatttattttaattttagtccatcaggtgcgatcgctctcatggataccctcacacaacaactcaataacgaccatattccctttagttttgaagttctttataaccccggtgcttatgggcggtatgatgctggtacactttattttgaaagacaagattaccccatcattcacaaaattcttcagacagtttaccaagaaaatcaatcttattttcacccagaaattcccctatttaccaaatatttagcacctggactgagtttagcagaagaaccaaaccaaaaatttgccgcccaggaaagttttgggatgaaccgttgtcaaatagttgctaatgctttgttagaagcttgggaaaaagggaaaaacgccattgaagaacgtatacagattattaaccaacactttgcacagcatttaattgatgtacaacgtccttatcttaaccccagttctgaagatatatatatcccattaaattcttaataacttagtaagtattcagtaagtattcagctatcagtaatttgtgttttttgtgagttttgctgatagctgactgctgactgcttacagaaaatgtaatttacctgtttttttgttttaatagaggatttttagacgatgatttttacatatcaaagaactgtcagatttgccgatactgatgctgctggagtcgtttattttgccaatattttaagtatttgtcatgaagcttacgaagaatcactttggcattctggcataaatatcaaaactttttttacacatccatctgttgcttttcccatcgttcatgcaaatgtagattttttgcgtccgatttattgcggtgacaagttaatgattagtttaataccccaaaaaataagtattgataaatttaacattacttatgaaattaccataactgatgtaatagttgctaaagcaattactcgccacgtttgtattgatctcaatagtagaaccaagcaagaattaccagaagagataatttcttggttagaaacgaaccgcagagacgcagaaggtgctgagagaagaaagtcaagggaagagattatgtaattgataattgataattgataattgataattgataattgatgattaattattcataatcatgagatgatttagctaaaaaatccagtgctatttgttgcagttgttgacggttgattttaccttgttcattacgaggtaaatttgctacagaaatccaatatttaggaattttaaacctactaagtttatccttgagttgactttcaatatttaaaatagaaatatttgaatgctgaggaatataaatagctgttaatgcttctccccaatctttatcaggtataccaattacacaaacatcaattaccatatttgtttttataatcgctgattcaatttctatcggataaatattttcaccaccagaaataattttattactactacgtccaataatatgtaaatatccatctccatctacaaaaccaatatcatctactactaaactatccctattttcccaaagttggggataataacctaaagccaaagatttagcttgaatattaatattgcccgttaaattattaatagtaatttctgcatgggggagaattttaccactgttaacattaccctgcaaaaattcatcaggtttcaaagtcgcaacctgagaagctgtttctgtcattccataagtaggtgctaacctaatatgataaaatctcgctttttctaacaattcatcccatgctggcgcacctcctaaaagtacagtttcaaactgagatagccattttgtgagttgtgtattttgcagcagtctttgtaactgagtaggaactaaagatataaaaaaatctgaaggattaatatttggtatttgttgaaattcaatttctttaaatcgagtaatcactaatttaccaccagtagtaaaacttctcataaactgcattaaaccactgacatgatacagcggtaaaatacaaaaagaatttactgtttttaactgaaaatactctgtaaaaccttgtacagatgccgttaatgtttcccatgtatgaattgtaaatttaatctttcccgatgaaccaccagtaggaatcatgatagaattggtaattggtaattggtaattggtaattggtaattgaggagtaaactgacaacaatctccccaaattatatctggttgtaccaaattaaaaacttgttcccattcattttttccccagtctgggttacataaaaaaactggacattttgcagcacaagcagcaatgaaacaagctaaaaatctcactggttcgcgttcagatacaatgatttttggtagtgttgtatttttagataattcgattatttctaaaagtcctaaatataattctgtagctatttgataaaattcctggctattatcaacaattaaccaatgatgatttttgagtttttctaaatactctaaaggttgttccatagactttgagtccagtttgcttgtagttgggtaaaatgagagtatcccaatgaaaggaaaaatgaacgcagcaacactaaaaaatctctcataatctcttacctttgtgtactttgcgtcctttgcggttcaatcatatcaagtcttggagcattttatttccctagttaaaaataaatttacacatttgggatactcccggtaaaatagtgattgatgccaaaaccgactgcgcgatgattgctagataattctgctgctaattttagtgcagcttgtctaccaatggcagtttcaaatacagatgagaataccacatcaatttgatgttgttggcaaaattttcttaaccttgatggtgaacctactataccaggtttaatgacaaaaatactccgccaaccttgttgataacaattttccagttgttgtaatgtagctacggattcatctaaggcaatttttgtactataataattacttaattccagcatttctgagaatttatctacaggtaatggttgttcaataaattcaattttattggggaaattatcgcatttttctaaccataatttagctgcattatcatcaagtccaccattagcatctaaccgcagttttgctgattctggtaattgatcaatcaataaatttaaaatttccaattctgcgtttatatcattaactccaattttccatttaaaggttttataaccttgtttccataaattttgccattgatttaaagccgcttttcctgctggtaataatccgctaaaattcagatgatggtaatttagagattcgtgattttcttgtaaattctctagtgctgattcaaaaccaaattgacaagctggtaattgattgggaatatcaaaaattatctctgatgtaatttcttttggtagttgatgacaaaaatctaaagcttcttctaaagtttccgaaccaaaccaagaaataggggcaatttccccccaactcacttttcctgtcatatccacaagtctgataattacactttctcgtatttcccaaactccatgattggtaatcacaggacgagtgaatttttgactaatgttgcgaaaagaaaattgatatttcatgttgaacaattgataatagataattgacaattgacaattgacaattgtttcatgcaatgttgaaaaattatcaactttccattagacatctctacaaaagaaattatggaacttatgtatgggggcaggtcgaagcatttgggatatctatatctctgatttttccgttaaattatcgcccataagcttcgcccctacgttgcccctacgtcgcccgactccttacaattatcccaacaattatcccagcataaatcctgtacccaataataagcaactccaaaaatgtacagcaacagcaataaatttagagttactaactttttctggtaagtgatgattttctaaaacatgacgacataatttaaacgcaaaaggtaaacttagccaacttaataaagtccaaagggggaaaattcctaacacaactaataacaaagataagggataaatactagctgtaaaccaaactaatacctgtgcgcctttttctgtacctaaccgcacaataggcgatcgctttccagcagctatatcatcctttacttggtgaaaatgtgaacaaaataaaactaaactggtgacaatcccaacaatcacagaagctgctaaattagtcattgaccaagtttgagtttgactgtaatatgctgctgtcattcccaatggtccaaaggcaaaaaagcaaagaatttcgcctaaaccctggtatcctaaacgaaaaggaggtccttggtacatataacccaaagcacagcatagcaagattataccaattacagtagggtctttttgcaaaaaggcgatcgctattatccccaacaaacccgaacttaaacacaaattacctaaccaaaacattaactgcttattaccagttaaattcaccaaagaatgatgtttatttttatcaatacctgtttctgcatcaaaaacatcattactgatattttcccaagctaaaattaaaattgccgcagtcataaaaactgcaaatattaaaccattaaaaatcttagtttctgcaaatgctaccgccgaacctacccatataggcataatagcaacactgtacattggcggtttgatagcagccatccataacttatttttgggtattgatatctgatttgtagtcatcagtcttgataaattaaattactaaaaattgacttatcaattagattttatagttggctgcgacattttacggtagtaaattaccaaaaaatgctaattttgtgattgatagtttacctactgttaacaaaacttgacttgacattttggagtatgcaagagtatgtgttttcagttttaccagaacccagcaaattagaggctggttaatggtaacagaatatgctacctatagaaatacgaccatgacttattacactttaggaagataacttaaaaaaaattaacttatacatccatgacaatttcaccatgtcgcagcagtttctttatagaatataaagatttgcatcaattactgttagcagtgcaagaaaagtgctatgaacagcgtagccagcaaattgtgagtatttccctggcaattgatttcatagatcctttagtggtattagataagtttgcccaaaaaaatacattaaacttttactttgagaacagaagtaaaggtgaagccattgtagccattgatgctatcaaaaaattagatattagtggtcaaaatagatttcataaaaccgaagaatttatcaaagattgtctcaaaaacgtcattaattttggcaatataaaccctgtaatggggcaaccttttgccggtactcactttttttgtagctacagtttttttgatcagcatcactatttagattatccattttcatctgctactatttttctacctaaattacaagtagcagtcaaaaattcttcttgcaccttagttgtgaatcatttaattcatgctgacattaatattcaaacaatattacgggaattacaggacaaaattaagactctccaatctttagtaaaatcatcgccaaacattgaaaattcttcagccaattttatcaaaaccaagattaataatgccgataattttaaatattcagtattatcagctttagaaaaaattgaatccaaacatttaagaaaaattgttttagccgatgctttagatgtcaaatcatataattcctttaacttattcaaatctttaaataatctgcgacatttccatcctaattgttatgttttttctaccagcaatggtaaaggacaaaactttataggtgcgagtccagaacggttaattagtattcaagaacagcaattaattactgatgctttagcaggttcagcccctagaggtaaaacaccaaatgaagatgcagccaatgccaacaacttagttaatagtaccaaagaaaaacacgaacacaacctagtaattgattttatcacccaacgtttatcacaactcggtttatttccccaaattttatcaccacgtctgcgacaattatctaatattcaacatttatggacacccattactgcggtagtacctgctaacgtccaccctttaaaaatcgttgcccaattacatcctacaccagcggttgccggtgcagatagagatattgcttgtgcagaaattcgccgttatgaaaaatttgaaaggggtttatatgctgcacctttgggatgggtagatgcaaagggaaattgtgagtttattgtcggtattcgttcagctttaattgatggcgatcgcgctagactttatgcaggtgcgggtatcgtcgccggttctgatcctgataaggaatttgctgaagtgcagcttaaacttcaagcattactcaaagctttaatttaggttttggtaaataattgtttccatccccttgcggggaagttgatttggaaagggtttttgcccccactggcaatcatcctaattcccctgtttccatccccttgcggggaagttgatttggaaagcaactgtcgtagtgtcaaaaggcgggttaagtgccgtttccatccccttgcggagaagttggtttggaaagcccagtaaatctgggtaccatcaaccaaggtggaaagtttccatccccttgcggggaagttggtttggaaagcggtgtatatctcgctcatgggagcgataaaacaaagtttctatccccttgcggggaagttggtttgtaaagagttcacttctggaaaccttacagagcaagggtttcagataccccaatctacacacctttttttattgagaaaaaatcagtgcttattgagaaaaaactgactcattcaagagtcaaaagccttgctacaaaagcaatcgacacaggtcaacgaatttattaggttttcaaggttcgggggacgtgtgtcgatgttcttgatacactttttatatatacaacacatcgccataaatgtcaagcttttgacagatgacaatacctttgccactttcccgtaggttgggttgaacgaagtgaaacccaacttacagcaattttcaggtaaatgaaccacattttttaatctcacgcaaagacgcaaaggcgcaaaggaagaaaggaagataacaagaaggatgtggtacaaatacatgaaaactgctgtaaactcaacgtatttgttgggtttcgttcctcaacccaacctacaaatcaagatatttttgattttggcgaaggtattgatattggtataagtttgctcggatgtgaggaaatatctaattttagtattccccatccagaagcaaaaatcccaaatatctattaaattcggctacattaattatttttctggcaacaccctacctgtattaaaatataaatgtgattatttaatgtgttcattttcaagggttaactataatttttgatgttcacataaaaaacttttcaaactttttaaccttgatttattgtaaaatataaaataaaatataaaaggactgaagtccttactactaaccatgcagagtttatttactaaatatcgtctattctggtctattatttttctggtcggtgctttgggattgactttttttatctctctttctcaaggtgctgttaattttaattttgttgatttttaccaagctttatttcgagaaggtgaccctattaaacaaactattctctgggatttacgacttccgagaattattgctgctatggttgtaggggcggctttaggtatgtcaggcgcacttttacaggggatgttgcgtaatagtttggctgacccttttatcttgggaatttctgcgggcgctgggttaattgtgattattatgattgttttgcaggtgttccctattgcgattccttttgctgcttggttgggggcaattttaacttctgctcttgttattttcctcggtcgttctccaggaggaatttctgtagaaaggttaattttgggcggtgttgctgttagtgctttgtttggttctgtgcaaagtacgttattattaatggcggaagatggtcaggtgcaaattgctttaagttggttggttggtagtttaaatggtcgtggttggccagaaatttctactgctagtccttatattattttggctttattatgtggttgtttgttagcgcgatcgctcaatgttttggctttgggtgatgagttaactgtgggtttgggtgtttctttatttcgttctcgtttattaattggtggtgttgccactttattagctgctggtgctgtgagtattgctggtttaattggttttgtgggtttacttgttccccatgctgtacgtttaatggtgggaactgataaccgttttgttttgcctttttctgctgttgctggtgcttggttattgatgtttgcagatttattagcgcgactcggtgcggtggaacttcctgttggttcggttactgctttgttaggttctcctttgtttatttggttactttatcgtcgttccagtggtttaggttagaattatcaattatcaattatcaattatcaattatcaattaaaaactatgcctttagaattagaaaatctctctggtggttacactgctttacccattgttaaagatgtgaatttgtctttacaaactggtgaatggttgagtttagttggtgctaatggttctggtaagtctactttattaaagttagttagtcgtattctctctcctcaaggtggagtaattttattggatggtaaagctattcattctcaaccacctaatttagttgctcagaaattagctcttttaccacaacaacaacctgttcctactgggttaactgtacgtcaattagttagtttaggtagaactcctcatcaaaaatggtggcaatgggaattaactggtaatgataaacaaattgtagaaactgcaattcaaaaaacacaacttgaaaaatttagcgatcgcctagtagaaaatctctcaggaggtgaaagacaacgggcttttttagctttagctttagcacaagaacccaaggttttattattagatgaaccgactacttatttagatatcaattatcaacttcagttattagaattactcaaaaatctcaatctccaacaacaattaactatcgtcactgttttacatgaattaaatttagctgctcgttatagttcgagaattgctttattaaaacaaggtcaactttgggaagttggtacaccggaaactgtgttaaacccaagtaatatttctgaagtttttggtgttgaatctttaattattcaaactcctattggtttacaggtttgtgcagtttcatctttataaattgacaattgacaattgataattgacaattgttgtactcaagttttaaaacctctcttttctaggagagaaaataaaaaattgcctatttcctcttctatttctgactcctgaccgggaattttagattttagattttagattttagattgaaatcaaagtctaaaatctaaaaataaggtttcaagcctctccattcatggagaaaaatacaaatgtttttcgcctgcaagcctcttctttaaaggagaggataatccaaaatcgtcaatccaaaatccaaaattgattgactcctgctataactgtcataatttatcaacagttataaattcataaccctgttgtaacagttggggaatcaaaattttgatagtttctgctacatcttgtccaccacaaactccatcatgtaatactattaatgatccattttgaacttgttttaaaactcggttcacaacaatagaaacaccaggacgcacccagtcttctggaacaacactccacatcactggtctataattccactgttgaaataattgtaatattttgggtgtgaaaaaaccgttaggaggacgcacatctctcacttgttccggttgtaattcacaagcattataaattgcagtttgggttttttctaaactctgtttaagttgagtttctgacagggtgggaaatgaatgatgttcgtaaccatgtaaccctatccaatgtcctctatctttaacagctttagcaatatcgggtgaacggttaacacaaacacccaaccaaaaaaaactagctgtaattttataatgttctaaaaccttcaatacttggggtgtgtattgaggatggggaccatcatcaaaagtaagtgctatttttttagtcttactatctccacaccaaagacagtggggaaaagttggttgaagtatgcggtaaactattggaaatagaggtgcaaactgcataattgataattgataattgataattgataattgataatttgtaattaagatttaattttctgcaattatcatcatgttaattagccttcctaaacttccgatattcccaaggatcaacaaattttcgatcattccaaactcctagcttttgctgttgtgcttgtgcttctgcctgttggatgatatctttactgggacacttgcttaaataaggacgataaactttagctaaaccttcctctaacaaaacttgttggataaaagtgccattttttaatcgcacttctgccaattttctaccatagcgatcgctttctataatatccaacttcacgcgatcgcctgactgtttcaccaattcttgtacccgtatttgtgcttttactccccaattaaattgatttatatcccgaacccgcctactatttttttctttgttggtgtgaggtatttctggtgcatccacacaagccaatctaactgtaaatttttgattatctgcacctcttaacaccaatgtatcaccatcacttaccctttccacaacttcaccagagccagcaaataggatattatattccatcaaactcacaacaatgagaactgcacttaaaccaatgataatttttttaattaatttattcatttaacgataacaacagtgacgacacagacaatattgatctagatgctttagaagatgcagttgcggatattgaacaatatttagcacaaaaggacaaaaaaccgaaaaattaagaattgttcacctatgagttaattgtcgctgggcttcatataacattaaagctgcggcgatcgccacattcaatgattctactccaggactaaggggaattttaacttgagtatctgccattgcggctaaatcatctgacaaaccagcaccttcatttcccagtaaaattaaactcggtttttgccaatctacgtcccaataagttaaactcgcagttggtaaagtcgcaattacttgcattcccgcttgctgacattgttgaactgttgcttttaaatcttcacttactgccttatttaaacgaaaccactgccccgcagatgcacgtaaaaccttggggttatctaaatcaacactatcatcactcaaccataaacccgacgcacccgcagctgccgcagttctaataatagttcccaaattaccgggatcttgcaaagtttccacagccaaaactaacccactccaaccaacttggttttcctgttcaccccgttttgcagtcgctaccacaccatctggttgtactgtagttgcgatcgctgctaaaacttctgtactgacaatttctgcccgattacaccgattacaagccacttgccataattgaggatgtgtctgttcccattgcggagtacagcaaactacatctaaagggtaatcaaccgtacaagcttcttctaacaagtgcgtcccttccaataaaaataattgttgtttatgcctctctttggtagagtgcaacttgcggatctgcttaactaggggattttgtaaactggtcagcacgattttaaattttagatttcggattttagaatgatctaaaacccaatattatgttaataatgcggaacccgggacttgaacccggaagccttgcggcactagaacctgaatctagcgcgtctgccaattccgccagttccgctggcgtttattatcttatcaccaatttcctattattgcgtaaatcttgagaattgtcaatataattctttatagggaacaggtgactggtgactggggaattgatgagagttgattgggaaacagaaaattgattacccagtcaccaatcaccaatcaccaatcaccaatcaccaaacaaaatgtagacaaatctactctttactgtagaatcgaaaccaacttcaaacctttattgttacttattttttggaggtaggcttattaattcttctagcagcttaccagaggacaagttgtcacctgaagcagactcctcagtcttgcaaatttggggtggacattctttgcaaggtcatgtaagaatcagcggggcaaaaaattcagcattggtaatcatggctggagctttgctttgttcaggagattgtcggattcgcaatgtccccttattggcggatgtagaacgcatggggcaagttttatccgctttaggtttgtccttaaccagacaaggggatatgttagatatcaatgccctagatatcagcacatctaaagcaccctatgaattagttacccaactgcgagccagtttttttgccattggtccaattttggcgcgattgggtgtagcacaaatgccattaccggggggttgtgccattggtgcgagaccagttgatttgcacgtccgaggactgcaagcaatgggggcagaggtgcaaattgagcatggtatttgtaatgcctacgttcctggtagcaataaaagattgcaaggagcgaaaatttacttagatactcccagcgttggtgcaaccgaaaccttaatgatggcagctaccttagctgatggggaaaccattattgaaaatgcagccagagagccagaagtagttgatttagccaacttctgtaattcaatgggagcaaaaattcaaggtgccggtacaagtaccattaccattgttggtgtcgaaaaattacattctactgactatacaattattcctgatcgcattgaaacaggaacttttttagtcgctggcgcaatcactcgttcagaactgttactgtctcccgtagcaccggatcatctaattcccgtcattgccaaattgcgagatattggtgtaccgatcattgaagaaggttcagactgtttgcgagttttacccgccgaaaaactcagagctacagatattgatactttaccccatccgggatttcccacagatatgcaagcaccgtttatggccttgctaactttggccgaaggtgacagtatcattaacgaatctgtgtttgaaaatcgtctgcgccatgcttctgagttgaaccgcttgggagcagatattcgcgttaaaggtaatactgcctttgttcgcggagtgccaatgttatccggcgcaccagtaataggtacagacttacgagcatccgcagctttagtcattgcgggactagcagcagaaggaaaaaccactattcaaggactaaaacacctagatcgtggttatgacagattagatatgaagttacagcaactgggagcgaaaattattcgagtaaatgaagcatcggcagatgctgaattacattcaaatcatcaaatctcgtcagcttctgcatctatctagggtctagagcgtcgattcagtaatgctaggtaatttgtttttaccttgtaggggcgaagcattcgggtgataacctattgctgaaaccagttcatattccatccgaatgcttcgcccttacgattaatgaatcggtgttctaggagtcaggagtcaggagtcagggagagaatattagagcaagtcctaagttgacaatttcatagacaaaactatacttatattgacaaaaatcaatatatttttaggaaaaaatcaactacttgatatataatacggtgatatcaagtattgaattgagactattgccgacgcgaaaaccaagcaatgatggtggtagtctttttcagaaacttaattggaacacaatcgcgtctggctaaggcgtgaaagtctactgagggataactgctcccatgctcccgttgaagtagaaagtaaagtatagttttgtctaggttttatatagcagaatattagagaatattaacttttggcttttgcgattcatatcatgtccggtggaacacttacgatctctatcaacaatagttgatgtttggactaaccgatacaaaaaagctgattgctgttaactgatagctgaatgcttaccccaaaacaaaaataccccccatttctggagggtattttcttatttaactaagcttattaaacccagtttcagattaaccgttgattgcaggagcagtcaaagcaacaggagcaacttcaccagcagctaagtct

(The sequence listing continues in the following parts.)
